United States Patent Application Publication US 2011/0014706 A2 - sequence listing, part 10

SEQ ID NO: 18793 - DNA, 2741 bp, Arabidopsis thaliana landsberg
tgttttaaggagcttattgatggataagactatgttttaaaaatgttatggatgtaactatatttaaattacatttctttgattcaaaatataattatacaaatttataaaaataaaataagaattaagttaaaactaacgcagcggcgacgaaacgaacatagacacttgcggcagcgacagcgtcggcgtcagcggcagcggtaatggctgcggcagtggcgacgaaacgagcaataatctgcggtagagtttgccgccgccgctaccgcctgtggtggtgaaacgaacagactatatatgaaaacatatactaagcaaaaaacaaacttttggatacgactacattagatttctttacttccgtgaaacatgagccaagcgaattctggggaaaaaaaatatatcaatagttaggccccgttcgttttcctacaacatatattgttcgtttgtctgtcggtggattcagcgaccaattacagcgacaatcgttaataattgttgatgtgttgttcgtttgactgtcgctctagacagtcgctatattttaaaataaaattgtaatttatatatatctgaaaaaatatatttaatatatttatttactttagttttatcaaatttaatttgactacaattaatttactttatttgaatttaatttattttaacttaatttaataagaattagtttaatttaactagaactcaaacccatcgtgatatcgcaaagaaaaatattataaatttgtttatatgataatttctttaaaacaaatctaactcaaaatgatgcatattataaattttcgcagttatagaaaagtatatatataactaaccggaaaaaaataaaagtaaatattttgacagaaaattatcaatattttgaagtcgcaataaaagacacaagcgagaaaaaataaccgttaatattttgttacgaaagttgcgattaaaagacacaaccgttaagaatataaaaaacatttatttaagtttaatttaattatttttaattgtcttttaatttatatttttttatcgctaagttgttcatttgcatgtcgatagattcagcccgagtcttcttgaccaatattatccactcactggtatcatccaaaacacaatgacttccaaaacacaacgaccaatactcattcactcaacagaaaattcaaagaagaacccgcaagcacttttctatgcatggtttcgtaacttcacaaaagtaaacagccaaaataagtaattcgaacccatggcggggttaggccttcactatcaaggagacgacctcaagtcaaccactaagtgcacatgaggattatttaatagccagcacttggatagctttatctaacaccaagagagaaagataagagtgagtgagagtaagtaagaatgggttttgcagagaagaatctttatgattttcgttttcttttgttcatatccatcattttgagctattctatttcagcttctgcaactatcgcagaagcaaatgctcttctgaaatggaaatccactttcacgaactcatcaaaactgtcttcatgggtccatgatgcaaacaccaatactagcttttcctgcaccagttggtatggtgtttcctgcaactcaagagggagtatcgaaaagttaaaccttactaacaccgctatagaaggtactttccaagatttccccttctcttctctcccaaaccttgcttacgtagatcttagcatgaaccttttatctggaaccatccctccccaattcggaaacctctctaaactcatctactttgacctctctacaaacaacttcaccggagaaatcccactttccttaggaaatctcaagaacttgacggttctttatcttttccagaactatctaactggtgtcattcccgcggaactaggcaacatggaatccatgatcgatttagatttaagtgagaacaaacttaccggttcaattccttcttccttaggaaatctcaagaacttgtcaattctttatcttcaccataattatttaactggtgtcattccctcggaactaggtaacatggaatccatgatcgatttagagttgagtaacaacaaacttaccggttcaattccttcttccttaggaaatctcaagaacttgtcaattctttatcttcaccataattatttaactggtgtcattccctcggaactaggtaacatgattaaattagagttgagtaacaacaaacttaccggttcaattccttcttccttaggaaatctcaagaacttgacgtatctttatcttttcgagaactttttaaccggtgtcattcccacggaactagggaacatggaatccatgatcagtttagatttaagtgagaacaaacttaccggttcaattccttcttccttaggaaatctcaagaacttgtcaattctttatcttcaccataattatttaactggtgtcattccctcggaactaggtaacatggaatccatgatcgatttagagttgagtaacaacgaacttaccggttcaattccttcttccttaggaaatctcaagaacttgacgtatctttatcttttcgataactttttaaccggtgtcattcccacggaactagggaacatggaatccatgatcattttagatttaagtgagaacaaactttcaggttctgttcctgattgctttggtaattttccaaacggaaagtttgtacctccgtagaa

SEQ ID NO: 18794 - DNA, 351 bp, Arabidopsis thaliana landsberg
  unsure (1)..(351): unsure at all n locations
attgggttatctccatagatgccacgttatttttaccggttttatacttcatttcaatttatgactaaacccattagtgggtttcaacttgtatcaaatgctagataatttacccgggcgtattatatacatctctggatgataatatttannnnnnnnnnnnnnnnnnnnnnnnnnnnnnnnnnnnnnnnnnatattaaacataattgaaatttttgtgtggatatcagaatgagggaaaacggagaacatttttgaatgaatgttccaatttggcaagctggagatcgtatgtgcatatatttttatactctagaggcgtgtggaacagcatctggtatgtcaaacccc

SEQ ID NO: 18795 - DNA, 580 bp, Arabidopsis thaliana landsberg
ctgtttactttttcaaagttttagaggtaacgccgggggactgggggacaacgtcggaattttagagataactgccgagcgactgaagatgacgtcggtgtgttagaggtaactgccgagcgactgaaggtaacatcggcgttttagaggtaacggccgagttagaacgggctgcgccggccatgttgagggtaatagccgagtgatgatgtggaagtgaccgccgggtgacaacgtggcgcgctagtgttttgaaagtaactgtcgggtgctgactgggtgcttttagaaacggcatctgactcgggaatatcccataagtattgcgcttttagccgcctctgctttctgtgccctagttcttgctttcctgcctccgaatcctctctgcaattcgcctcccactctgctcgctggtagaatcgagatggcacccaagaggaagacctcgagcgcgtctgctgtggtgattcctcccatcgaccccaacagccagttgcctttcgcaggtaaccacatgtccatcatttctgaaactgaacttctccacctcgtatctgtcggggttcttcctccgcga

SEQ ID NO: 18796 - DNA, 610 bp, Arabidopsis thaliana landsberg
caaacagagtgtattatgagcacaagatgtatacactccatgagatctacccacacaaatcccccaaaaaaagaataactcttttagcatgattagaattatgctttaccagcaaaggttatataataaagtgtgcgctttgctcataacacttttctgagcttgcaacaatgtggtttcataaatggcctaataaatcttaggaaacaaaaaaaaaacacacacacacaataacggtttcaattctcaatgatccagaaaaaacgagtagtcttgttgtacctggattagccagaatcaagacaagatcaatgtcagggttactggctgcaacatccagagcaagagaagctccaatagattctccaactatataaatgggtctatttgggaaacggtagtgctctgacctaactgtcttctcaatgagcttcccaatatctgaaaacaacagtaagattttcacaacataagattacaaaacgctaatgcgacttcagataatgcttaagaagccctcgagcaggagtacgatcttttactggaaagtgaaggcaccatatgtcaaatatcctatgatcaataaagataatgagatcatcacaaagag

SEQ ID NO: 18797 - DNA, 1427 bp, Arabidopsis thaliana landsberg
ttgccattttagcaaattaatcatgtacttgaacttatttacaatgtcatgccactgacatttaatattttaacaaacttatttttaaatctacatataaaatcgattatgttactaaaatttataaaactaaaagaaaaaaatcacaaaaatagtttaaatctttctaaatctaaactacaatatactacacactaacatttcttttaaggagatcaattagtattaatcaccctgattttttgttttaaatcatctattttcagttaataaagtgaatcaaatcttatattacaatatatgcttcaatattttcattaaaaaaataaattacataacattttaaaattttgaaaccctaattatttcccaatccacatttttcgttttaaatttgcatttgtacaaaataaatcactccctaaaactttcttttctgatttttattaatttttgttctttttctggtaaaaataaattgtacatgcattaagctaatattgctgactcaaataatgttaacaaaatgcccaaatttaggctattgaaataataataaagttagtaaaaaacacaagtatatcaatctagaattatgattaaactacgtatttatatataatagttgttttacaaaaaatagcattatatatattaaattttttgaagtacctttttaaagtacttttgtgttagtaaagtaagaatttacaaagaatgtcatcacattaaagtaattttttttaaatattttttaatattgttgatatatttttaactttataaaacattattattatttaaaatttaaaaaaaaatatcatgagacgggacagatttggattgatatgaaatattttggggcgggtttggactaatataacactggttaaatatttattttattattttattattaccaatttttttagttacaacattaatataaaattatataactttaatactaaattaaaaactttaaaatttaatattattatatatatgaataaaacattaacccatggtataatgatgtttactaaactaactaaaacaagtaataacaaataaactttaatcactatcttctgatctcattgatgacacgtcaatatcaatatcttctaattcttctttattatctcgtaggaattccggttgtctatatccggctctggtccaatcataagacatgcttgagcttcaggagaatctgggttcattcttgatcgagtttcatctagtatttgacctccaatgccaaaagctcgctcgatagaaattgtagaaatgggttagaaagaacgtcttttgcaatcatggctaaaattggataatgagattgttgctcttccagccatgaatgatttgaaagtattacctgcatctgcatcactaaactcaaaatttgtagataaataatt

SEQ ID NO: 18798 - DNA, 3159 bp, Arabidopsis thaliana landsberg
ccaagatggggaggttaaccagttagaagaagttagctacatctacaatcaaggtggctacaaagggtacaacaactgcaagatgaacaaccccaacctctcttaccacagcacaaacattgctaatcctcaggatcaagtgtatcctccacaacaacagcaagggcagaacaaaccttttgttccctacaatcaaggttttgttcctaaggagcaatttcaagggaactaccagcagcaaccaccacctgagtttgcacctcaacaaaaccaaggtcctgatgtacatgatgatgaaatgaaacagatggtacaacagatgctacagggacaagcatctagctccatggaaattgctaagaagttagctgaattgcaccagaagatggactacagctacaatgacctgaatgccaaagtggaggcgttgaattccaaagtcatatacttagaaggacaatccgcatctacctctgctcccaaagttacgggacttccagggaagtcaattcagaatcccaaggagtatgctaatgttcatgctatcaacataaggagtggaagggagttatccactagagagagacccaagtcagtcactgaggacagcgcataccaagatggggaggatttcagtctcaataaagatcaagctgaccagtcactcgagcagccactcgaccagtcacttgagcagccactcgagcagccacttgaccagtcactcgagcagccactcgaccagtcacttgagcagccactcaaccagtcactcgagctgtcactcgaccactttactcgaccgaccttcccaggaacatgacctaccgctcccaaactagttgctgtcaaaaacaaagaaaaagtcttcgttcctcctccttataagcccccatttccatttcctggtcgacacaagaaagagttagaagataagtacagagctatgtttgccaataacatcaaggaagccaaattaaggatacctcttgctgatactctaacgcgtatcccggattcgcaaaagttcctcaaagacttgatcatggagagaattcaagaggttcagaaaacaacagttctgagccataagtgcagtgccatcatataggagaacaatgtctcggaaaagctaggagaccttggttcattcactctaccatgctccctaggttcattgactttcaatgaatgcctttgtgacctaggtgcatcagtaaatctcatgtcactctcagtagctaagaggttgggtttcaacaagtataaatactacaatatctccttaatcttggctgataggtctgttagactacctcatggattattagaagatttgcctatcaagattggaaatgtggaggtgcctacagacttcgtagttctgaacatggatgaagaaccaaaagatcccttgatattaggaaggccctttttggctacaactgcaacaatcatagatgttaagcaagaaaagattaatcttaatctagggaagaatcttgaaatgaagtttaatatcaatgatgctatgatgaagccgacaataaaagaacagaccttcctagttaaggaagtggatcgactagctggtgaactgctagtggaacttgaagaagcaaataactcaaaaactgttttgaccaagagtggtaaagccgggtatctccctagtgaaactttgagttctgagaagtcattagactcacacaagtcagcagttggctcaaaggtttacaaaggcttgatggggtcagacacaaaggttatgaaagctaatgaagaaagttcaacacacgctcgaccaactgattccaccaacaactcgaagaagcctccaacttgccctaaaagctcatgctcgaccaaacaactcaaggcaaacactcagacgtcagatgattggttagaactcaaagagagatctaaatggcaggacaaagccatacaagagctaacacatattgtgaaagagctgaaagatcaaatcaaggagctcaatggaaaagccaaccaagtaccactcaacatcaaggacacccctgacgatggagccactattctggtcagcaaaaaaggatttgaattcacatcggaatggtctagaggaaaagactatcttgataaaaaagaagcttactgtcaggacatagccactgagtacccaattgcagacctgttaggaaaccctaatgagtatgatgatcactctactcaaggaggagaggagacctcatttcctctctacaacccaccctaagcgtaatgagtatgaagtcaagcttagagacttgaaacaagctcacttgggaggaaatcccatgtctatctttgtacatatctttattttccttgttgtttttgatgcatttggttcgtgtcttcaggagataagtataaagagctcagtgaagtggattctggctctgcgaggaaagcagtatactcgaccacagagcaatgaaaaatactcgaccatattttagcttatccacgccaggagatcactcgactgcggtgctggccgcagcagaagaggggaggtcgagtatactcatggcggtgctggccgccacagaggcaatgaggtcgagtacccacatgctagagctgatatagaacagggcgactctttaatgccctgggagcaatcataggcagccattgacgaccaactccgttcattcttcgactgaggtaagcgcctcacttcaccattgtactatataatctcttgtttatattgtgtttttgttatgtgttttgtcctgagtactctcttccaaatttggtcacacagtggactgtgtgatttaagtttgggggagggctcaggaagtgtgtgttgcattgtatatactcttgagttgagtcagcattcatctaaggcatagaaaaaataaataaaaaaattgaaaaattagagaaaatgatttcacaaaaacagagtgttcatgtagttgtattacatttagaatcgagtgtagagtgtttcatttaggattgtttcatatgcataggggacaatgaggagataaccttgtaagcatgatgatttactaaatgagttattagttctctgatgcatttgaatgaatttgaagtaaaaccaccccatgttctatagaaaccactcgttgcatgtcatgacacttttgc

SEQ ID NO: 18799 - DNA, 312 bp, Arabidopsis thaliana landsberg
gattttctcattctttctattctttctttttcattggttaggggaaaagtgcttactttatttgtattataagtttgataggttaaaccctagggagatgaattgttgcatcatgttgaaccctagattcacttttgcttgggcataatcttggaaggtctaatttgaattgtggcttatttggatttgaatcaaatggagaaaataaaaagaaaagggaaaaacaattccagaataaaaagaaaagagaagaagcccactccccgcctttcttttctttctgctattgtgggcctcctttctctctctttt

SEQ ID NO: 18800 - DNA, 2229 bp, Arabidopsis thaliana landsberg
atttcgtaaccatgattacatatccatgatatttcgccctgaaatgaaagcggcttggttctctgtgatgatggaagagagatgtattttcagacgccctactaagattttcaagataatcttgtagctaacgttacataaagctataggtctgaaatcactcattgattgaggccttgttatctttgggatgaggcagatgttggtgtgatatgtcgctgtaggcatgactcttgttctgaaaaactgtttaacctcttgaataactgagtctttaatgtcattccacaactgttgataaaaagctcctatgaagccatcaggccctgggactcggtcttctccaatagcaaacactgcatcccttatttcttcttctgttacttcccgagtgagttctgtattcacttcctcagtgacacgtttctgaaaaccaatgaagacattgtggtagttgatgtggtcttgtcgggttgtggtgaagagattagtaaaataactttcggccaccattcctatattttcatctctataatgtgttgtccctgaatcgtcttctattgctaccaaccgatttcttgcaattcttgcctttgttgctgcgtagaagtatttcgtattcttgtcaccaagattcatccagtttttcctgctcttaagtctccaaaattgttcctcttctttgtagacttgtgagaggtcctgtcttattgtgtgtatctcctgggaggtgtatccatcattagacaacgtctaatcaagtcgcttctttagcacaactattctttctgcagcattcgttttatttcttcttttccagcgagctatcgtttttctacagtttccaattttccagatatctatttgttatcaaactaattagactatgtatatagcagattttttatgagtatcaaaagcacaaaaacattaaattaatggataaacaactaatttgagtatgagatgtatcactgaagtgatacttctgataccagtctttgatgacatggcggattatgattagtcaagaaaatgttctttttgtgtgggaaaagaaagaaaaagaaaatcatttgctcttctcttctttcctcaatgatactaataccaatctcaccactgaaaactatttatttttaatatcataaaacatcttatataataaataaacattaaaattaataataaaaaattgttaatgatactctatgaatattatgtgcatgctcttatcgtctcctatttgttctattctaaaccgaaatactaatattttaaggaaatactttaagaaaaaaaataaaaatttctcacctttattcaatcaaagccaaaaatgaaaaaaaaacaaaaaaaaacaaaaaaaaaacatagaagcaagacaatcatattcatacaacgcgataagctagtatctctaaagtgcaaaacaataaaaagaaatatttctactatcttattctcataaactaggaaactctgcataatctctcttttacacaatgcaaagaataaggtgaagatgaactgattatctctagcgtactatgaaagtcaatatttagatgcaaattaggtgatttttattgtcgatattcttctttttctggacacgtcctcatattcgtgtatatttaatttcttctcttgtttttatacaaagccgaccatttggaaaatttaaaactaaaaatctcaaaacctgatgtaaattttgattttactttaaacagaaatcctacgttaaacaacaactatataggaaatgctgttacacacccattaatgtctataactagtacatcaatttacaacagatttattgtcttaaaaaaaattaactcccccacttaccccgtgaatgttcatgtacactagtccagtttaaacttaaactcgattatgctagaaatgattcacaaaaatcggtttagggaatcatcatccagatttggagcatcgtaatcttttggtaaatttttattagccgttcgtacaattcaattccaaattttaatttagatgagatttattatataaaaaaaaaacaatgatatatattcgacaatcgacatgttctgatgtcctatataaattcggtccttctagacaaaaccttacgttatacactttcaactaataaagagtccaaaccaaacaaaaaaaaaaaaaacagtagtttctcgacagaaacaaaatcaatatagctttaacattacgagaaag

SEQ ID NO: 18801 - DNA, 1978 bp, Arabidopsis thaliana landsberg
  unsure (1)..(1978): unsure at all n locations
gcggaacctcccgggcctgctttgtgggtaattcgacgataaaatctgctatgacttgggattttgcacatgtttgttccgagaatggatgtcatactcgctgagctcgattgccgatttagccaggcgtcccgattggcttggactgtgtaggacagtgcggagcggcatggatcccattatacgatggaatgggattgaaaatagggtcgcagtttccgagccgacattacgactgctaaagcgagtttttccatttgcgggtagcagattctgcaccggtgaattactgcgagacgtaaaaaatcggtttctgttcgcctctgtcttctcgaactaacactctgctgactgcattgtccgatacagcaacatataagtagagttgttccccgattacaggttttgcgaggattggtggggtcgccaggtatttcttgagttcctggaaagcctcttcgcatcggatcgtccactcgaactttttgtttccccgtagcacatcgtaaaaggctaagtttttttctgttgatcaagagatgaaacggttgagggccgcaactcttccggttaaacgctgcacctctcgcttgttttgatgcgatgccattcccaacaatgcctcgatttgctttggattcgcctcgatgccgcggtgggtgaccaggtacccgaggaactcgccggnnnnnnnnnnnnnnnnnnnnnnnnnggggttgagtttgacgttgtataagtttagttgtttgaaacattcgcgcaggtgggctatgtggtctttctcttccatggattttaccaacatgtcgtcgatgtagacttccatcgtcttcccgatctgtaaggcgaaaattttgttaacgaagcgttgataggtcgccccggcgttcttgggtccgaagggcatcactcgatagcaaaaaattccttgctctgtgtaaaaagcggttttttcttgatcttcggggttcatcataatctggttgtaaccagcaaaagcatccatgaacgacagtagcttgtttccagaagttgattctacgaggcgatcgatgtgtggtaatgggaaactgtcctttggacaagctttgtttaagtccgtgaaatctacgcagactctccatttgccgtttttcttttttaccacgactgggtttgcgatccagtcggggtacttcgcctcggtgatggatccgatcttcaataatttttctacctcggcctttacggcttctgctcgttcccgacccaattttctcctcttctgcttgatgggtttaaaagttggatcgatgttgagctcgtgtgatacgatgttaacacttactccgggcaaatcctctggagaccaggcaaaagtattgacgttctctttgaggaaaccggtgagttcagctgttagttcttctcctagatctccgccgatttctacgcatcgctcgggctttgcatcgtcaaggcaaattgagatgaccggatcgggagttggtatcttagattcccgagcttcttcgatctttaattgctataactgctcggagatcgacttttctttggctcggccaagtttggccttcttatgattcgcgtcggccgtcgattcagtgacggggttcctaagcttgtgcgctgccatgaagcagatgcgagcatttttctggtttccctagatggttttcacgccgtcgtttgtgggaaattttaggcataggtgatacgtcgaggcgacagctcggaactgatttagccatggggtgccgataatcgcgttgtacacggttggttggtcggtaatagaaaaatcgacgatttttgttactcctttggctcggactggtagtttgatggttccgagagtcatagtggtttcacctgagaacccgagcacaggtcgtggagttggcacgatttgcgtcatatcgattttcatttctcgcagagttgtaaggaaaacgatgtccagtgtgcttcccggtcc

SEQ ID NO: 18802 - DNA, 2152 bp, Arabidopsis thaliana landsberg
aacagaagttagtgtgggacgtagaaaactttagttataataatccaaaattaaaaaaaaaaatctgattatggtttgggagtgaatgtaagttttaagtcatattttatgtatttcaatcctctagagatatgaaactgtattcatgatcgaatttgaatagttgattgatgaccttatggtatttgtgacgagatgtctatgaatttacacattttacatcatgatcataatgaccgcaagtttatatgaatatatttttaaaatatagagatgtggaaacaactcaccaataaataggaaaatattagagtagataatacttttggtgattatccattattacttattctccaaataatttagtgtttatctccttatccaattacgacttgtttccacgtaaatttctactataaatacgttcgtttgctcattgtaagatataagtcaaataagtgaagtttatttcactctcaaattctctcgtctctctttatttctttattgtttttatttatagaatattatataatattcaacagaaaagtcgttactatagattcagttattttaacaaaattatggtagaataaacgctgtgatcacgtaaaacgttttttcaataatccacttttattataattattaatattttggtcatgcatatttcgtatcaagtaactttttatgaaaaagcacaaaccaataaacaatctttcaccatcttaacttacaagaaaaaagaaaatactacataagctgcaatgatcctagcttactgtattgaactcaacaaatccatctcaatcggttgtgctgttcggtcttcatagttaagcttcttcactataccctaaggtataccatctgacccgaatttacccctagcatcttcgttgctaacaaaagtgaagctggaaacagatggtgaagggccctagagggcataagttatgccactaattcaaagaatattaatctacagatgtgttgaatcatgaaactataaataatattaggtgaggtgaataacgtatggaagttaagttatagtgttattgtgaaggcatagaaattttccttgttgcttttttagctatatgattacttgtagaagttaagtaattgagtagacaaatgtagtaggtattgtggaagttgatttttacaaaataaagatttgagttcttgaattttaggtaattgatttcctatcataattcccttaccatatcatctccaattcttttttcatcaggcatatcaagtatcaaatagttaagtttttacaaagtaacataaactaatcaacaatctttgtgatgacaatgtagcttccaacaaaaagaaaatcctacttaagctgcagtgattctagcttactttaaaactcaacaaatccatctccatttgttgtttctgttcagtcttcgtagtacaccttcttcactacgccttcaagtacaccatctgacccaaaattaccgttaaattcttcattgctcacaggaccaggaagctgaaagttgatggtgaagtggcctggtgggcataagttctgtgttagcattttgaagatctgattgtgtttgcaaactgtctgctcccccgtcgttgttgctccctttatcataatcttaccgtctggttctatttcgcagctgaattcctctgcatatttaacaagtcagattcagcagaagacaagtaaaagcacacgaaacaaagctcaaagcacctcataaacacgcttattaaccgtgtgcaaggaaataattgagttaacacacttattacacaaggctgaaacttctcaaatctatgtgcaaataatatttgctctgaatgaacaaatatctttaactagctttagaaatgataatttggcatgtcatttggaaacttcacaaagatatggagaggtggtaaggcttactctcatcccttgaaacaccaggcaatgcaacacgaaagtaatatgagtcttcggattcagcaagatcaaccaacccaatcgttagtccaatcttccccattgcagcacttcccgtgagagcaactccggttttcgtcacactgcccaggttagcgtgctgtgaacgtgagacagataaaagtaagtatcatcgcaggccctcctactttctct

SEQ ID NO: 18803 - DNA, 499 bp, Arabidopsis thaliana landsberg
gatctaaaacctagtccaccttcagagtgtgggttgcaaagcttatcccatgcaatccagtggataccattactattctcattagtttttcaccagaaatttgcaatagcactactcaactttgagcgaatagccttagagagtaaaaaacacgatataacatatgtcggaagggcttgtgctactgactttataagaacctctttgcctcctttggacaagaatttggctgaccaggtattaagtctcttttggagtctatccctcacaaaggagaaaacttgggttttagagccatgaattttctcaagtaaacccaagtaagatcccatgcccccatcccggtggatacccaagtttgattttatggtactctgggtcgtattgtccacatcatgaccaaacattacagacgacttagcagcatttaactgttgtcctgatgcctcaccataaatgcggagaatattgatgatctcttgaccttgagctgggtcac

SEQ ID NO: 18804 - DNA, 1759 bp, Arabidopsis thaliana landsberg
  unsure (1)..(1759): unsure at all n locations
tatgtacgatagttctattaaaattntagataataaaaacaaaaccaatgcattaaaaanttatgggtccattctaaattttatttttctgttgtatctatttttttttaatatttaaaagaagaaaaaaaaatgggccccttaattattcaaacataggtgggacccaggccatcgtactacatgttcccctatctgagctggcactgtatatagagtaattcattgtttatctcttatattttagaaaaaactctaatttagaagcatatattagagaaaaatctcctcataaatagatgaagatataaatatgggcattagaaatggtctaaggagataagaaaaccaaaggacattcttttttaccaaagcatatgattgattaaatgggggaaaaaattggggacaaaaatctgtagagattgaggcgattgatgtgaaaatgaatatgatccagtggagggtgttagagggacctctgaagagagagtacaggagcttcttgaaaatgttgaaagtaagccctaagcaaggagggtctggaaatgtggtgaagtggaacttgaagtatgagagaattgatgagaaggtggctcacccagagaggctgcttcagttcttcgtcgaagtgattaacgagattgaccaatacctattgtctgaggattaggggacttttctccctggctcatgtgtgggagagttattgtatgcgtacacgtaaggactcttcttgtgttttatatgtctttctctataatgtgatctcttgagatttagagaggtatccaagtgtgctatacctcatgtcttcaagttggaagttgtataacattttaagttgcttatgagtttctcatatatgtatagtgtgtttgttggttgaaaaatcatattataatgcaacgataccatgttttttatctacctgtgtttagttttctttgtttgctaaatcacctaatatatttatctccctaagtattgttttttttttttttttgctgaatcatctaatacatatattgtttaaattggttcagaacatcaaaaggtaacattgtaattcttaatgacatttggcggagagatattttcgtccattttggattccacttttgcaacacgttagcaaagcaaagtagcaagccatgtagattatttataaacttaacgcccgtttctaaaaaagtttcgcatttttcatataaaggataggactttaactgtgaaggctaatgacccactcctttaaatcagtgcgacaaaaaacttatggttcaaaataattcaacactacagaatggatgtttaaagatatcagcagagattatcatctcgattctcgactctgcttatctttatattctgattccatcactagtcgtctattttcaatctttatttctatgtaaatttaattttttaaaatcagattggctagtgaataagttagtatatttaattactaaatctccctaacaaaagccgaaaagttaagccggttctaaactagtcacattaactccgttctgattttgagcactataatactgaaaagaacacagcatactttctaaaaaacggttctaacgcagcatactgtcccaacacagcaaaggtttatttatcaaacaaacaattgaactaataccaaaccaaaaaaacaaatgaatcatagcatataagaccatcttatttagatctttttcatagaaaagttataaaatattatattctggaatacctcaactat

SEQ ID NO: 18805 - DNA, 732 bp, Arabidopsis thaliana landsberg
  unsure (1)..(732): unsure at all n locations
gncaaaacctctaatttgttgagcactccaaactcggaagggattgaagagggggtgaagttgttgtaagagagataaaggtaacgaagctgatgaaactggaagaggctgctgttagatttaagagttccactgagacaggccctgagtcgtagcttcatgaccgcgcccgtggagttatcgcaccacaccccattcaaggagtcactatggttgcaagcatgagtatcaaactcgtttttgaactgcgtaaaagctttaatctggtggtgaccacaaggaccaagaccaactacagggttattaaaagtgaagaagcttgaaggggagacacaagagagtaagagtatcaagaggaaatttaaacgcaaaagcgattcagacatggtcatcagaaaataatgggttttgatttaaggaatatgagagaggattttgggataaataaagatcggagattgacttggaagaaatcagagctaagtgaagtctttgcattcgggcttctagaaaagtgtggctgataagccactcaaaatccacgttagatgtgacttttctaatgtataatttggattcgagtcacgtcactttgaaatttctcacatatacagtacctttaaagtacatgaataataaacttggcaaaagaaaagtgaaaaaacgatgacctcgaagcaccgaggaaaagcttaacaattatttttatttttctattcttctattatatta

SEQ ID NO: 18806 - DNA, 636 bp, Arabidopsis thaliana landsberg
gagaaaactcctaatcttggtggcattccttggtcgtggccactcctggatcgatcgaattttctcagatcaaccgatactccctggtctgagataatatggccaagaaaaccaacgctcctttggcaaaacgagcatttacttaacttcgcaaatagctcatgttcccttagccgttccagcaccgcccttagatgtttttggtgagcttcccaagattttgagtaaacaaggatatcatcaataactcgtctaggaaatcccggaacacactgttcatcattttcatgaaggctgctggcgcattggtcaatccgaatggcatgaccacaaactcataatggtcgtacctcgtccggaaagccgttttccttacattcgttggctcaatgggaatttggtgatatcccgaggccaagtcgatttttgaaaaccactgtgcgcctccaagttgatccatcaactcatctatccggggtaaatgatatttgtttttcatcgtaactttattcaatccccaatagtcgatgcatagcctaaagctaccatctttctttttcacaaacagaactgacgcaccccatggtgagctactcagcctgataaatcctttctccaacaactccgccaagtgtt

SEQ ID NO: 18807 - DNA, 756 bp, Arabidopsis thaliana landsberg
tgtgggtttaaatttttcttcttgatgggagaccttgtttaattgcaggggcaatggtgttggcatgggagcacagtcaagcataccagctacagcaaggaggtcctctgcgtacttctgttgcgagagaaacagtccccctgaatggaattgcgcctgtataccaagaaaatagtgtagctggcccatgtctttcattctgaagcgtttactgagttccacaaggagagtagctaaggtatctgagctatttcccgtgattgccatatcatcaacataaagaagaagcatgattatatcttttccttttatgtagatgaagagagaagggtcagacatactgcagatgaagccaaactccaaaagtaagtgctgaacttgtcaaaccatgctcttggtgactgttttaatccatagagtgatttgtgtaagtgacagacatgatctctttttgcaggatcaataaacccagcaggttgtgtcatatagacggtttctgtgagatcaccatggaggaaggcgtttttcacatccatttgcttgatttcccaacccatgattgttgccacatgaagaatagtccttacagtagcagttcttgctacagggctgtaagtttcaaggtaatttattccttcttcttgatcaaatcctttagcaactaacctggcctttaatttatccagagatccatctgcattgagcttggttctgaagacccaatggtgcacgaaagctctagtttttttttttttc

SEQ ID NO: 18808 - DNA, 1973 bp, Arabidopsis thaliana landsberg
aaaaaatctccccctaaattttcgtttccccccaattcgcagaaattttttaaattcctattattaattaaaatcaaaaaatcaaatcgagggaggagaagaagagacaagaagagagaagactcagaagagagaagaagagagaaaaagagagaagagtggaattatctgggtaagcatttcgattttctgggtatatttttcattcaatttacgtttcacttatagatttctgatatgcaattgacaatttttgatttcggagatttaagattcatattgtacaacctggtttatttattgattattctagaatttctaaatccaaaactcagggaattatgagccacctctcaggagcatcgaactcgtgtggaacctccattgtccgaccaagaccaatggttcctggaattccaaagcagtgttggtgtggcgatgaaatcgttgagaggatttcaagatcaaatccatttccgtaccgtcgttattaccggtgtggttttgctgcagaaaaaaaggtatagatatatctaatttgactagtcactaaaatacctagatatacctaatagatatacctaatagatatacctagtttatacatagatatacatgtgatttaacaatttttacaatttcaaaatgtagcttatgaacgacaatcatgtgtttaagtgggtagatgagacttttacacatgagattgaacagttggaatttcaactcggtgttcttgaagaagaagtaagagtgatgaagatggaaaggaaccaagagaggatggaaagagatccgatggaaaagaacaaaaaagggaaggactttaagatggtaatcatttttagttctcgatgtttaatcaccatggcaattgttggcatgttgtgtttgtcgtagaaattcaagcctaagtgttgtaatgtttaattatgaagactaagtgttgaatttgatgtgatgaatggatatgaatctaattagaaagactaagtgttgtgttgaatctagttatttcggttaaaattcttttcttatcaattacaaaaacatataattgtacctagtgttacaaaacagaagtagatataccaaaataaaacaaaaaacctaataaacatgttcaacagttgtaccaagttttcaaaagcttaaggagaaatacaaaaaaaaaacaagtaccaagttcgaacagatgtaccaagttttcaacaaccaacatagttatacctaaaacaaaccaagagttgaaattgcttaaacattcttctttgtctttttcctcctatacctcgtctgtataggactccgatacaccggcttagcatccgtcctcgactctgccagcttcttgaccacctttggctttttaactccctcttcactaggatcatctccatcctcatgtgcctttcctcgcttcttacttggctcagccaccttagcatcttgaggcacctctttctccttctcactatcagccacttctatgtccttctcactttcaggcaccccaatctcacttggctcagccacctctttctccttctctccatccatctcatcatcttgaggcacctctttgtccttctcactatcagccacctctatgtccttctcactttcaggcaccccaatctcacttggctcagccacctctttctccttctctccatccatctcatcatcttgaggcacctctttgtccttctctccatccatctctccatcactctcagccaccttacctccatccatctcatcatcttgaggcacctctttgtccttctcactttcagccacctcaatctcactttcagccacctctttctccttctcactttcagccaccactttgtccttctccctatcagccaccccaattgtactttcagccacctcaatatcactgtcaccttgagccacctctttgtctatctcagtctctgtttctccaacctctctaaccttat

SEQ ID NO: 18809 - DNA, 753 bp, Arabidopsis thaliana landsberg
gattgtaaggagttaacttagcttttggacatacttgatgagtggcccgcttttatttcagagttagaagattttaactctttaaagtctagcttttttcgtttttttatcttttattctacgtgtaaataatgtctttattgattgtctcgccaaaaagacaaaaacacgagattctatctttttctatgtagttttatttatttcggactgattttctcttaaagaaaaccgtccgtttttaacttaaatgaatgaacttattttgctgtaaaaaaaaaaaagatgaaaatagttttaatgttacgttgctctctaacattgatttcttgtcagaccgtagtggcacaatgaagacggtaacgtgaaactcaatccccgtatctcaaactcacagccgcaaatctttcaaattggtaaattttataatagatctttacattatctttaattgtgaatattcaattctccagctcagaatagttcatacggacatcaatttctatttattttgatacatgcatgtgacaacaatatctagttccaatctcaaggaaattaaatgggaaacaaatatatattagttcgaaatcccaacgataagtttattcaaatattaatatctatatatatatatatatatatatagatatatatctcgtttcgggtattttttcttatacgagttgttcactagaagcagtggttcatgtgtcacacactcacaccaactacatcaaagcccggaaacta

SEQ ID NO: 18810 - DNA, 579 bp, Arabidopsis thaliana landsberg
ggctcaatttgaaattgctaatagcatagtggtataagttacacgataaatattcgcataataaaaatttacagaatgaataacaagaaaatgaaattacttttaaaatatattgattgaatatattttgtagaacagcaaaataaaatattatattaatatatatatatatacttaataaacaaaaccatgttttaattaattttagtaatttttaaataatatttgataataaaaatataagattattaaaatttattaaaaagttgcgaaaatattttttaaatattattaatgaaataattttttgtataaaaattatatatttttcttttataatttctaatatttattatgcgtagaataataacaatttaatatgtggataagtaattctatatccaattttttgcataatgtatttatttgtaattttaagtaaaaatgcaaattttgtttttttgtgctttctattgtaattatgtagattttttttattgacaaattttttgcataatctcattaaaagcactattatatcattattcgtattatcagtcagagcttaaattgtaaatt

SEQ ID NO: 18811 - DNA, 595 bp, Arabidopsis thaliana landsberg
attctctattactttgataatggtaaaatgtttttgggaaaaaaacaaaaaaaaaccattctaatttttattttttggtaggcgaaggggacaacgagtccccttcaaaatattattataaaatcaaaccaaattacaaacaaatacgccgtggatacgagatcccacgagagtcttcatcaaaaaaagatgagatacaatccggaaaagaatctagtaaatgcaaccctaaagggcatgaaaatgcataattagccaaaccatccgcaaggtgattcgcctccctatacacatgagacaattggaccaaccaatcctttgataaaaagccatagcacaagcgtggtagaaacgacaagggatgagtatcgcatatccccgtcttaagaaaccccgcaaccatctccgaatcaacttccaactttaaccgagtaatcttcttctcccatgcataataaagcccatagtagaacccccaaagttctgctaaaggagccgtacatacccctatattaaaagcaaaaccttggacccagttccccaccgcatctctaatgaccccaccagccgtggctaaacccgggttacctcttga

SEQ ID NO: 18812 - DNA, 877 bp, Arabidopsis thaliana landsberg
tgtgagttctccaatgggtgctcattttaaattgacatccctcattgatgagattggaagtgtggatcttggagtgattccatattcaagtgatgtgggtagtgtgatgtatgccatgattggtactaggccgaatgttgcttgttccacgggtttagtgagcagttttacgagtagacctggagagatgcactatggagtcaaagggtcaagagagttaaatttggtttttaccaaaggatccaatctggaagtccagggattttgtgactctgatcatgttgcagatcaagataaaagaaggtccataagcggatacgttttcactgttggtggtaatactgtgagctggaagtctagtttacagcatgttgtagcattgtcttctacacagattgagtttattgcactcactgaaaatgtgaaggaagcaatttggattagaggattgctagatgatatgggattgaagccaaagccaacaatagtgtggtgtgactctcaatcagttatttgtctgtcaaagaataatgcttttcatgatcgaacaaagcatgtggaagtaaagttctatatcagcaaagacattattaaaactggaggggtaaaggttcgaaagattcacacgtttgagaattctgcagatatgcttgcaaaatgcataccagtgaagaagtttgagaaggctttagattttctaaaactactcagctaagacgttaagtcgcatcaccggaggttaagttcatgaagtgcaatttacaagaagatgatgaaagatagatttacgagaagcagaagagaaaaaccattgatttttttgcattttatgtataaacatttatttttctttgaatataatttaacatcggttttg

SEQ ID NO: 18813 - DNA, 822 bp, Arabidopsis thaliana landsberg
  unsure (1)..(822): unsure at all n locations
ccttcaagtttgcagtagtcactctcacatttctctagctttcctattgtcgtccaaaggactttggagagctttccagggctctttctccgaagcaaccaccgtatatcaaggtgagaagcttaagacctagtagctataggttttaatccttttattttttttcgctttcaagatctaaaaaggtcactttttccccatggttggtactcttaacatttcatttttttcttccagcggattttagagaactttcaagggttctttctttgtccgaagaaaccaacgtatattctttaatctatttttattttatttaaaatattaactttcaatattttgtaattatttttactacttaaaccgcttttctattatttcacactcaacatagatttttaactgcttgatccgcactttttttacttgatccgcctaatacgcttgatccacagttgactgcatgaactgcttgatttgcctgctccgtaccgcttgattcgcttgcactattcgaaaccatggagggatactttttttcaaagaacatatacaaacgtaggaaaaaaggtttgggctgtgaaaatttttagggacttcgtagttactttgaagtagctaaaacttgattgatatacctaaagaaacactctgttagccaaaagaagcgaaatgtaacgtttgaatagattggtcagatctggttaagatagtgtcttctccgacaaagtggcaagcaatcttcccatnccttgnngcgntttanaaaaacaatgtaagttttatatttttaataatttttggtgtcatgtaatgcgaata

SEQ ID NO: 18814 - DNA, 690 bp, Arabidopsis thaliana landsberg
acattgattattcacaatattaaataataatgaggtttcatagtcatatgtgtagggtttttgacaacctctacaacacctcaagcttcatgctttgtcatcaacacaaccacacgaaaacagagcaaacaagatatagagaagaagtagaagataatagcagaaaagagagaaaggacgaagaggagcacacaaagaatttgttaacccggttcacggcattaacaagccgctacgtcccgtcgggatcaatagatccccaaacttcactataaagaataaaggtgtttacaataacaagaagctacaagtgacccgtctaatacccttcactagtacttagactcactatgtactacttcctgtatcactcagagaacaacaatgatgagcttatactaatacatgttttctctatctctacaccttactaactcttcttgttagatctacattgtgttcttgctctcttctcctctctgctgctctctcacgtctccatatatgcttatatatgagagactccttcaaacctagaatagcccccaaaccccaaaagacccttcctttttcacgctttggattctccagaaatgctcctttagtttgaatacacatagagacaaactgtccttccttggccagcttcttgtgctccagaaatagtaacttactagagatgaataacat

SEQ ID NO: 18815 - DNA, 655 bp, Arabidopsis thaliana landsberg
atatagtaattaattgaaagtacttacaagaaactttcactacaaaaacattattcgtaaactaaagagaagaaaaaataacattttttctttgttttggtaaatgatttatgttaatagagtgttttcaggtaattctaattaaactaattagaataatctaacttttaccctattacagtgtgcatttttttgttccgttttttttatcaacaatatttaacatagaatccaactacaacgtatatataaacaataaatttggaattccatgatatatatacccttgtatcgaaaagaaaaatccatgaaaactatactaactattatctttaaaatacacaatcttttttcttgcagtttcagaataatacgccaaacagttgaaagacattaacaaaacgttaaatctcatacattttttcaatttaaaaatttatactaactattaatcaaaaaattgtgagtgtctaccagcatttcagaccttggcattatcaccaatactaatagttccggaagtttttcgattttcttcggtctatgtaaacataaattattgactttggagaacacttttttttggggtctttagttctaattttccttggatcgtacggtttatttaggaaatcacgggaatgaaaaaaccttc

SEQ ID NO: 18816 - DNA, 1087 bp, Arabidopsis thaliana landsberg
  unsure (1)..(1087): unsure at all n locations
cttttatgatcttagaactatgtttatatatccacaggtaactactcagatcaaagggggttactgaaacataaggcaagaaagcaaatagattacaaaactcataatgtatttacaactcaaaacgtttcacacaggttaaacttcttataatagtgattgtgaaaatccttaatacatacatattcctctcactgttagcttttgagtaatgtaattgaagcagtgactacaatactctactttaagcaaaagaataagcaaccaaccaacgttttcaagttacaaccttttcaattccctagtgacattttagccttgagttttacgggactctctgagttgttgatctctgatactctcccnnnnnnnnnnnnnnnnnnttgaagcagagttgcatatttttcggttcttgtgttttgtaagatgctctagcctaaccatgagcttccttgtttccatatctcttgcgctgatgggaaactccaagagcagagtgagggtatctacgcacattgatgtctctacttcagacgcgagtattccctttgcgttggcaaaatcagcagattttttggcgatctcgaacagttccaacgtatccgtgtcgttgttcgtcaagacaggacaactcttaggtttttcagatactttcacaggcggctgcttcttcaacttgatcagcctcgatgtttctggaacagacttggaaaggccacgcttcttcaaagttttcttgatctctcccgttccacatctagggtttttagaaagtttcagaggtagagccgattgcttcttctctctagttacttcacgagtcttacatctctcatcgttgttcttcttcatcaccaaaaactcagtctttttcttagtctctgccgcaaaatcacgagatatctgatgttcgttcttcttcaaatccgaacatgctttaacaacattaggtttattcagagtcaagtgaagagcttttttgcaagtataagcgtcgcctcttccgttggaagacagagtactcatcctggaggagtagaagatacagtgatctaccattcttatctaattagggtttcactctctc

SEQ ID NO: 18817 - DNA, 330 bp, Arabidopsis thaliana landsberg
gaacaacagaaagatgctaagccaagacttgtgagatggattttacttcttttttaatttgacatcaaggtacgagataagaaaggggttgagaatggtgtagcggatctattgtcatgcattaggattgaaggtgatgtccccgttaatgatttcttgcctgaggagaacatatatatgattgatacaactgatgaagatgactgcgaaattgttgtattgcagaaccgagctatagtgtcgattgacactcacttcagagaaagggatgatgatcgatattgctcaatggtgccattccctatctattagaacttgatgccattccct

SEQ ID NO: 18818 - DNA, 623 bp, Arabidopsis thaliana landsberg
tactcttcaagtacataaataatcatagattcccaagagaaattttgttctgactcatgcatcctttagatatataaaggacacggcgtggtattgaaaatcattacatgataaaatggagtttatgggtactataaacttgcaacaatatagcaacaagcaaaaaatacttttggtcggagaaggagacttttcgttttctttgtctctagccagagtttttggttctgccacaaacatcactgcgacctctcttgacactcgaggtagaaatatttctaacaccacaattcatcttacatatttggttatttttatcatcttctgataatacatctaaaacaccgaacataagatatgaaagttaatttggtgattattgttataagctaatgatgaatgttgtagaggagctagggattaagtacactgatggaaaagcaaatgtggaagggttggagttgtttgggtgcacagtggtccacggtgttaacgtccactccatgtcctcagactatcgcttaggtcgatacgatagaatcatctttattttccccattcaggattaggttttggttcagagcacgacatcttctttattatgtaaggttcttttggccttc

SEQ ID NO: 18819 - DNA, 1039 bp, Arabidopsis thaliana landsberg
atttttcttttatgttatatcgtacaaatggaacatcatggttagtgagagaactaatacaggtaaatcgattatcttatcccaagcttgcatcccctcttgaagcggtatttatggcctatgggcagtagaatgcttgagtaacttcaggaaaaagttggttttgaactatcttctcaacaagtggtggaggtgattgaattctcttggcgtttccccttatttttatatttttttgtgcaaaaatgatgctcttacattcaaatcatgtagagtacttaaaacacaatttgaatagtttcattatgttacttcaaatcaaagatttatatactatcaggaatcttcaatcttctgtaacaaactctagagagagagagtgaaagaagaagaagatgacagaaacaaaacaatcgtttattctcattaatttggtaaaatgtacaatgtacagtattatactcgttatatatacaaaccttgaatgttagtttatgtatacaaaccatgaatattagtttcgtgttcttgagtgcccctataatcgtgtttagctaaacatattgttcattacagaaaagtctcggattgcccctacattatatatatatatatatatatatatattatgcccctataatattgtctaccgaatcattgcaccaaatagaatgtgacaaatgggcctatttgataaatttaagatgaagcctattaaaggcccaacaacttgaaatccagatcatattaaactattaccatcataattatgactttgcattataattattattatttgataatatatccacaattccaacacaagtctttgtacttttgactcgttagatatcatccaaccgaaatatatacaacctaagttcaaaagaaccacgcaagatgttgccatattgtccataatgtatccacttgtcgtttaacataaacaatttttaactatattggtttagaaatattttccaagagagattcttaacacgatctaacttgtatgttctttatctttcaccgccaccac

SEQ ID NO: 18820 - DNA, 1459 bp, Arabidopsis thaliana landsberg
ttcaaggacatcatctgagaagataataataaccataatggcctgttgagggttcaaagttttggactttacccaaaggtacccatgactctggtagtgatgtgactctcacccgagtccaagagcttggctaacccaaagtcagagagttttgcattaaactcatcatcaatcaatatattacttgcttttatgtctctgtggaccacttttggttctattgcttcatgcaagtaagcaagcctgtaaagttgtacaaattgcagacccttttaataatcaagcattgaacatatccaacaaaagctaaactgtttcaaaccacttacgcttgtgcagtaccagtaatgattttcatccgtgcttcccaagtgagatttccatgttgccgcattgctccatgtagccattgttctaagttaccactattaacatactcataaacaagcatcctgcattcatcattatatttagattcagtacaatccaattgctcaaatggattaaagacaagtgagactcaccgatgaactccctctatgcaatatcctaaaagcctaacaagattcttgtgccgtacatgaccaatagcctcaacttctacccgaaattccttctcagcttgccctctagagaccaaaattgggaaaggattattaagttacaaaaacataagattgacaaacattttgatattcaagttgaaaacttacagattgttcagaagcttctttacagcaacctcggtaccattaacaagtttacccctataaactactccataaccaccctctccaagcacattcactggagcaaaacggttggttgctagctcaagatccctaagagtaaaccagtgtccccaaccaagatgggatatttctggtaaaccaaccaaaggagatgctgttacaggtcctcctccatactgtctcccagcacttccaaagcctccttcttcaccagaatgagaactacaagctctctcatggtgattcacagagctacattgactcaaagtgtcattatcactagacttggttcttcccaagtgagacatcatcttcccagagtttctgtcactagatttatcagcatttgtgatagataaattttcattatgattttgaaacccaactctatcatcaaccctgatatctttcgccacgcgtggtatttgactgaagggtaacagcttgtgagatgatctccgggatttccggcggaatgcaatccatagagataatatacagaaaaccaaaactacaaatgtgccaactactaaacaaatcagtacccacagtttcatacccttcaaacctaaaaatgagaccttcttcgacatgtcagcactcagagaactctcagatgacatttttggttcctttaactaacaacttcacaattcccacctagtaaacaagaaaagtatcaattattaacaagaagactaagactg

SEQ ID NO: 18821 - DNA, 380 bp, Arabidopsis thaliana landsberg
  unsure (1)..(380): unsure at all n locations
ataagatcagtgaaatccggtaactgattctagaaggaagaggtaaagatttttgggaagatgcagaaggtgtggcatggttcaaggaccgtttgtgtgtccccaatgtccagtccattcgggagttgatcctcaaagaagcccatgagacagcttattccatacatccttagaacgaccattctactctaggttagcggtcctnnnnnnnnnnnnnnnnnnnnnnnnnnnnnnnnnnnnnnnnnnnnnnnnnnnnnnnnnnnnnnnnnnnnnnnnnnnnnnnnnnnnnnnnattcacgtacacagcagttacataacatggacatcatcacacagttctcaaatagtattaaaagggaaatagtcgattacatcatatg

SEQ ID NO: 18822 - DNA, 1268 bp, Arabidopsis thaliana landsberg
cgttcgagtggaggcggtgtctttagctcaaaccatggctagtaacaaccctcacgacaacctttctgaccaaactccttctgatgatttcttcgagcaaatcctcggccttcctaacttctcagcctcttctgccgccggtttatctggagttgacggaggattaggtggtggagcaccgcctatgatgctgcagttgggttccggagaagaaggaagtcacatgggtggcttaggaggaagtggaccaactgggtttcacaatcagatgtttcctttggggttaagtcttgatcaagggaaaggacctgggtttcttagacctgaaggaggacatggaagtgggaaaagattctcagatgatgttgttgataatcgatgttcttctatgaaacctgtaagttctgttcttgctttggtgtttgattattagaaatgggaagaaatcgattttgagggttttgaatagaacatttttggtaacttttgttttagtttttgatttgtggtaagtaactttaacaaagttgatgatttgcgttatgtgctttattttggctcagacttgttgaatctaatcgattttggtttgtttagtaaactaaggttagctcttgttactctatgagcaacttctcactagttcatgtagctgtgtggcttatcttgccttctaagttggtcaaatgagtaatcttaagggtctaacttaaattattctcttacaactaatggagtcaaatccttgtgcaaatggtttattttcgtttggtcttatttcttctgtgtgttgtctggaaggttttccacgggcagcctatgcaacagccacctccatcggccccacatcagcctacttcaatccgtcccagggttcgagctaggcgtggtcaggctactgatccacatagcatcgctgagcgggtatatttcagattctcttttgtatttccctgtgatatactatgttggtggcgagttggttgtagttaaaaatatgtttcggatataaaaaaatgttaacattgtgtaatgatctcttgattctatggagggattacctaaaagtttgttttactttaccacagctacgtagagaaagaatagcagaacggatcagggcgctgcaggaacttgtacctactgtgaacaaggtctgtacctttcaccctaaccctcacctgtatataatttctctagaaagtttgacactttctgtttctcccgtcttcgtgtgcagaccgatagagctgctatgatcgatgaga

SEQ ID NO: 18823 - DNA, 762 bp, Arabidopsis thaliana landsberg
tgtagatacacaagtagtgaaaacatgtgagtaataaaaaaaagatgtatgttattttaggaataaacatacagttattttctatctgagtaattctttctttttatttctcttacttaatttaaacatgtttaaatttcaaaataattaatcaaacagtgttaatacttaatagttctatttacataatcaactactttgttgaaatgcatatactatatattttatattatttacatttttctattgaaaacatacaatgcattaaatgtataaatctttgtataaaaagctttcttatttaaaattttgaaatatttaattttgacaagtttagttaattaaaataaatgtatataaaaactaaagtgtttggaaataaaagcatctccatcgggtagatattcttgccagtttctaaaaaaaaaaattattattttaattatatattatattttagttaaattgtaatatttaagctaataccctattgacatgtggtgattttgtcagagaaaggtttctcttactttctcaagtgagagactcttctttccatctctcctactttttcatttttaggtattattttattattaagtttctcaatgagaaacgctgatggagattggtctaaggatgagaatagagaatatgggttcgttattgaactcatctaaagagaaaaaaaaatcctattcaaaggttttgacaaacaaaatttgtcaaaaaatatagacggagggtccgttggaaaatttt

SEQ ID NO: 18824 - DNA, 766 bp, Arabidopsis thaliana landsberg
  unsure (1)..(766): unsure at all n locations
taaagaactcttaaatcccgatttcagctgcaaaaagtgcaaacacaccaaaagttcatttcctatagagtcctaagaagtcgaaacaagagctagatgatgctagatgcaaagctataattgataagcagattgtagagatacctcttagtgatgttgtgaagactttccctatgatcaaacattatataaagaggatagttactaaggatttgaataatgaccatggtgtgacgatgatctctgcacatgtaagcgacattattcagaataggattccagagaaactacgtgatcgaggaagctttgtgttagattgctctatatctacaagaaggtttccttgttctctttgtgaccttggctcttgcatcaacttgatgccccgtgcagttgctttgagacgtgagatgacagatttcaaagctacaaggattactcttctcctggttgatcgcttagagagaatccctaaaggtatctgagaagatgttatggtgaaaattggagaatacttgattccaacagacttcgtggttttggaatatgaaaaagaacctctagatcttctaattttggggagatctttctttgctcaaattaacgtgaaaggagtgtggatgtcgcatcccacaattgaatattttgttaaagttttaaataaaagagatctctagttttggtaaatttgcctcgattagataaaggagaatttgctattacagtttttagtatttagagaatgttcccctttacggntctctcg

SEQ ID NO: 18825 - DNA, 420 bp, Arabidopsis thaliana landsberg
gttgacctgtgtggagcttaagagggtgccaggggtggttatagtggtttacctctaaagggtgatttactggtggcggatgccatacgcaatccacatggaagaataaatcacattcaggacatttgtaagcaaacccatctccagtctccccacatttagcatcacaatcaaactcaatccgctccttgagaagggtgagcttgtggtgatgcgtttcgggaatgtcaataaactctggtggtgggtacttggcacaatatagatccaattggtagtaacagtgatcacaacgatagcatacattcacacctttggaccttccacataaattgcaacttttattaggataacggttaagctcaagagtgtgatcggtgtgagatgagtggacgataatttcggaggactcgccacatt

SEQ ID NO: 18826 - DNA, 918 bp, Arabidopsis thaliana landsberg
gtcttcggtatgttgcagctgagtcatgagaaaacgacggaattatgagtataactcagcctaagttacggttgatttaaaaaatttgtctgagttatgcgataaccaagcctacatgacagctgagttaaggaattttgtttgagttataagaatttcgggcataacccagacaacgttatggctgcgttattagaaaacggctgacttatttccttgacacgagtaagttacttttttccggctggctgggttatgaaggacagcttagttatgggatgatgttacggctcagttatgatcgagtgtcataaatcagccgtaaagagctggattaccggataactcagcctagttacgactgacttaggtgcaaaagattaattactataataacatgcagttacagccgagttattaaacgttacgactgagttatttgaggtacgacattacacggctgaattaacttggcatttattcgttttttaattactgtaatagtattcatgttgcgactgacttatagatttgtttgatggctgagttatcaaatgttcgtttggtggcttagttgtcacctcatcaattcaaaacgacgtcggctgtaatattccatgtcatcattccatgtcagcatcatcaaagggcaaaaaaataaagccaaattttttcaactcgtcttcttcacctgagttttttacatcactggaacttctaattcctcatcgttttcctcatttttcttcaatttctttcatccttctcccgatatagttgatccggttccggtaattgttgtttttaggaattaggtataaaaaccccaatatatatttaaccccgatgaaagaggagagtaaaaatgtgcagatagatgcggaaacaacacacgacaaacttgtaggttggtgctcg

SEQ ID NO: 18827 - DNA, 610 bp, Arabidopsis thaliana landsberg
acacataccccttatccgactaacttgactcttagctatccgactaatgatattgaccattacagtttctctgacgaagcttaacgacctaattagtttgcttatacgtttaagttataataaaatgatgcatgaaaaacagtattgtttgtataaaaatcaaataatataaaaaatcatataaaagacaaaaaaaataatagactaagaatatcaaaaacttataccttattacaaactgtacacaatcaatcataattttataactaaaaaacaacaaaaagtattatatacaacaaattcatcggtttatacaaaaagaacaaattattaatcttgcagtatatattaaattatacgttttttaaataaaagtattattaaaaagaaaaataacaaaatgatatttagttttccaggatgggttatatggtagaacagattttggatcgaaattagtttgagactatataccatgtataaattcttaaaattaacaatcaaaatacaatttatacaatcttaaacactagacaaaacaactataattaaaaattttgattataaaagatcgaccttcgtatccacaatcaaacataagtttatacca

SEQ ID NO: 18828 - DNA, 156 bp, Arabidopsis thaliana landsberg
gccctgctgctccacgagactccttcaatgacatgaaatttccctttttccaattttacttgtacttttgggtatagaaaaataagcctcttccacactgaattcatagagatgacgagtgagaatatttgatagatgagtgatatgaacttccgc

SEQ ID NO: 18829 - DNA, 1041 bp, Arabidopsis thaliana landsberg
ttgcgaggctgcaaggtcgatctggcgagttgaggatttcatagtaaaacacaaacaagttgagtgcaagaccaagccttatcgggtgagtaggagctaactcagcagtggcaatgtcctgcattatcacaacaacaaaatcaatcatacccacaaaagaaaacaacattcaaaaacgttgtaaagaatgacttacggaagcagacttgtaagcaaccaaagtgctttcagcagcttctttcctttcagcaccagccttaaactcagcaagatacctatgataatcacccttcatcttaagataaaacactttagattcagctggtgaagcagaaggaataagatgagcttcaagaacattcaaaatcccatcacagattttgctaagctcggattcaatctttcctctgtaatccttgataatagcaacatgatcttcgttccctttgctctcttctttctgctcaatcgaagaaatgattctccacgaagctcttctcgctccaatcacgttcttgtaagcaacagagagaagattcctctcttcaactgaaagttccttaacatcaacagtctttgcaactttctccatgaactcaaccatttcctcataacgttcagcttgctcagctaacttggctaagtacacattctcttcccgagaagacgacatcttatgttatcacacactcttttagatcctgttttcaaaaattcatttcaaacttcatcaacatcacagtagcttggctatatcaacattattcccaacaaaacaaaagaaacaacagataaatcgtcgagaccaacaaatcaagacaaaacgaacactataccgatagatacacctagaaacctagaatctatcaaaatcattcgagattttgccagatctccagataacaacgaacacagagaagattaagtccacaaaacgaaacgtaaacatgaacgagcaacagagaggcgatttcgtcgaactatgagcaaaaaaaagaataaacccgtagcttacccagaggattttggaaataaggattt

SEQ ID NO: 18830 - DNA, 1047 bp, Arabidopsis thaliana landsberg
ttcacacacatgcatcaccaatcttataaacttctacccacactttgctagcaatcggacctaatgagaggtgatggataatagcagctgggtcagtggagcatactcttctttctgcaaagttgcggccaacagaatgcactttttctttgctactttacttgtgctggtggtgttacttgtgctggtggtgttacttgtacccaaaatgaacacaaattaattactctcatgacagcaacatggataccatacacatcaaaattttccaaagtaccaaaaaaagctagtgctcaatttacgagagtagatgactttctgccaaattcatgtcctcctttaattgtgcttgttgtgttacttgcactctagcaccagacaacaacacaaatattaatatatgcatcagagtgacatagatattatctaaagcggacttaccatagtacatgatcttctgcctactccctgtacaggttcatcaacaaagtctatgtctattctatggtcaggccatgctatctttgttttaaatgcatcagacatcacaaaatatttgggacttggtctccacaaacaagcatcaggtttaaggactatttcaactttcaggataactgcattcacacccaaatgtatgttatcgatcaattcattgttgttggttgaacagataacaccctcagctataacttcatccaatttccaatctaaaactctgcatctaccaagttgatcatcatctacaccagtatcctatattagagtagtatttattagtaatcgtccgatggaacaagtgaatatatatagttatagttaaaatacattaccttgccttcatttgccgtttctgactcattctgactctccaatccagtgtccaatataactatattaactggccatgcaattatgactcctaacgcttgttgaagtaagaacacatctggcgttggcctccaacagatgcttgtggaactgatacagtcgtgacgattacagctgcgccatattcacctagtggaatatgaccctatcgatagt

SEQ ID NO: 18831 - DNA, 1429 bp, Arabidopsis thaliana landsberg
taaaggccaacttcacaataacaggatctctacttaatgtgttgtctcccaccattgtagagattcccaatccttgactattggttttgtggtggctctgtagagattcctagatctcttttctgaggggaggcatattcaaattcaaatccttgatttgatgcttaagtgatagcggagaaaacgaactgagtcgtaaatctagttagagaccataaacagagggataaagaggataccataacacgcaacaagattaagaaagccactacactagagatagcttaggattatatcacaattttagtatactcagaatagctttaggggattgacattagagaatctaattacaagatctgtttcatctggatcctgtaaattatcagtcacttattcgaacaacacaaaaatattggaacttgtaaaagaaaacaacagatagaagaaggacactgcaagatgaaagagaaaccaacaaatggattttacctaaacgcataaactgttgattgtgtaaaaatgtaggctgaacaggatgcaaaacgttttagggaatacaaaaggaaaatgaaaagcataatccaagtgaacaacacaacacattccagaagtatcagaatgcaaatcagtttcatacaatccaaatgcactacaagaagatagataaaccaatagaagaagaagaagcgttgattctgattttggacagtgaggaatcccattcatgagtaatggatctttagtcgacgacgtactagtactaaagaagaagaaaatgaaacaatgttagtaacaatgcattgaaattgagaggcacagtatattctattgtgtgatccattttgcagaaggatcatatctcatgctaaccttgaaagaaacaatagcaagaaatacaaataactcaagcataagagattaaaagaaatgattaccggtttgattgaaggcaagaatcgatttttggtatcttcgtcctcccattcaagctcatttccctgttctggaggatccatacgtatttgaaattcttcaactagtgggacacttgtagcattaaatggaagctttctcagcattggacagtctttaacaagtattctcaacaaaagcggaaaggggagaggactccagtagatactctccagcttcggcaaattatacaaaatcaactcttctagtttcagaaatggtgtaataatacttgtaagattggttgctttctctttgtttattatttctcctacttctcttgaatctccaatttgtaggtagacattatttggagcaaacaatatccaagtcagatccttcatgctatggcaatgcattatatccagtcgtgagaggttggtaaagcatggaattttcggattgatgtgtaaataagaccattcttctccgagaaataactattttccacccc

SEQ ID NO: 18832 - DNA, 2059 bp, Arabidopsis thaliana landsberg
tgctaagaaacccatacatccttcatttatcaatctttctgccttcaaacatgatataatgggtaaccgaggagttactttagatccacaaaactcaacaatcgaagaacctggaatttcaaaagtaatcttcctcccacgacaattaaggttcgcgaaatgatgaaataaccagtcaaaacccataataatatcatctccttttaaagggagtacaataaggtctgctggaagagatacatctcctaccaataccttaatatctctgattatcccaagagaatgtaatattcctcctcccgaagtacgaataggcaaacatagtgggactaactccactccagacaatttttcaaactaatcgacagacataaaggaacgggtggcaccagtatcaaaaagtacgaaagcagaattaccaaggatggataacataccctgaatagcatctgcctcttcagtctcaccctaattgcctaatgcatagacgcgacttgcaccagtttgacgaccaggcgctagatcacaggtgacaaagaccttgattctgagaaacttgtgcaggtttagcaagaccattattaggacaatccgctatgaaatgtccagcatgaccacaacgaaaacatacattcttagctcggtgacatatctcactcgaatgatttgtccgaccacaatgagcacatcctttgttaactccttgtgctggccttggttgcattgttgatttgccatatggagttccacgaacatctggacgcttgtgtctgtccacccggttactgtttcctgaagagccactccccacatatgttggtgtctttttctcatttccctcgacaatgagagcacactccaacactccaacatatgttggtaatctctctggttccacctaatttcatacccaaaagttatgaaggtctgcaaaattaaataatacagataaataattaacttaagtggtttttactaaccacaactctgatggagtctcgaagtccatgctcaaatcgtttagctctagagcggtcatctggaataatatgtgcgccataacgagataaacgatcaaactcaacttggtactctcttactgtcttatctttttgcttgagctcctcaaatctcatcctcaaggatctaacagactcttggaagtacagatccataaatgcaccctgaaaatcatcccaagtcatctccacaccaagacgggaagtaacaatgcttctccaccaatgttgagcatctccagcaagttggtgagtaaccattcgtaacttaaaagccttaggaacccccaaataccccagcgcctctttaacaagatcaagccatttctcagcttccaaagggtcagaagaaccttcaaatttctgcaagccgacttccttttttaacctatcttgtaacacccaatagtcaagctgagggtttccatgttgagcctgaggaacaactgcctaaggtagttgctgcaacaaagtctgctggatagcagcattctgagcaaacatttgattcatagattggagcatttgtcgcatatcctccattggaacagcatttggtggaggaggtggtggaaattgaggaccattaggaacatgaggaggagttcctggaatagggacacctcgaccagcaggagcaacaggaacacatctcgcacgcccacgtctagccatctgaacgcaattaaatgagaagttaaactcttagtttagacaaatttggtcacaaaagctaacagttaaacctcacattcaaaatcctatcgcgagaccagtaagatatatattttttattttaaaaacaaaacctacgaaggcttttgaaaatcccaaggtttcgtaaaacctggctctgataccaaactgtaacaccccaaattcggtagaattttgaaagtattactaaaaataatataataaaaatactaaaattcaataatgtatttgaaaattcataaaaacaccaaatgtcgaaaacaaaataatttcaatcaagaaaaatctaccaagtctcgctttacgattgaactaaaaacttt

SEQ ID NO: 18833 - DNA, 767 bp, Arabidopsis thaliana landsberg
  unsure (1)..(767): unsure at all n locations
tgtctgcataggtcagcttcctagccattttactgtctttatttaattcgaaccgaacaaggaacagggagccatctagatcacttcgatttaacactgattctacttcttcatcgcctttgaaataaataaattgttcccctggcaaatggaacgaaagcttcatcacagccgtagatctataatgtataggatattttaatattctccaggatgcttcgcaagcagaaacatatctgaaatgcaaaattatacaatcataaggggcataaataaatgtattttacagaaataatactattaaattttgcattaaacatacgctgcacattgaaaatagtctttcgccttcattcttcttctttgtctctgatccatctgtatcagcattgtccttctgtttaccattttctttatttttcgaatttaaagacgattcaacaacaacagtaacacgatctggtcctttatgaatatacttgaatatgtatttcacagaacctgattggttacaccactccacgttgatgtgagctctgtatctcagtgatagggatctattataaggaatgacataacggttatcgcatttaaagtctttcttctcaacaaagtcatctgttcttcgccttctgtatattggaaatccttctttatcaataatgttcttttaaacatgatctttcggataaaactttgaacacttttccgtttccatacatggacatttcggggtcaccacaccacanggaccatgaaccatcgat

SEQ ID NO: 18834 - DNA, 1967 bp, Arabidopsis thaliana landsberg
  unsure (1)..(1967): unsure at all n locations
agagtcaagtcacttttcaggcgtattaaacaaaagaagctcagatattaaaaacgaagcgatgatacacagaaagttcgacttgtcattagaaagaaagagatatcaggaatggaaacatagttggaacaattattcatcaggggattatacaaggccccaaaacacaaaccaccaaagttttacatgaaacgaaacattgaacttcttaagtataacagagacgagatttagaaaccaccacgaagacggaggaccaagtgaagggtagactccttctggatgttgtagtcggccaatgtacgtccatcctcaagctgctttccagcgaagatgagacgctgctggtccggagggataccttccttgtcgtggatgttagccttcacgttgtcaatggtgtcggagctctccacttcaagggttatggtcttgccggtcaaagtcttaacaaagatctgcatacctccacgcagacgcaacaccaagtgaagggtcgactccttctggatgttgtaatccgccaaagtacgaccatcctccaattgttttccggcaaagatcaacctctgctggtccggagggattccttccttatcctggatcttggccttcacgttgtcaatggtgtcagagctctccacttcaagagtgatggtcttcccggtcaaagtcttaacgaagatctgcatacctccacggagacgcaagaccaagtgaagggtagactccttctggatgttgtaatccgctaaagttctgccgtcctccaattgttttccggcaaagatcaacctctgctggtccggagggataccttccttatcctggatcttggccttgacattgtcgatggtgtcgctgctctcgacctccaaagtgatggtcttgccggtcaaggttttcacgaagatctgcatacctccacgcagacgcaacaccaagtgaagagtagactccttctgaatgttgtaatccgccaaagtacgaccatcctccaactgttttccggcgaagatcaacctctgctggtccggagggataccttccttatcctggatcttggccttgacgttgtcaatggtgtctgaactctccacctccaaggtgatggtctttccggtgagagtcttcacgaagatctgcatacctccacgcagacgcaagaccaagtgaagtgtggactccttctgaatgttgtagtcagccaaagttctgccatcttcaagttgtttaccggcgaagatcaatctctgctgatccggtgggatacctctttgtcttggatcttggctttcacgttatcaatggtgtcagaactctccacctccaaagtaatggttttcccgtcaacgtcttcacgaagatttgcatacaccacggagtctcagcacaaggtgaagtgttgactccttttggatgttgtaatctgcaagagtgcgaccatcctcaagctgtttacccgcgaatattagtctctgttgatccggagggattccttccttgtcttggatcttagctttaacattgtcaatagtgtctgtactctcaacttctagggtaatggtttaaccggtaagggtcttgacgaatatctgcataccacctctcaacctgagagccaagtggagtattgaatctttttggatactgtaatcagccaaagtagggccatcatctagcagtttaccggaaaagatgagtctttgctggtcttgaggaatcccttctatgtcctagatctttnnnnnnnnnnnnnnnnnnnnnncggagctttcgacgtcaagggttatgctctattctgttagagtctttgcgtagatttgcatcaacatctttgaaaacgaaaaaaagtaagtacataaagatcaaacgcaaaagttgagagagcaccaatcccggaaatttttgcagcaagattaaagtttgaaaagatgaagaatgaatagcacagatggtgccgagag

SEQ ID NO: 18835 - DNA, 537 bp, Arabidopsis thaliana landsberg
tatggttgttgaatagtctcgcttccacctctcaaatctcgccttcacctttgaaagctgggagtactcctcatatgcatcactaaagaccttatcagcacactgaagtaagctatctcttgtctccttataagctgaagtctcagtgtcactctcatcagtgcttgattctccttctattttcagagaaggtccatcaacctccatagctgatgcacgcttattttcaaatcgagctcgccttttctgccgggctgcagccctctgttccacttccctgcgcttctgcagattttcgtctctgccaaattcatcaagcttaactggttgattcatctgctgccttatagaagtagaggcagccaacgcagcacttgtggcagcagcaatcactgaactactgcttccatgtttgtttagaactgtcattgctgctttcactgcggcccccaactctatcatttcatcattgttatctgcaattctcctttctagaatagataaagcatgtttttcgttaagttccttcatttgatc

SEQ ID NO: 18836 - DNA, 2579 bp, Arabidopsis thaliana landsberg
agccagtcccaacaggctgatccaaatagagaatgctcgccacctgacacgaagcaatgatgatccaatactttaagaagatgaagattcattgggtttgtgttcatgagtacactactaaaatatcgtatattaccttagtccatgcatatgtggtagagaccaaagaggggatacttccattgtattcctcagccttgaaagcaattggccctgcgtttttgtttttggtagttgttggcaattcaaacaagtcactaattctgatcaagtgataaagaaagaatgaaaagtttttggattttaccattctcataaataagagcagtgaacgaagaacagaaaggacctccacttaaccagagaagaagagggtctttctctggattactctcagatttgatgaagtagtagaacatttgatcttcctctgcctcacccacaccaatgtaccttactcattcaacaccaaaactctaacacacatatatatagtcatacattatcaggataataagaagaggaacctacccggtctcgagctcgaaaggaagagggccttggaaaccaggaagaaatctgatggtagatcctgaatcaacaagctgaatcaaaacaagtagaagatgaaacttgagtatccacgacaagtagtagcactctttccccattctctttgatcaaaagtttttgaatttctttcacaatagagataatttattgaaatatatagtaaccatacaaggccaaagcctgataaacaaaaaagccccacaacattgaaagtctacacagtttgcaaaatgcaattcatcacaaaaacattgacagagacaggtcatattctcctaagaagaaatgagccgcgtagagttaccaaaagacacaacaaaacaacaagtggaagacatgcaagattagttacagagtatactagtgatgaagtctagtgccttatacaaaagcatctgaaaacaagatggacatttttgtctccaccaaaatcacaagtgtaatctatctttttttttttttttggtaaaaggtgaaagatttatacaattttcaagtttgcgacagcatacagagaaaacaaagaagaaagaaaaaccaaaaactatgctctagagacctgctttatgctttagcttctctctgtatgctgtcgcaaaaccaaaagtaaagtattaattagttacagaccttactcaagttaagaaatacctctacataaatcttccagcttcacttacgtcgagaccggagcacgatcgactgctcaaaataaattcgtcgaaccaaatcatttaacaggcattgcaggccatgtacaataaattacatacaaaaacaaactgttgggaactcaaaggattactctttgaaacaatacttgttgtttgcaactaagctacaagataaagcaaaggttaattacttagtctctctagacaattgtctgtatatatatatattatgtgttctaagttttattacaactaggatgactcttgaaacatgctgattttgtcaaatttttttgttaatttcaaattttcaagtgatctgaaaatccttgaaaatgttgagagcgtatagattgaaatttggactcttgaatcagatatggattgttgttgtaggaattaaagttgaagggagagtgggatgggccttcagatattgaaagagctctatggagttgtactgtgcgtgcaaagtcacagccagagaagagctcttccgggaagaaaagaaaacggtaggtgataatatttctatccagttcaccttccatccattgttaagatcaaccatatgtcagcagctcttctggaagtcatatccgtaattgttcaactgtagtaagtgttctcgaatgttttatcaaaatgctgagtatttagcggaatcatataacttgaagggaaaaaatggatactttacattttcagatatcttccaaattaacattgaaggtgggaatcgaatcctatatttaagggaggacgatgattctattttgacttgttcaaaagactgattcaataggttatgagggtagagttatagggggagaaaaacaaaacagaggatatgttgtgtcccatttaactaaactgattttggcatgtattatagctgataggttgttacttgttacagaatttggccacttatccatcccttgaacatgattgatctttcctctgccgaccctataaatcaaacccacaaaaaattaacagactccaagtacaaagccttttttctccccatttatgtaatgcatggcaataagtgatgttttctgataaatagtcttagcacctaaaatgtatttcagatgatacatcaaaccaaacactttcggtttcaacattaacaagatcacttgaggagtaagttttgtgtgtttaaagaggttggccacttatccacctcttgaacaagattgaattctcatctggtttatagtctaacgtgtgcccgccaccctacaaatcaaaccaacaaaccgatttaacaatgtgatgtaaaaaagctttgcatttttgtcaatagaaaatgtggatata

SEQ ID NO: 18837 - DNA, 1408 bp, Arabidopsis thaliana landsberg
atggcgtggttgcattgaaaattttgattaaggcaggtcctgtatttaaggcggctgcgtattcagaggaaacactacgctgtgtccgacttgacagatctcggtatttcatgtggtggtcaatgccacactcgatctattatcatttcttcaataaatgtcttgaagcaaacaatccccatgccttgactgatgtattgtacaaagggatagcatatgagaatttcgttgaagaatgctacagggcacctttatgggtggagccttatggacaggacgggggatgggtacaaatcgatggagtttactgggctcatccctgagtgtgaacaatgaatgcagggtgttgtcgatgcaaaagggcagcacacaaaacttgtccaaatatgtgaagttcaattttaatgttgtctttttatttgaaccattaagaacctttgtttttcatgtattcgctccgttctcttttctggttttagtttttaagatttggatcattttactaaataagtaaaaaactttattatatggttagtatagaataataactttttggtgtccataataacgagtccatttatatgtgtccatacagaaacatttttacggagccatatctattctacaccaaagttattgtataagtctgcgcttatccattcaagacccatataaccttattgtctaagatttgaattgatttagtaagattgaacagaactcatcatacatctatagacaatcataaaaacgaaaattcattacataaaatccattcccataaccttaaagaatacaaaaatgtagaagcatagagtaaaatagtgacctttttaatacctcttgattatgtagtcgtgtcatttgccacatatctaataacttttggatagatatatatggatggaacacaataatatgatcaaactctatccattctgaaaccgcatatcacattaaatccatgtatatcagataaaatagagattgttcctttggggaataatgaaaaataaaggatagacctaattcatgaagcagcacttagattatgactactatgcaacaaagcaaaatagaacacacatgttcagaaaatagcttacagagtgataatattcaaaaggaaagtaaagatggttaatattacaaaaagcagagaaagggataacttgttactaaagtcagatgcatagataggacagacaaactgctcataaatgtctgcatatttacgcctaaaagaggcaacatgtttatttgttattttcgccatgttttctgggagattatcacttgcctgaatctcaaggaacttcattgccatcgggccaaagtcaccagatcgcaattcttatataagccatctaatcgcttccaataaaaaggctgagagactatgattctg

SEQ ID NO: 18838 - DNA, 421 bp, Arabidopsis thaliana landsberg
tctgtaccatgagtcatcatatgtgtgcgacttgatcctagcacacatatgattcgcgcctggatttgcccttaaatccgggtgtgacagaagtggtattagagaaatgctgactgtaggacgtaatcgagatagaactggacaacccttacttacttacctttgatgctctgattcttgctatatttttcttaatcttttatcatctattgttgctttactctgattactcttatcttttccataatagatttcacactttggaatactatacccaaatggtccctcagtaataagagtcctaatcataggcatataaaaactatttttgtaggtatctatacacttgaatgtttgtgcttatgaacctggtcggattcgcgtcgatggttgcatgtgataagttcgtgagtaatgccat

SEQ ID NO: 18839 - DNA, 530 bp, Arabidopsis thaliana landsberg
tgaacatcagtgtcccaatgattttgtttttgtcatttcgagttggtagctctcgatcatggcagatagtgatggcttgtgcggttgcataatcctttgaattctgtattgacttccctggaagtccgataactttgggggcagaggtagacacagattgtccttccaagtatttgactttcaaaaattcaatgcctccacttttgcattcaggtcagtctagcttatgatgcaattctgatatcttcttggcaatctccatggaggtagatgcttgtccctgtagcagttgttgtagtatttgtttcatgtcagcatcaggagcagcatgaccttggtgttgttgaggtgcaaatccaggtggtggttgctgctagtagttcccttgaaattgttgtttggaaacaaaatcttggttgtaaggaacaaaagtttgttctaaccttgttgttgttgtggtggatacacttgatcctgtggattaacaacgttggatctacggtaagagaggttggggttgttagtcttga

SEQ ID NO: 18840 - DNA, 618 bp, Arabidopsis thaliana landsberg
  unsure (1)..(618): unsure at all n locations
gtgcaaaacaggctcgtgtttatttaatcaaacgaaccattccttgtgtaaaagacatgactcttgataaaagacacaactcttgatctaaagacacaactgtaaaagacatgacttggtctcttgatcaaataactgatttatgtaaataaaatatgatgcgagatttgattatacttcaacattaagaacagtggaggagattgtgagccgcttggtaaaaaatgtagacttgaggtgggtaacaatgattcaaagccttgtcacaagccattttcgattagctatgatggagatgaaactgtaccaccaccagaagtagggcaaaggaatgaagaaactgatgaaacagcgagcaaagcagggaagcgtatggttctgagtccactttatgaaactgactcatcaggttctcctgttgattttgatggagcaattgacattgttgaaccagcaccagagacaaggcaattatgtgatgatgagcttgatgcgtatggaagctatgcagagaagtcgactaagatcgatgctggcagcaagccacccaaagntgtttgctccatgaagatgatgaaatagctggagaaatgacgagatcagatagtaagttgtgca

SEQ ID NO: 18841 - DNA, 623 bp, Arabidopsis thaliana landsberg
tgatctgcattcgaccaacattttcccggagtttacagggcgcatctgccccgcaccttgcgaggaagcctgcacgctgatcctcgaagacatcccggttgcgatcaagacgattgagcaggcgctggccgacaaggcctatgagacaggctatatccggccctatccggcgcagacgcatagcggcaagcgtgtcgccatcatcggttccggcccatccggcatggcggcggcccagcagcttggccgcgccggccatgaagtccatgtctatgagcgggaaagccgtcccggcgggctgatgcgctacggcatccccgatttcaagatcgagaagcatttcatcgatcgccgtatcgagcagatgcaaggtgagggcgtgacctttttctgcggcgtcaatgtcggcgccgacaagaaggccgaagagctgctttcagagtacgacgcggttctctattgcggcggatcggaaacgccgcgcgccgccggtattccgggcgacgatctggatggcgtgcatgacgctatgccttacctcgtgcagcagaaccggcgcattggcggcgaggacatccagtctgttgcctgggctgcggagccaatccttgccggggggcagc

SEQ ID NO: 18842 - DNA, 2531 bp, Arabidopsis thaliana landsberg
  unsure (1)..(2531): unsure at all n locations
tcgactctagctctagcaggatcccctataaagctgcattttctttcctctcgtttcgtgtgttaggacttgttcggtagcagaatccctcgtccgagcgtgagttacttttcgcggaaaggtgatgagtgaggtatccgtatcccggaggcgtaggagtccctcggctcggtcggcctcgtcgcttacgtgtactcttactcatctgtaggattctgttatcgatgtagtcgaaacggcacgaaaaatcgttctggcagaaaagttttcgagcgttaggacttgtccggtcagcggaatcgcttatccgagcatgagttacttatcgcagacggtgatgagtgaggtatccgtatcccggaggcgtgggagtccctcggctcggtcgaccttgccgttcaaggtctctctccatcgtttttaggattctgttatcgaagcagtcgaaaagcacgaaagtcgttttggtggaagactcttttcgaggaaaattttggcgcagagggggttccccccttctagcccccgagggagggtcgggctttgctgaggcaaggctgacccttccttgatggttagactttgttggcgtatgtaaacgaggtgtatgaacgacttgaaaacatcttaagggtagaaacgacgtagctgtcggatgttccaagcgttgctgtagacctcgccttgactgttggccagcttgtatgtcccaggcttcataaccttggcgatgacaaatggcccttcccagggaggcatgagcttgtgccgccctcgggcgtcttgtcgcagccgaagcaccaagtcgcccacctggaggtctcgggaccgaacccctcgggcgtggtagcgtcgcagggactgctgatactgcaccgagtgtagtaaggccatgtcccaagcctcttccagcttgtccagtgagtcttctcggtttgtttgattgctttggttgtcgtacgccctcgtcctcggggaaccgtattctaagtctgtgggcaagatggcctcggccccatagactagaaagaacggtgtgaagcccgtggctcggctcggctcggcgttgtcctcagactccagaccaccgaggggagttccttcatccatcgcctgccgaacttgttgaggtcgttgtagatcctcgattttagtccctgcaaaatcataccgttggcgcgctctacctgtccgtttgtcattgggtgagctacgacgacccagtccacacggatgtggtggtcttcacagaagtccaggaacttcttctcagtgaactgcgtgccattgtcggtgatgatggagttcgggaccccaaagcgatggatgatgtttgtgaagaacaccaccgcctgctcgaactcgatgctggttaagggtcggacttcgatccacttggagaatttgtcgatggcgaccagcaggtgcgtgtacccccaggtgccttctgcaagggaccgacgaggtcagaccccatacagcaaagggccaggtgatgggtatcgtctgtagagcctgagcgagcaggtgggtctgcttcgcatagaattggcacccttcgcaggtgcggacaattctagtggcgtcacacnngccgctggctagtagaagccttgtcggaaagcattcccgacaagggctcgaggcgctgcatgatggccgcaagcccccgagtgtatttcttgtaggagttcctgaccttcggcgatggagatgcatcgctggaggatgcccgagggcgtgcggtggtagagctcctcctcatcgcccaacaagacgaacgacttggcgcgtcgcgtacccgccgagcctcggcttggtcgaggggtagctctccttggcggagatattgcaggtatggggtctgccaatttcgatcaggcgtggcccgttctgctcctcctcgacgtgcagtgcctcaccctcgggggccgagggtacctcgggctgaaccgaggacgcctcgggctgagccgagggtacctcgggctggaccgaggttgccatcgggctcgggcgtgtcgttgatcttgacggagggttgatgcagatcccgggagaagacgtccgggggactgtcgttcgccccgaggctatcttcgccagctcgtctgcggtttcgttgtagcgccgagcgatgtggttgagctcgagcccgaagaacttgtcttccaggcgccgaacctcgtcgcagtaggcctccatctttgggtcgcggcagtgggagttcttcacgacttggtcgatgacgagctgcgaatcaccgcgggcgtcgaggcgtctgacccctagctcgatggcgatccgcaatccgttgaccagagcttcgtactcggccacattgttggacgccgggaagtggaggcgcagcacgtagcgcaagtgctttccgaggggcgagatgaagagcaggcccgcaccggcccccgtcttcatcagcgacccgtcgaaaaacatggtccagagctccggttggatcggagtcgttggtagttgggtatcgacccattcagccacgaaatccgccaaca

SEQ ID NO: 18843 - DNA, 1053 bp, Arabidopsis thaliana landsberg
  unsure (1)..(1053): unsure at all n locations
gtcctgcaacctctcagcaaatttgtggcgaagaatcaattgaagtaagccatcgatagtaaattactataaacattcggagaaaaagaataagaaagttcaatggttttgcaattggtttggttttttgaacggttttcaagccaattaaacaaaagaaccggaatgaatttccatgggacctttgacaaaactttgagcacgttttgttttgtcagagaattcttccttttgcagtccacttctcagagaagtaatcagtcacaaggagttcgacgttgcaactcgataacttgttgtattcttccatcatctgcatgatacatttagacactttagggaatctgagctctgtaggatcattctcttcaacatagatgttcatcgccttcagacacagaaaatagcccaagaaatgctctatcaggtgcatctctttcattgttactttatactctttaatctctaccacttttactggacaagatttgagcgaacggcctttatccttccggaaaatgcagtcacaagcatctccacatttatctgtcacatggtgcacgagaccctgaaagcagaaacgagacaataaggttactataagaatgaactgcatgttttgtccaagtagttagtttcatggtttatagttccacctcaaaggtcagggtttctagatgtggacaattccttagaagagcaggcactgcttgccatcctctgtcgtagtcactcttaatgcctaacgttttgacgttgttgaacaccggcatcgattcacagcacattgaaagcacctgaaacaagaaacaaaacgcagctaaaatcatcttgcaatcaatacattacaactagaccagaaagaagaaaatggaaaactaacctcgagtgtatcagaatgcaagtgaagttgctgaacattttgtatgcccttcatgagcttcaccacattgccaaatcggcgaacaacatcatcctctgacaaatagttagttggggctcgcattcnggcgatttgatcgtcatctactccagagatgattcgagccttga

SEQ ID NO: 18844 - DNA, 796 bp, Arabidopsis thaliana landsberg
gaggggggaaacttgttgggcactttcctttcctctctgtattaattcacggctaagtcggggtgaatatcatcgtcccttcatttagggctttttctttaatctcttgcttttcgcttaagaacattactcatgtctctgcttcttaaccagcccttgaagctctgctttcagagcaaacctgggttggtaagatcctctcctcctctctctaatggcttctcaacttccaaattgcaaacccctccttgtactgtcattgacgctgatccttgtggaaggggtctcggcaaactcttcatttactatcataatgaatctgaatacactggtttggaaaagaaggtggctatggatttggtggatattccaatggcaacgattgggtcatcccatggctgggtagctactttgaaggaagacggtatattgcgtctccaagatgatctaaacccggttgcatcgtatacagaaccaaaacgcattcccctgtctcccctcgtaactctgcctcattgccaaactcaaatcgttaccaatgtgtcattgtcctcatcttctcctaaggatgaggaatgtgttgtggctgtcaagttcttgggacctcaactcagcttttgcagacctgctcaaagtaactccaagtggatcaacatcagaatcgcaaacccttgcttctactcctctcgtgtcatgttttcgaagaaagataagatcgtttcgcatactcggatctggaggcaatatcaatggatcatgggatctccacacacacaatcaaaaaccgtttcagaga

SEQ ID NO: 18845 - DNA, 1427 bp, Arabidopsis thaliana landsberg
  unsure (1)..(1427): unsure at all n locations
acatcggtcataaaactgttataatgttttgattagtttataaaatattaacgtttcttcacttaactttacaattaagttatatcttaattttatcttactaataaaattttgtcatgtgagtccggaccttaaaatataactatacacgaacgcaattgaatttcaatcattactcttaactttataatatctatattattacaaagtttactcataacaaaatattatataattttaaaatcaattaaacaattttttatttgaacgtatatgcgaattcaaatctaatacattatactataatatatatcacaaaataacaaaattatctatatagaaataaaaatatgaaaccccgcacgtaggtgcgggtcaagttctagtactaatttaaatgaaaaacatcaaaagtagaattatatggaagtttggtacacgtaaaatctttctaatactcaactggatagttcttgaagtttaatcctcatatcgaggcgtgttcataaataccatagcggatgtgaacgccaattacgatgaaccaaacttccttctcttcaacacttcgtggatataacaccttgtcaataacttaattttcttggtatactccagcggcggtaagtacatacagattggttgtagtgctatcgctcgcttctcgatattctgaagaaatattcattcatatattactcaaatgagaataatattaccctattttatcagtattacccgattttaccagtattacccagaaatcatacttataatatattcatttatggcagtattaccgagaattcactcttgtattacccaattctacatgtattaccaaaaaagtacaataatattacccaattctacttgtattaccaatatatcacactacgagcagtggcggatctaaaaaataattttacccgtggcaacaatattaagcttgaaaaaattcaactatataattaaaaataatgtcgaacaaaacacatataaaatacgaacaaaacacagtaatactttataaaagtaccctactctcattcatagactgaaatcttcctatcactgtttcattggtgacatatccaaaaaatctctctcaatataacatattagacaatcacttaataattgatctccaattctgttgcgtgaacatgtcttcactagtttcatttcaacgaaaaacctttcgacacttgcagtagcaacatgcaaagttaaaactaacttcagaagtctataaacaaaggatgcgcaagatgcttttgcgtttccaccataagacgagaaaagatctccaagactcttcaaattcttgaatcgtttatttgcctgcatattgtcaatatagatcnctgagtgatgttcaagacataatcgatccccaatactaaagttctatggatgaaattcag

SEQ ID NO: 18846 - DNA, 2373 bp, Arabidopsis thaliana landsberg
atatgaatctgatcatcactagtcttgtgatgattttgatttcacatttgcctttttcctcaactgtgaatccagacaaaccaacaaagtctataatcgacagaatctgcaaccaaacagtgaacttcaatgagtgtgaattgattgtcacgtcacagctacactcgccgcacgcaaatatagcgaccataacggaagtgatgacaaaaagagctctgacgtttgctacggagacggtttctcaaatccaagactatcttctcccaaacgctacagatactcaggacaaagccgttttctccgcttgcgagatcgcgtacaaagccgtggtttctcgtcttcagagtgcttatacgtcgatgaagaacagtgattacgtggcgatgaaggcacagcagaatcaagcacttgggtatattgatgtgtgtgttgagaggactaacttctttcgccggactccgatggtagcagccaactattatgtgaggttgacggcgaagattgcttccattgcaggccagatccttgctcctagtacgaccacgtccctgtccccttgaacaaaatattattttgtatttttgttagagaaaaactcgagctttgattcatcaataattatttatttatttattaattttcgttgtcttttctcatagaaacaagacaaaccacaaaatttagcatttcagaaatttgtagaattcagtgaattttggaaattttctcacaagagattcgtagaattcagtccactaagttttctatgaatgatgtggttattaagataagatttgttgtgtgcaagaaagtgagttaccgaacaaacagccgtcacttacaccaaaaaattcaatatatatcatatatggtgtaagaaattacacactcccaaagtccagcttgtgacgagaggtgcctttgaacttataaaccatctgttattcttttttctttccaatggtcttaggcctggtcaaataaacgaaccaaatgtaccgaatcaaaaccaaaacaaaaataatcgaatcgaatcaaatcgaaaattgaaaaagaactgaatggttactaaattttataaccaaaaaaaccgaaaccgaatgattatgtatcgaaatatttcaggtaaccgaaaatatctcaaatataaatatattttcaaaaatattagttatttctaaactaaataattaaaaatggttgaaaaaaatatatatatattatagtaaaaatattcaaaaataaccaaaaatatccaaaatatctgaaaatattcaaaacaaaataaccgaatagatactaaattttaaaatcgaaagaactggaaccgaaccgaaaccgaaccaaattttcaaaataaccaaatggatactaaactttagaacgaaaatatatttgttctttgataattttcaaaataacttaaaggagtagctacgccaattgcgcagaaaatatgtttgttctttgataattggggtatatgttagactaatctcaaaagtatttgaatttcttttattgaaggcatctacaatatagttaaaagaatcacagtcatttttggtagaatctgatctttggtctaaaactcaaaaaaatatatatacagtacattaaacacactacatattcgtaattagagatgattgttttggtagaaatttgtaaatttcttttaagccagaaaccagaataggtataaagtagagacccttcccaagctatccgtaaccaggagacaaaagtttctcaatctaccaaaatgatttctcaagctatccgtatataattaatcacttggttacatagtgtttaattatatacaaatttcatagatggtaaaattctttctctgcctttgaatctcgtagagtacttttatacattaaaaactgttaaaatataacactcatcgttgcagattatatatagattcgatccctctacggttgaatcactttgtggattagaggttggttttctcttgtgtacttaaggttaaatcatctataaacatataggtttagaaaacgagaagtagaacatacacctgaagaggataagtggaccatacgtcatctagaaagtgaaacggtcaaactcgagaatgaaacgttattaagaaacaaagaaaaagaaacacgtaccaatccgatcttgatccttttgagggaatgttttgttctttttcttttttgttgttttgctgtcattctctttgttttattcttcttcttcttcttgtttgagtgttggagacggaccgtatcataaagtacggatccaagatgcgagttaatcatcaaaaaaatgacaaacaaaaaacataattaatggttagatcatatttaatctcttattctttttgca

SEQ ID NO: 18847 - DNA, 1944 bp, Arabidopsis thaliana landsberg
tcttgttatatgcacacaactatgcatcatatttgcttgtacacattcataatttcttctctgtttctttgattcatacaactatgcatcatattactcacttgcttccttgattcattgtctgatcctttcacttacttattttctgctttcattgctttcttcttttattttttattccttgctttattaccagcttttcggtttgtttgtttactttcttgcttccttgactcttttgcttacttgcttgcctttgaattttcttccttgatttcttaaatactgtctctttttacttaattctttagttaacttgcttcctagtttctttactgtctttcttatcgcttgttttcaaatttcttactttctatccttatcgcttgccatttttttgactaattgtctcagtttattttccactaaaatgtgtactttgctttagataatactaggttactatttgaaattctacagatggagactcttaaagggtccatcaaggcaaagtcctcgtcatcattagtgggaaacacaaggatcaagttctacgattattcttttctatttaactttctctcttcgtttcaaattttagtatttgttagttttcattgttcagggtttgagagcttggtgtttacttgcaacctgcttcttggattctctgacacaaggttttaatgttgaataccgtgggaatcagataaggtataactattttaacttatcttgaatcaatatacaattatatcaatcgaaataagctagagaaaggtttatatatctgtggtataagcagtggcataagttgctggaagaacttgcatcatagagtaaaacaagaagatcaaccagccacgaatgcccacttgtaagttaccatttacaaatctatggataatttatattggatatgacaatttgccttttgttatgtttgtcttgctggtcttgtatgcatttgcactggtggaacacgttttattcgtatccgttttggattttgttagcttaaagcaccacaatccatagctaagaaaacgtgagagatcaagttctagagaaaaaacaaaagctggagcaagattcagatttgtggaagtaaagcttttcatggtaattcaacaaaaccattttcaggtcttggtttctatggttttgaacttatatagtatgttttacaagtttttgttgtcttctcaaatcagacgcaaataatatcgcggcgtgcctctcaagtttttggtctatcgcaatggagctttaaaactgttgtgcgtcatctttttgtttcccaagtatgtttcttcaattcttcttttatgcttagtctttcgagttactttctcttttcttcttcttttattcaagtagaagattatatagtctatgtgagtctcaaaaacaaaaaatgttttatatggagatcggtcatttatgagaactgatcaaacacccattggttggtttgtttcacttttcacattgttttactttaatgcagccatttgagtccaaagtcaagatctagttcgggcaataaaattaaaaactttcacatgaagtaattgtttatttttttatttaaattgcaaaagtgagaatttacttgaagttttgtggttttcttgaattggggaattttatatatttgcattatttatgaagcgagttctgcttctctgcttcccttttcaggtttcactttggtttttatcacatatttgtctttctactaatatatggtgatgaagttttgctattttatatggatttcgttaatgtgttcatgggattaatacaacaatgatcagcatgatttggtaaaggaaacaagaatgcatcaaacgtaaacccttaatgttcttgttccctatctaatctaaacgttaaaatctttcttagaaaattctttgtttcccctgtattaactgaaaa

SEQ ID NO: 18848 - DNA, 705 bp, Arabidopsis thaliana landsberg
atgtcttttcacgaaaaggagaaatcacagacgtgaaattgaagcgtaaaaggtacattcaaatcgagtgtttttcacagctaattcttgtgttttatgttggaatcactatatttcgttttgcttttgcagtgatggcaaaagtagacaatttgcttatattggctttcgtactgaacaagaagctcaagatgctatcacatatgttaacaagtgtttcattgatacttatcgaatatctgttgaggttattaatcttcacttaattactcagtttcacttatgtagtactagtttcaaatctaaatcagattctccttggtatataggttgcggaccctcctccgagggaagaagggaaggttaatgaaaatagtgaacattctcatgaacaagatctcggctagcctttcaaactctttttctgttgtcaacattctttatcaaaaacactcaaacaaaccgaagcattcattgtaacaaagtttttttggttgaatctatttttacattctttcaaaaaaagaaaatagtgaacatttttctaatgcttatgctaaaggagacaaaaagattaagaagaaaccagaggttgatcatgatcctcagcttcaagaatttcttgagcttaataataagttgaaaacctggtccaatgatatgtgtccacggcaacgatcaggtctcgcccgatggtgctgatga

SEQ ID NO: 18849 - DNA, 242 bp, Arabidopsis thaliana landsberg
taggtgtatgaagccatcacaccatattgtagtggatgtttttaattttagacttcagccatctggtattgtggtctgtgtctctcgaccggtcctcactataagtcttctctttgtaacatttttgtgatcattttggatcggtagttctgtagatgttctttatttttatgagtgttttgatagtgaacattaacttgattcataagacaactgtatgctcaatcaattggtttttgaag

SEQ ID NO: 18850 - DNA, 728 bp, Arabidopsis thaliana landsberg
taaactattttacaaatatagatcattatacagaatgatgcatctatacagaaggatatttgttcggaaactagtacatttttgaaatcttcatagatatagactactgtatatatatatatatatataccaatgtacatatatagactactctaaagatatagacaactgtacagatatagaccactgaatgatacatctattaaacgaaattataatttactgttatacaaacaaatatcctctttacaaatgcatcattctgtacagtagtttatatctgtactgtagtttaaatctgtatggtagtctatatctgtacagtatgatatatctatacagtggtctatatatgtatagatattatttgtacaatgtttagttatataaaatttaaaactcattaaacaaactgcatatcaaatgatagaaaaaaacatagatttttatttatatgatcaatttagaaaaataaaatttacaaatgaacattttaattattagactttgagggaatgaaatgtaataaagaaaaaaaaaaaaaatgacccacatctctctctcaaacgctctttttcgtgtcacaatagtggcatgttgaaagttgtttctatgggggtataatcggattttctgaattaggggggttataggggggagtggactaaattggataaattggaaaataggggaaccaacccaaaatctctaattaaaagttttggaaa

SEQ ID NO: 18851 - DNA, 833 bp, Arabidopsis thaliana landsberg
caataccaggaagagaaaacggaggaaactgtgacattttatacctaagcagaggctctaaaatatatcgtgcagtatttgttgaaggggctaatctaagcacaggagacatgcatttctcacaaggtgatggtgagatctcgttctgcggagccatcgagatgagtggatttctagaactcaagtatataacaaataagttctctcgactatgcattctcagatgttcttgtatttgtgcagcgtattataaacaattctgaccagataccatgttgtaactccttaataggtgtgaaatcataagaaatgggatgcaagagtaccttacgccaatgggacctacccctctccatgtaaacccaatctttgagataggaccagtggaaccgaggttctcagagtggcttgtcttcgagggtatcagtgtcgatgagagcggaaaacagcattacctagatgcaacagttgcttacaaacgggcagttctcaacgccatagactatcttttcaaattcggttactcaaaagaacaggtggtgatctccgcaacaagatgtgtctcacagaacctagttgatcgccagcattaaaacaagagataaaactgatcaagaaactatgttgagaacaggtatatctcttactctcatgctgtccatgcgaaggaagaatatccggtatagtcgattctccaaatgccgttgctacacttgcaatacccactgccatctttggtcaggtttgaagttacagtaatctgccctcccgactacacctgagcttgctctcttcaataaaacaattcctcaacaatgccaaatgccaaacat

SEQ ID NO: 18852 - DNA, 505 bp, Arabidopsis thaliana landsberg
tttgttgaagttggctttcgcagctaaagggtcgacggagaaagattctccggttattaacggaacttcaccgtcggtaaactcaaactcgccgtggttcatgttttcttgaaatttaacacaatctctgcaaataacaaaaataaaaagattagaggaaaataaaaacagaggaagtttgtttgtgaggagaatataaaaatgagatttttacctgtttggtgatataaactgagagaaaatgttcatgtgatgagcttgaacagccattgttgttgaaaaaagctccgagagattctgaaacaaagagagagagagaagaggaaggagttgtggcgactggtgaagaaatctatgggattggcttttatttaagggagagaaaaaagtcaatattttttaaattttctataaatacatatttattaattttactatttaaatattttagatatttagaataattatgaattcaaattagatattgactctcatggtatattac

SEQ ID NO: 18853 - DNA, 1014 bp, Arabidopsis thaliana landsberg
aaatccaatgatgaatctgtgcagaaactctttatgtctgtcataagcgagctaaatttggatcctaagaagttgaagcaagaggaagctaagttttggaaaaagcatcctgcaactatcaaggttggtgtttttttaatacatgagtaacacaaaagtattggatagaatcttgaaagtgctaacgttttttcccgttcatttttctctggaacagactgagcttttgatacagaaacagttaactcgtgaatcatcagtcctgtctccgactctgcaacgtgatttcaggcatgtgctagagtttgcacctcgcctgcttgaagatttgattaaggtcttatatagtctttattttttttgcataaaataaaggttattacaaagttgatgatgacttgaatctcctaatttacataagatgtgaaaaaggtttcaagcttaagcatagggaaaatttcaacgcgaaactatatgatattgtgagtttcttacagatggccgttataccccgcaatgaacaagggtgtggatggttacgtcctgcacttggagtaatggagctatctcaatgcattgttcaggtattaagatgtttccaactttacatttgccaaaaaaaaaaaagatttttcagcctaattatagttgtttgattgcaggctgttcctcttagtgcaaggaagtcatcttcagaagacattgctcctttcttgcaactccctcatttcaatgaatctatcgctaaatcgatagcgttgcaggttaaatctttccaaaagtttcaagaactgagcttggcagaacgttctaaactgctcagagaggttgtgagtttgtcagaaaccgatgttcaagacatcgagaaagtgttagaaatgataccttctcttaaaatcaacgtcacttgcaaaacagaaggcgaagaaggcattcaagaccccgacattatgacagttcaagcttggatcaaactgaaacgtcccaatggactcataggcgctattcctcact

SEQ ID NO: 18854 - DNA, 299 bp, Arabidopsis thaliana landsberg
ttatatgaatataaaaagattctctacacgctttttcaccatagcatcgggctctttcttctttttgacgacacctcctatctttgtataaaaatgattcattatgcaaacgtgacaaaaagttaactacgaaaagtttactctgtcatctttacattaatggaaaattatcactatgcctaacatgatccaatgcttgaactctagctaatttataaaggaagccacactacactttaggatgactaataacatattctacaattgacgttaacatcgacttcataatataaaaattc

SEQ ID NO: 18855 - DNA, 1145 bp, Arabidopsis thaliana landsberg
gcccctgtatcaagaatccaacaaacagatagttgcttaccagtcactgcgtcagttgtactaacgtttcttgctacgaacatggtttgcaacaccttcaattgttcatcgttaaacacaccagacccactcacaaccttttggttgtctccctgaacaatatgagctcttgattgaaggatacctcgtgatccacctcgactgctacttgattcaccagaactttgaccactctggttccaactctctgggtaaccaatcagctggtaacacttctctttgtcatgtccctgtcgaccacaattggaacatatcaaatctcggtacataccatcacctcgaccacgcggttgaggagaattcaccgcagaattgaccacatcaacgaaacccaacttctttctcgcccttaaggctgttcgcaactcgcttgaacaattatcataattgtcaggctttaataacacatgggagatcaaggctccgggattatcacctgaagacaaatcatatgaattgattgtcttccttgaagcgccttcagctgcttcgaaattatcacgggtctgagtgatttccgtcactccattgacctctacaagagcgccttcagcagctccatctttcttctttccactactcgccatgaagaaagattacgaacgaaagcttaagaaattatgacccacaaggttctgataccatgtcagaatttaggtttagatactggaaattctgtgttattcatatgaaacggctacatacatatatatacttaattagggaacattaaccctaatcacataaagtaaacctaataaagcccataacaaagcccacaacacaggcctgatccgtcacacgtttgatccggcccacaacacagacctgatctgtcacacgtctgatccggccctattatttatgtgaacgtataaaattttaaattctgacatccatctatataaaattaacgtattgttaagagcattaatatgtcacctaggaaaagattgctcttcccataagatttacaaattatccttaaaaattatataagtcgcaacattttatcttacttagtttactccaaaattttgttatcccacctaattattcattatttagattttagtggtacaacc

SEQ ID NO: 18856 - DNA, 2036 bp, Arabidopsis thaliana landsberg
atgatcgtaataacaagattttgcattgaactataatcggagctgctgtagactgtagtggggtttattttaaatttttaatgtgtagatgatagctgtccaatttagtcagccaacatgaattaaaaaaactgtacttaacagtaggaaaaagtagtcgactttatattggaactggtcttaaatctggctagatattatgtagagacatatttgggagcaaaaagattcatgagttgaaaacctttcattgctgcttctttaattccaaaataaacccatatggaatcaccttctcctcatttctctagagctaaacctccatgtcgtctgtccgatccggctcagccccacatgctttgccgacggcgacgaccaactcatgctccactttctatctgctttacgtgtaaaggcaaacacttgaagcgcagcaagtattattactactgtgctacttgcaatttggaatttcacagaggttgtcacgtctttctgccggagatcagaagcgcttttcatccctctcaccccctcaccttcaccgccttagatcctgaatttaatgcttctatcatacaccaaaactggagggacagctccgcttcagaggaatcttccgaagaattgataaacgaagttgttgactatggtcatgaagacgatggtgatgatgacgattatggggatggaaatggcggtggcggtggcagtcgcagtggcagtggcgatgtttatgatgtcgcttataatgaggaaccctatatgttcttccatggaaatcacctgaaatgcaaatgttgtcaggttcctttagaaaagctatattatcattgttctatctgcaagttcaatcttaacttgacttgctcgatgagaccaccacctaccactatctcacacttgaaaagtcatgagcacatcctcacccttttccctatacgactccctctaccatgtggggcgtgcggcttgtctctaagtgacgccgaagatcttgtttacgcttgtctcccttgcaaccttttggtccacagatcttgtatctatctacctcgtgtcattaagatcacccgacacccccatcgtctctctctcactccctcccttcaacctggtgatttctcttgtggagtttgtcgccaaactgttgacgtcaactacgggcaatactcttgtgataaggaatgtcattatgctgtccattcaaaatgtgcaacaaggaatgacgtgtgggatggaaaagatcttgatggagtgcctgaagaacccgatgagtttatcgaaccgccattcctgaagattgatgaggagactattcaacatttcagtcatcaccatcatctaaagctccatgaaaagaaaaccattggcgggaaagacaagttttgtgaggcatgcacccttccagtaatgatctctcagagatattatggttgtatgcagtgtgattttgttcttgatgaaacatgtgcttctcttcctcgcaagaaaaaccacccactacataaacacccgcttaaccttcagcccttccttatagatgagacattcatttacgcagataatatttctaccaaaggcattttttgaatgtgatggttgctaccgaaaaaattgtgggtttgtgtacaaatgtggtgaagaaaaatgtaactttcgactagacatcaggtgcacttcccttccagatcctctaattcatggctgccatccacatgatctcttcttcaacttgagcaaaggtaattgcatggggtgtggttctccaaggtgttcatcctatttcctagaatgcattaaatgcaaatcctttttgggtattagatgtgctagtttgcctggtgaggcacactacaaattcgataggcatccactcactctttgctacggtgaagaagatacttcaagtggccaatattggtgtgagacatgtgaggaaaaattagatcaaaaaacatggttttatacatgtgactgttgtgggatcacactgcatgtcaactgtttattagggcaagatatctacatgaagc

SEQ ID NO: 18857 - DNA, 523 bp, Arabidopsis thaliana landsberg
cgccctaccaaacccattaccctatttttttgttaacccacaaaaaaaactcaaaaaaggacattaatgacacatgattacgggcggcatcaacttgtttaaactaaattaaacaggatactatgttggttaagtacgatgggcagtatctttcggaaatagatcatctgggaatcatggaccaaactgggttcggaggggagatcttcatcaattggaacattgttcccgcgctatagcgaaaccaaaaacaatttcagacagctaacacgtaaacatagttaacataactgtataattactaagaaattttaactatcactaacttcagaattatcttcaggattagaatatagaggtgagtcaacatcatctgtaaaattgttaactccctatgttagttatacaacacccacatagagcaaacaaaagactatctatttgaagttaaatttcgatgttattatataagtacactaactactaaactataagttagcttaaccaaataaatcatatctac

SEQ ID NO: 18858 - DNA, 998 bp, Arabidopsis thaliana landsberg
ggtcgactctagaggatcccctgccttctaatctttcctttaaataataatgcaatccaatgctaatctggctagtttttttttctgccaaatgaatttgaaagcatcggtttcttgtgtcccggaatctccagatgtaatcattaaccaattcatctttaccttgtcgtagggccactagatctacaaaatctagttcataatcaccagaaaagaaatggtcttgaaatttttgctctaaatcccccacaacaaaatagaattaggagggagtgtggcataccatgcgaatgcagtccctatcaaagataatgaaaataaacgcacgcggaacgcatctgtgctggccaattctcctaattgcgttaagaactggcctatgtgttcacggtgtactcttaccttggtcattcgaaaactttgcaaattcgggtatcctagttccctgtgggtatgagtgatggttaaatcgaccgtcataaggtctccgatatgactgccccagggaccatgcttactccgagcttatctcggaatgccccggctatttcttcccttactatatcaatggcagccggtgcgagaccaccggctctttggtcaaacataggtggggttggctggatattagcatgttgtctttcccccattggtttgagttacgtggtgcattttcatttgccctatatgggtcataggtttgatcgtttctttccggcctcctgggtggggccggaaatctttcctgggctctggatcttgaattaatgggttgatgcattgtatagtgcgatgggaagtgctgctgggacgggtgaggattccggtaacaatcctcctcaaaaaggtcatgtgcggactgttcggacattggcccggaccgtccgtgattatgtgcggaccgtccgttgttgtacgcggacggtccgactgggtagtttagattctgtgttgtgtgtggtggttcgggcgcatatctaggtaactcattaaaaatc

SEQ ID NO: 18859 - DNA, 1611 bp, Arabidopsis thaliana landsberg
gaccccggatgaggaagctttgctttcttgcgaaagagcttgaaaagacacagatcaccgattctgatatggataatgttcgccgaaatctgttcggtaatggttcaaccaacactaccataccagcctctgtttcccaagggatgatgtcacacttgtttgatggcaaatccgggttcaaaacgtggcaagaaaagatgcgctactatttggtcagcataaacatggaaaggtacctcccagaggatccaccaatagttccgcaaggtaccacatatgtgtatacagttggaggtatggatacatgggctcaaggtgactattgttgcaaaggtctaatcctgaaccgcttgttgaacgatctgtttgtcctctacagcaaggccaagtcttccaaaacactgtggctaactttagagaacaagtataagactgatgagtctagaatgcaaagattctcaactgcgaagtttctgaatttcaagatggtggactccaaaccaatcatggaacaggtggaggctcttcaacgtatctgtcaagagatagagttggaagggatatcgatctacaacgtcttcaagacgaattgcttgatcgagaagctaccaccgggctggtcagatttcaagaattaccttaacttcaaacgtaaggcaatgacttttgatgatctcatccgaaggttaatgattgaaggcaacaatcgtggggctcacgcgggtgcttagaatcaagggcatgatgttaatgtagctgagcataaggccaagctgaaaggcaagggaaaagggttctctattcctcagaagaacttgaaggtttcatcgtcaacaaacttcaagaagagcaatgctgagcggaagttctaaggaaagtgtcatcattgtggaaagattggacacaagggtgatgtttgcaagagcaaagccaaggatgtcaagagccaggcaaacctaactgaagaggatatggttgcagtggtcactgaatgtaacatggtggacgacaaccaagtgaagtggtactacgacactggtgcaaccacacacatctgcacagataggaccatgttctccacctatgtgaataacaagtcaaacgaacaactcttcatgggcaacacggcgatgtctaagattgaaggtaagggcaaagttgttctgaagctgacttcgggacgtgagcttactctgcaaaacgtgaagcatgtacctgacatgcggaagaatctcatctcttgaacggtgctaagtaacaatggctttgccgttaactttgagtctgataagctagttcttaagaaacatgtagcttctgcttctgttgtggaaatgaatgaaaatcctattgcttacttggttgagtcatttactacttggcatgaacatttaggacatgtcagttataaaacaatgcgaaaaatgcaaaacatgaatttaattccgaaattcaaaactaaccaaaaaaaatgtgaagtatgcgtacatgcaaaactcactaaaactccctccccacgagttgaaagaacaactgaacctctgggtttaattcacacagacttatgtgatttaaaatatgtgcaaactagaggtggtaagaaatactttg

SEQ ID NO: 18860 - DNA, 1809 bp, Arabidopsis thaliana landsberg
tcggggaaaacctaatcttgcattggggaccagcggtttgagctcatggctgctggtcgggaaattgatggttttgcgcagggatcgacctcattggagattgtagatgcagtgggagcacaagaatagcatggtctgatgtatagtcgagcaaacaagaagtcttattagcaccagggaaaatagaaaataccctaagaagagagtcgtcttgcgccgacgacgtctccccttggcgcatctgccgatccaagagggattactcctgccagcaacgaagcccagggtgagagatcttcatgggggataagagatttggctcgagaaggttttggttcagtggattctagatctaatttttgtaaatcactggtttttgtgtgcttatgtttggatgttgcggaactagtcggagggaggaggttcgccggagtctccttccactctttgaaggtcactgaagcatagccgctgaggagggttgagatcgataagattttaaaggattgcaacaacggagaaaaaaattgaaaaaacttaagtaataggaaagaaaaggttgagaacagaagtagagcaagctcttggtggtgggatcccaacgctggcgaccaagagccccgccaccggcgtcgaaaaacttgaaagacggaaactcctcgatagtcgtgcatgggagagtttgttttacgctttttagtcaactagaaatatactactcaaaactgattttttgacccgtattacatagtagatagaatgttttttttcaaaacaaaactagtaatattttacaaaaggcaaggttaccttttattatgtacttcctaaataatagtatatgatgcaatttggtgatgcaattagttagttgctaattgagcattcatgtgggatgcaacttcaactatgaattttggcattgtctttctcacatgtagacatggtaatgtaactatgtaagttctcgttaatttggtatgataaatagactttgtttggaccagttaaagttccttgaaccagtcctgacctaatatatttttgggctaagaagttttaaataactccaactagttttctattgcatcgcccaagaatcagaatatacactcatcttttgtagatattttgggtatttatgagtaatctgcatcgatttaaaccacatgctttgataattcgagactccgggtatctcaaatctgaatccgaatccaaaatatccaacctaaattgacttgaactcaagttttaaaataccagaattgattatagatttgtaaatccaaaatatatgaacctgaaaaattctacccaaatatttgaacgtccacacgtagacaaatttaataattggtcatgaacctatgtactgtcatagatctgtcttatatgtttgggctggacctgccttgcaactaatgggcaatgtttcctaggcataactcttaactgttggtaagtaaggattgaatttttttgttgcttgtatctactatctacagtataaactatataaaataaaaggacctcctttgtcatttataattctcagcagatagttatctatgaactttccattatgtaatctttcctctcacgttagtttctcagatacgtgaaaaatattgaaacttcaaaatccgacagtctcatggcatgagcagtttggtacaaatgagcagttctaaaacatgatttatcgaaaactgtttttcgttatatattttatagaattttatatctttgtatttctaaatgaacaataaccatatttatttttagtaaaagttaaaatttttacca

SEQ ID NO: 18861 - DNA, 1548 bp, Arabidopsis thaliana landsberg
ccatataccgtttcatcaacagagcgtgtttttgaatggaacacttattttcttgctcaagagaagataattgtggaaggagaagaagaagaagtagtagatgagattgaaaagtttttactctgttttgattttactacagagaggtttggaccgcgtcttcctctgccatttcactctgatgttttggaaactgtggctatatcttgtgttagagatgatcagcttgcggtgttatatcagcggtttgaaacatgggagatttgggttaccactaagatcgatcccactgcggtgtcctggagcatgtttttgtcagtggatatggaaccacccactggttttcagttcgacgacgaagctgggagcttctttattgacgaagagaacaaagtcgctgtattttttaattcagacttgtttaacccaagagtagaaaaccgaaaccgccgctacccgacagcttacatcattggacaagacggatacttcaaatccgcgactctccgggaagctcccgatctcgtaaaacctgacccctacttgtattgttgcccacttgtgtggtcttcttatgctccaagcttagtgcaactctaaatcaactagccggaaaaagagataactactccctttgtgtgtttgatatttatcataataataagtatttggcttttataattctagtttagtactttgtccaatttcacatccaaacaagaagagaaaaagcaatgttccatgttaatgcagttcatgtatttactgttgaaatgagatatatgaatagtcatcaatctctcactaaagacatattggtatggacattctagtagttccctaaacaacctaaagcatatttatatctgctacaagccttgtggtttccattttcttagttcagcatcaacaatactgtgtgcttcctctgcaatctctgcttttcgcaacgcgccatcaatcgcagcttttaactcttccatctctttaatcttctcctccaactttctttccccttctattctgctctcattgatctcttccagctgagccgcaaccgttttcgctttaaactgtaccattctctctgactcttcatgctttcctctcaattcttcgtactctttcaatgatattctaatcttcttgtcaggctcatcatgtgttagactctctttcttctcggtaaggactttcatgtcttccacagctcttttctccgcggttttcgctttctccaccgctcttccaactatctcgagctgtttcactgcttcacccattaccatatgttttgctgctgcttctctcctgagttcatccacgttcatcctcatctcttccgcttcttttcttgttttctctgcttcacgcatgatctcagcaactttacgactcgctactacccagtctccgtcttcagcatcttgtcgcgccttctgtgcttccttcaactcgctgttgactctcggcactccatccaagttgacagtgagtgaagccatcaagcgtctgtatgaactttctgcatgagacatggcttgcatc

SEQ ID NO: 18862 - DNA, 567 bp, Arabidopsis thaliana landsberg
cgtatttatatatatatacatatatatatatatatatatgattaacgtttcatgtaaaaattataatttgttaacttatcataataattagaagaatttttgtattttttcatattatcggattcattatcattatgttgtttcgagacaacatatatgattactttaaaataaactcttataagagccatacatttttaaatcatcatagccctcaacatacgccgagaatgaggaatactaaagacgcaaaggatattcataccatgaaggacaaaatgagttgcaaagaccacaaacaagcatattgggggcatctaacctagatccggtgaggccaacttactctcctggacaagaagacgtgtaggatgagagaacgagataggctcgaacttttgtggacatacaaaaacaaatgacttttgttacaaaaacaaatccagggagctttgagtgcctatatctggaaagatcgtcaaagctgtctcatgcatggaagaaagcttggagaaactcaaaagatatggaacaaacatgagcatatttcagagcgatcaattagtc

SEQ ID NO: 18863 - DNA, 1766 bp, Arabidopsis thaliana landsberg
gattaacaacgcaattgtgtgtgtttaacactcaagtcaagaaactagtggaccgtttaaacaaaggtcagttgaagggagcaaagtttgtttaccttgattcctacaagagtacctatgatctcgccgtcaatggagccgcttacggtgagttacatacattcaaatacattaaaaatatattagtctaattgtttttaaaatgtcttctaattgtttacattgatcctacaggatttgaggttgtggacaaaggttgttgtggggtggggaggaacaatggtcagataacatgtttgccgctgcagaccccgtgccctgaccgaaccaagtatctcttttgggacgcgtttcatccgacggagactgctaacatactgctggcgaaatctaatttttactcccgagcttacacttacccaatcaacatccaagaactagccaatctttgaagaaataatatcttgatctcccatatgaatgcatatatgtcatgtaatatggctatttataaaatgtttctatttcctatgtgttaaccttatgtttctttgaaataactaatgttcctttgtttctgtattgttcctcttacgtaactctcaaatatgagagaaacatatgacacgagtgctcactttgattgaaagaattatatttacaattctgtttttggatttggttttctagctcttttatgagctgttcttttcttgtcctaatttaggccttatttggatagcttttcttgttaacttaaggttccgaagaagagacaatagctgtcttcccttctttactcttttctgactcagacattttattgagaattcaaaaaacttaatattcatataggtaaaataagaagtgaatgactagattaaaattgtcaaattttatatttattctcccttacattttctactagatgaatgaagaaagacaccatcctgaattgagaatgaagaaatagaccattctggacgtttgggtattcgggtcgggttcaggtcgggtcttttgggttcaggtttagaagtttatgacccatttggttatatgtacaattttgggtcggtacacttcagatctgcgtgatttgggtattggttgaagaacccgataaataaccaaaactatttcgggtttgagtactaacccaaaccttgtctaaatatacccaaatatacagaaagtacccataaaaccgggaagacctgaaattataacaagtttttctttaagacaataacataaaataagaagtaaagcttgttttcagcttgttgcataatccaataattaaacaagtcacaaactaaagttattagtgtatatatgttttcatatgtatttatatgttcgggtaataataagtacttacggggatcagattcggtctgggtaatacccgatacctgaagttacttgagaacaaaccccgatcggatattttacaagaatcgaagtagaacaggtttgggttttcgggtcgggttctgtctggttctttcggtttgggtattgtgcccaggcctaatattttcatttattttgtactttgacatatagacacatcaaggcttggcctactactttcgataaagacacagagaaagaaaaaaaaattgtataatgaaactacatgatgaacttataaggtttccttaacttgcaggattgatttcccaacactctgataccagaatacctaacaagagccaaaatagaaagctccaattaagccgttgattctatgaatcatc

SEQ ID NO: 18864 - DNA, 612 bp, Arabidopsis thaliana landsberg
gtggtataggcccaaatcttttagagataatgggtcaaatactatttttatagcctaattaatttgacttatgtaatttggccccaaaaaaaatttcaattatttttgtttttttagtccatttcttccaacggtgaaatttaacattatatcacttttgtcgattaaaagaaatttcggaaaattatatggtgtacacaatttttcatgaaatacggaatggtgtacaccattaaaatcatgatattggtgacaggatggtgtacataattcttaaatgatttaatataattaaacttaatggtatacatgttggtgtacaatattatgatatacgagatttgtgacagaatgatgtacacaattttaaatgatagcgtgtgaaattggtagacataacgtacaatatttggggtatactaatagggaatgtataaaccattatttcaatttactggtgtacatcattttgtacattggatttgtacactatctcaaaaactttcatatacaccaaattattcacgattttatagatttagtgtacaatatttttgaatatatataacctattatttcaatttactggtgtacattcatttgtatactgat

SEQ ID NO: 18865 - DNA, 728 bp, Arabidopsis thaliana landsberg
tggtaatggtaaggatactttggtatggattgataaatggatttttgatggcaacgctcgaagaccaattggtattcactcgcttatggatataactctacgtgtctctgatcttatcattccttcttctggtctatggaatgtccaaatgctgaggaatttatttcaccgtgatgatgtaactcgcattcttgatacaagaccactgttgcgaagctgtgattcttactgctgggctagtaacaggacaggagtgtattctgttaagtctggatatgagctgatatattggttggaaaataaagacaaattcactgaaccatcaatctctccttcattgtttcagattctagaagaatgttggaaaataaagacagctcctaagattcaggtttttatgtggaagagcattaaaggagcgatagcagtttcagacagattgcaaacacgtggaattcgaatatatgatggctgtcttttatgtggtgcagaggaagagacaataaaccacattctgtttcattgtccttatgctagacaggtttgggctctctctaatgttcctattccttcagaaggttataaatctacagttcatgacaattccaagatctcttctctttgaagaaaaatggcaaaatcagtgtggaaatacaagcagttttcccatggattatctggtttctttggaaaatcgaaaccagctgttatttgatggatctatatat

SEQ ID NO: 18866 - DNA, 623 bp, Arabidopsis thaliana landsberg
ccaggtaatactttttgctgtgagtgggcaaggcctcatcagacaaccatttgggcatatcaccggtgtagatgggatccatttccttatcccggtcccaataatcattcacagacttgttacctgatttcacagttagtcctctctagtgatctctaaagacggtgctaagaagatgcggtaaagaaaatgttacgtacatgtgggtctgcaggccaagatcctccaggtatatatatcataagtatcttgggtataagatccagaacaaagtctaaaaagagaaggcagagttggaggccggatccattgcctccaaagtgatgtagtggtcactgtaagaagtgaacgtagtattatacttttcccagctcttaaacttaaagtttgttccctggcaaccaatatatgaagagaggaatcaaagcatcatgaccaaggaaggtgaggatgagaaacaacaagaggattgattattctcagggtgggttaccttttgaaaattgtagcagtagagtccaagcctagcataaagggtgagatcataatcaccggacacaggaagcctatttattctaaagtcagatcccaaatcaaaaccctggaaaataaaattcaaacca

SEQ ID NO: 18867 - DNA, 1486 bp, Arabidopsis thaliana landsberg
  unsure (1)..(1486): unsure at all n locations
ggtaataatagaagacaaacattcaaaagaaaaaccaaagaccccttaaactgcagaaactgcagagcttccttttatgaaacgaaatactttgactagattcttttagaaataacattcaagaacttgaaacaatcatcgtattgaaattacaatcaactaatatctcgagtttgtgatagaattgacacgaatactgattatatacaataatgaaactcgtgactaaatctctgcagctaactaagtcatgatcatatctgctgatgaaagcatcttcacgcgactctcttccttaaatcttgctctctctttaatcctttgaacctccttctgaatcttctcactccccatctcgtctttctccatcttcactaatctctccccactgatctcaccaagtaacactttcctcctcaaatctggattgttactatctcccatgttgaacagaatcgacctgtactttgctttttgaggtcccatgaaacaacctaatttctcaaacattgcagattccacagatacagccacaacccaaggatcacaaacagtcatgactcgtctcttcatctccgtgtcaacaacctcagtagcgactttagccaaagatgattgaagaatctcatgcactttatctcgttttgaatctccagtcttcttcatcgttgaatgcgtcggaatcttcaccggagtttctctatcacgactcttttctctacctgaagcataatgaatcttcatccaaagatcccgaagaatccttccttccgatcgaattttagggtttttgtgatcaatgaagaatcccaaacccttccccatggaggttttgcagaccacgtcacaaacaagtgacttaggtgcttccttcaaacgattcatagcatcgacaaacctcaatacctctggagaactctcagcacctttcacagacttagccgctctaagtgctgcctcgaacaactccaagaactctcgcctctgcatcgttctctgtttgatctctcggtaataactaaggtttcaaaagcaacgaaagaggagagaaattagtaattgttggaatggtctctcgatctccctgatgtggttatataaagactataagagagatagactctaatccaagaccaggtaggttttgttagttgcacatacttttacttgctatcaaagcctgcccgaagtttccttttttcgtctctgtttgtatatattttccttttttcttcagaatataataaagtcattaattttgttttcgttttaaaaatccagtaagtaattcaatatctgaattatatatatatttgtaattntcattatttaagaattttttcaaatcttaaatcatataaatacataaatcatatttccatgacagataaaaacatttcacatatccttataagtagcagataaaaatcattattttgtatgatgcgtgcattaaattcagtgaaaataatacaatattatgctt

SEQ ID NO: 18868 - DNA, 700 bp, Arabidopsis thaliana landsberg
acaacgagtagtcctcgtaactctgagtaaaaccaagcttgcgaagtgcaatagacaacttagcaaaccaacaacgaggagcttgtttaagaccgtacaaggacttgcgaagacgacatactttggatgggtcagaacatttaacaccttgcggaattttcatttagacctcctgttctagatctccatgtagaaaagcattgtgaacgtccctttgaaaaacgtcccagtctttggcggctgcgacggctagaagcaaacgaaccgttgtcatttttgcgacgggtgcaaaggtttctttgaaatcaatgccctccttctggtgattgcccatgaccacaagacgagctttgtgacgttctagcgtaccgtccaaattgaactttaacttgtatacccatttgctacttatcgctttcttgccgtgtggtaagtctgtaacatcccacgtgtggtttgcttcaagagcctctatctctttttgcattgcatcacaccattctttgatgagaacatcatctttaaaatggttttgttcattactatcaagaatggccgccataaatgctatgtgatttgatgaaaaaccagaatgagttaaataatctgagataggggtttacccagagaccgttggcgagacatttgaatctgagagaccgggagaagaagtgtgaggagaagagtgtacgagcaacgt

SEQ ID NO: 18869 - DNA, 610 bp, Arabidopsis thaliana landsberg
tggagaatgccaacagaatctctcagtagaagatctgctacctcttgaatatgaagcaaacaacaacggactgcaaggaggactaacacaacccgagaagccattacaagacctatatggagaatgccaacaaaatctctcagtagaagatctgctaactcttgaatatgaagcaaacaacaacaaactgctaggagtaccaacgcaacccgagaagccactacaagacctatatggagaatgccaacagaatctctcagtagaagatctgctacctcttaaatatgaagcaaacaacaacggactgcaaggaggactaacgcaacccgagaagccactacaagacctatatggagaatgccaacataatctctcaatagaagatctgctacctcttgaatatgaagcaaacaacaacggactgcaaggaggactaacacaacccgagaagccactacaagacctatatggagaatgccaacagaatttctcagtacaagatctgctaactcttgaatatgaagcaaacaataacggcctgctaggagtaataccgcaacaacatcgttatcatcaggaaaaagagacgatctgacgcgctaattcacag

SEQ ID NO: 18870 - DNA, 485 bp, Arabidopsis thaliana landsberg
  unsure (1)..(485): unsure at all n locations
accaaaatcaaaattcatcaaactagacattacacaaaatcaatgacttatatcaacacatgtttaacctgtttgtgagtctcttccacattgccatcacaccaattctcagccacaaaaccacagcggaacagagacagacagagtgagagaggaatcagatgaattggatgttgcactttgatgaagctatatcaagagtcataagnnnnnnnnnnnnnnnnnnnnnnnnnntgtcttcttcaacaccaattttcacagtttcaagatatttcaattttctcaagaaatgctccatttgtttcacctctctaagacttcctccatagcctgaaatttctagcactttgactcgacatgtcgataaacaacaccttccttccacctcagaagtaggactgtcgtcttcataacgttagaataagtaccttttcttaggcttgctagtgcaagcgcatgcgtttccacatctataagtaactttg

SEQ ID NO: 18871 - DNA, 1173 bp, Arabidopsis thaliana landsberg
aaaaaacaagaacgaataaagcatgatactgttttctccatttaaaaaggccaaaaaaacaaaaagagaccaaacctgcactaaattgtctatcttagtatcatcttcgatcactgtttctctccagctgcataatttttcatacagagcgaatgaaaccaagcatagtgcactgatggaagttagtcaatagatgcagatctgttacctgcctcgatcaatgcaagtatttgctccgatttcgacacgattccctatctttacgtttaaagtctagagatgacaaagaaaaacagtggataaatcaagtaaccgctaattgttgattcagattcaagaaatgcaataggggattattacttgaggcttcttcaccatgtttccatgttcatcaacgtagaaaccaaagcctgaaagaaaaataagcaaacaatcaaaagaacccaattctcaaatcaaaacctcctccagcctatgatcttggctaatctatgtgagtttgattcataccatcttgacctatgcagactccattgtggataacacaagaatcaccaatactacagttgctgattgaaacattatatctggatagaacaaaagaaactcagcgaatagaatcttcgacagatgctgaaatacaacaatggtctattcgaaacatgtacaagaaatgttacccgattcttgtggaaggaccaatgtcaactgatggtccaatcacagtaccagatcctacatgaacctctgcacctaagaccgctttttcatgaaccactgcaccaaactcaaccaaagccgaggaataaatttgagccgagctatgacatgtccctcctccattttcccatctaagaaatccttccttaacaataataccaccaccggtctttaaccctatgacaacaaccaatcgcaggacttacagtaagtttaaacatcttgatacaaggatccttaacatcatagcagttcaaagagtaagatgcagacatgcaacagtctatacatatttagcctaagtcaattgctacaacttcagcaaataatagtcttacttcagtgtttttatgctcttaagtcttaggtagctttgtatccccatcaggctggaaagtctaaaactttaatagatgaagcagagctatatctcatacacaattaatctgatct

SEQ ID NO: 18872 - DNA, 2718 bp, Arabidopsis thaliana landsberg
catcagtaggccaagccacaatgctacctactgcatttgctatggtttgaatttcagagtttggtctccacacaggggcatctccaatctttgaaatttctacccatactttgctcgcatttggacctaggggcatatgatggactatgtctgaaggattagaggaacagactcttccttctgctactctttctcttttgttcttgtaaactaacaagatgcatttcttcttggttgatttgctggtgctagcagtactgttacttaagctctacaagaatcaaaaataataccaagcattcaggaagaaataataccaagcactcaagcagaaataatacttaagtgattttataggctgtaagttaaagtgcagaaatttaccagtggtggtgatggtcttttatcttctgatgctgtttcataccgtggaggagatgaattcacatattgtatactatgaagtggccatgcaatgttctcatttagtacatctcccataacaaactttcctggacttggtctccacaaatatgcggctttgttaaacagtttctcaaacttaacaactccagcagaaggaccaagaggcatattgttcacaagttctagtcggtctgttgaacacaaccgaccctcaccaaccacagaatcagccatattccaatcaattatgatgattttaccggctgatgaatctttagcctaaggcatgatgcataaataaaaagtgagtaggtatatgtgtttaggttcagctagataatcgacaagtgatgggaaaaagacattactgaagatcctgtattctcattctcagaaggggaaatacaacatcactgtctagaatgatcttatcgaaaggccagacaatcttgttccctaaagcttcaccaagtgtgaaaactgatggtgtaggcctccacaaagaagttgtggcgtctgacactgacttcacaataatagccgcatcattacgtccaagtggaatacgaccaatcttgtactccctctgttccagcaaaattgatgtttaacttttgcacacagattaagacacaaaacttttctcattatttatttaaaaaaccaattcaaggtaacgtgttttccttagacatgcaacgaaaatgagaattattgataacgtgttttacttgcacatgcaacgaacatgagaattacgcatgcatgcagcaagttcattcgcgtttcacaacagtcttcttgaaatgcttcgtcttgaactccaaatttcccgtatttttatacccaagtgtatagttcttgcaattgaagcccgatatcaatgcatgttccaatatcccatatcggatgggtacgccattgacgatgaaccacgcttcttttttcctttcaatgcgccgtgcgcagaaggagcatccacatccccataagtcggtggttcgggtctcttggcatgtggaagatgtattggaaacttggatgattctcaaaccatgccctctcggacttgctcatcggcggctccaacttatcgaatgtagtcaacacttcatgaatatagcaccgagttgaaagcttgattttcttcacatattccgagggcgggaaatacatactcagcggtggtattgcttctgtttcctggtcgatctcctgcaacagacattcattcatattactaccgatggtacatagaatcatacacatagttatatcctagtaatgacagtattatccagaaatcatacacgtagttgtttcctagtattgacagtttgaccaaaaaacgcatagttatatcctagtaatgacagtattatccagaaatcatacacgtagttgtttcctagtattgacagtttgaccaaaaaacgcatagttatatcctagtaatgacagtattatccagaaatcatacaagtagttgtttcttagtattgacagtttgaccaaaaaacgcatagttatatcctagtaatgacagtattatctagaaatcatagtattatcctgttctaccagtttcaaaccattcaaatactgagaattgactcgaaatccttaccatagccgccggaatttccactgcagtcgatgtctcctcatccatattctcatcggcggaggtctcttcccccaagcttctagtactatcatcggaggactcttctccggcaacattctcctcttcttctttttcctcttcctcctcttcctcttcctcctcttcctcttcctccccttcctcttcctcttcttcttctttctcttcttcttctttctcttcttcttcgctctcttcttcctcaacattctccggatctttctctgtcagcgacggctcctccgtcgtcgtcggaggctccgccgttgccttcgtgacagcaacgattggcttcgttgccggtgcaggcttctccttcgttccaactcctctcttcctcttttttagaggcggcattgttttcggcggcattagggttagggttacagaaggaggagaaacgattctgagagaaaagagagagaattagggttcttgttgagaattgagagagaagggagaagattgaagtgaaagagatgagttttctctgagttttccacaaagaatcgagagaggagaggagagaacggtttcaaggaatcgaagagaaagagaaaagatttcaaggagtatttgtttttttttcgttttcgaattaaaaaatgagagatccagcaaaatta

SEQ ID NO: 18873 - DNA, 1282 bp, Arabidopsis thaliana landsberg
ccaacatttatgtaaaaagcacaaagtgtcattgtgatttatgtccattggtaattgctaatatccgctctaactaaaattttattctactcttgctctatattgttactaccttaactttaaggcaggtcttgatcatgtatagacaaggttttctggtttaggttacttgtgtggaatcgaaatggtctagtgttgaagttttttataacctattttaaaaatttgctttttttgaagtaaaatttgtttgttgaaccgaagaagatgattcataaatcagaatcacaatcttgaagggaatatatagaggctaaataagatggtggagccatccattactgcagttctttcgtagcttacaaacttatactaaatcgactagtctttaacattatatttttgtttctctttttcaagtaccgttaagcggttagccattacgtggaggatcatatagtaacttatataatatgattacatctttacttgattcaaaatgtctgtactacaacaaattctatatttgcaagctaagaattactaatctgatatcactgtgtagctaaattttgaaaattcagtgtgttgctaaaatttgaaaattcagtgtgttgctaaattttgaaggttcagtgtgttgctaaattttgaaaactcagtgtgttgctaaattttgaagattctgcatgactaaactttaaagatatttctgagaaaacaaagtgaaacgctctgacattggataattcgttgtgtctctttgtgcaaaccgaatatagaactacgacaagatgacttcatcaccgttatgtctgaataataaagtactaaagagtgtctaaatgcgtgcgaattaaagtatgagtgcgtccaaattatgggtttcgtaccaaaggcccaatatcaaagaatgtgtatcttttagtgggaataataaaacgacaaaaaacaaggataaattcacaacaaaaaaatggagatgcggggtatcgatccccgtgcctctcgcatgctaagcgagcgctctaccatctgagctacatccccatctgttcatgaatatgaactttaaattatatattatctccttttaagagagaatcattcttatggattcaaaatcattttaatttggtaggacctatagattcaagatcatgttcatatcttcactatctactcttgaatccctgatgtcaagatccaataaatccacattcgtgtataaatttctacctatataattttttgtttttttgtgtagtaatctaagagactt

SEQ ID NO: 18874 - DNA, 1561 bp, Arabidopsis thaliana landsberg
aaatccaaaccctccttccaacctgcagcttcaaaagagagagtccggaattactataccccccacaataattatactgcccctctggatactggaagcatatctaagagatgtgactcacctaattatgcacccagcaaatcagggaggaacactggttcccggaaaactagagagtcaaataagagtgcttctaaagattgctatcactcggggtacagatcctctggtgtggattctcgcagaaactttcacccctataggacgctattcagagaacagaggcaagaaataccctctaagcccctctagatctcatgattgggatagagttgatagtagaagagacgctgccaggatttcgtcctcttttggcaatacaaatctataacgacgagaaaaatctacttttagatgcagtccaagacgggatagctctgaagtattgataacacggcgttctagcccgttttatctattgttttcttatgtttcagagagaatttggtgccattctagagtcagtaagaggaaaaccacgtattctagatgccaagaaggttttaagagttttgaaactaaaagtatcaaaagacgatcattccagtacttcagaagtttggcatcctagggaggtcttccccatcacggcaacaagatatttcggtatgcatggaaagctagaagagtcaagattaacgtcgatgtcgaaccgaagcaatccatgaagtcgttcagaagatatgacctgaagagttaagacatgtcaaaaatcggccatttggaaacaataaatccaaaaagcatccggccaagctaaggagacttgaacccgggcagctccgagaagcttatcaccgacttataggttacgcccaagtccttctctctttctgacaccgtcattaggctccttcccttaagcccacgactcggtccgatcacttattcacccggcagattgacgttcttacccctaaacctaattcttggccttcaagtataaatactttttttaagccctaaccctaggtgtgccttcatcaaaagcgaaccctagccgtcgccgagagctgccgactcgccgccgcaactcttgagctcgaagatcaccatctatctctctttctcttttgttttgtataagactctttaaggtggagctttgcctcttgtgttcttcatttaaagaagtaatctctaaaccctttttaagttttatttgtctttttgttttggtttactcaacccaacttttaattagctcctttgccatgagcgagtagatctctagttaggttttagggggtttcaaaggggaattcatggggactttagatcaagtttaggttggcggtttctatggttttgtttgatcgtttacactattctttctagttgagtttaatcttaatgcatgtatgtttggaactccacctagtacatgatcttaggtattttatacttggtagaatcttgtataattgcttgaactaactcaactaaataaataactataactgttgctcacccgccgagtgatagggacttatgggctaga

SEQ ID NO: 18875 - DNA, 581 bp, Arabidopsis thaliana landsberg
aaaaactgtcattgaaaaactggagtttgtcatctcagaaataaattataaaatattaagtttcttttcaactatttttttgttagtttaaaccattttaattggaatccaagaaagatcaatattttattttaagtattgttttgttttttgttgttggagtaaaaaatattaacacttattttctgaaaatatttattaaaatattttttcttttattttgtaaaacaaaaataacttgctgacatgacatttggagaaagtattaaaacagatctggcatcctctaaaatgatctttggagtgatgatgagtatagcttgagaagtttcgaatgttttttttattagtagtaaattagaaataattttgtttgacattccatatacttcttacgttattcccttatatatttcaaagagtagtttaaattatagtgttatttagttactgattttttaattctacaagtgtttatgttatttaatattaggatggctttgatggtaatgtgactaatgtacactaaaaatatgtaaattagtcaataacaagtacactaaaaaatgtgaggaaacaat

SEQ ID NO: 18876 - DNA, 764 bp, Arabidopsis thaliana landsberg
aatccaagatgcgtagacttcaagactaagacaaataaagtggcaagttgatatgtcaacatagaaacagagaaagcagcaaccagggcagataaggtcaatcggaagtcactcgactctggcagaccgacctggtctccggcatgctcttccgctgataagaattatggaatcttctgagctttcttgaaacgagaagaagtctacattgcaaggaagagtcagcatccttgtcattatccgacgaacatctcccgggctcagctaacccagagactgattccttgtcggtgtggcaaacaagctaagaaaatgtgtgaatagaagaaacgattcagatacactagttactaaaaacatataatatacactgatagataaatttttacctctccgcgctgccatgccctatgttcttgtcttggtcccaacttttggtcaatcaaagcccgtagagctcgtaatatctgaatgtgaagtatggacaggtcgaaggaagtcataccctcgagctctctaccattcattctcctgtgagatgaaagaaaacccaaaatgaaagaaaagaaaaaaagaaacagagacttctgcagagcaagaagtgggaaatggtattgagttattactcgttaaaaagccataatttgtcgaactcgctctgcaaggattcagagctgcgttgctcgacattccctctgcatttgcagctgcaagaaaatgaggattttaaagacacagtctgaggaaagaaaagagataaggaa

SEQ ID NO: 18877 - DNA, 1294 bp, Arabidopsis thaliana landsberg
gcatgtacaatcacctgtaaactgaggaaacgaaactactcaattactccatcctttggaaatctttatctgattgattggtttgtttgctctgttgttgtttactgcaccttatcatctgttgcttagtttctacaattctttcctgttactcgacctgatactcgaccacccagttgtctggcaacagactgtgcagttgagtatgtttgtttcatttactgtctgttactcgacctgtcactcgacctcacccagtgctctgcaaagagctgtgttggtcgagtgttttactgtttctgcttgattttcggttttctgcatgttcacttagaactgctagaacacaccaaaacctgttattgcttggcttgacttagtgactgctgatcacatcttgattgttagcatcacacccattagtattgacaacctaaaatactacaacaatatgattggtgttttaggataattgactaaataacctattatcaatttggcgtcgttgccaattgggtgtttgtttgttacatttgagattttagacttgcttagatcaagttctttttcaattttcttttcggttactaactgtgtgtttttcttgttgtcttcttgatccaggtacacctctactgtatgcgaactcgatcaacaggcaatcagaacctccttttcaatcacaacatcgaccgaataactcgcgaactcagagaaaggagaaacacagtcaaccttgtacctcagcaaccactcgatatggctgacgaacagaatcaacaaaatggccctgccaacattggtgctggagatgcaccacctgatcaccgtcagaggaaaggaattgcacctcctgctatccagaacaacaacttcgagatttagagtggtctcatctcgatgattcaggggaacaaattccatggtctgccaatggaggatccactcgaccacctggatgaattcgataggctctgcaacctaacaaagatcaatggtgtcagtgaagactgattcaagctccgtttgtttccattctccttgggcgacaaagcacacatctgggagaagattctgccccatgactcaatcaccacctgggatgattgcaagaaggcttttctatcaaagttcttctccaacgccagaactgcaagactgagaaatgagatctccggctttttacaaaaggctggtgaaagcttatgtgaaacatgggagcgtttcaagggttataccaaccaatgccctcataatggcttcactaaagcctatatgctcgacactctttaca

SEQ ID NO: 18878 - DNA, 1343 bp, Arabidopsis thaliana landsberg
attaatatccgatacacgatccttatccgcgagtaatagatttataacacattaccgaactgaaggttacagttaccctctttgtgaaacgggtaaaagatcgaatacaggtatcaactatcaagtatcagtgtcagccctagtatattctagactacatatttttttttttactacgattgtgagttatctcgagataagtttgttgaaaaagaaaggtgactgcaacttgaaaatgctgaattgcgctagactcttagctctagaagccattcactggaggtccgaggatgggccgtccacggcagaaactcaaagtccccgatcacatactccttatacacacaccttataatctttctcataggttagctacttacctgtatagtttattcagatcgtctcattctaaaaaaccaatataagattttctcacagtaacgtacatgagggacaagtagagatatgtggctctcgcacgagtcgccgagaagggaacgaatagaaagtgtgaaaagagtggttatatggaaactagagagaaactttaagaagcaaagcagaagaaaataagaaaacgagagagtgatttgatgcgacatttttgatacacttccatgcggtttcttcttaccacacacatcttcacaagattaaatccacaaagttttatctctcatattcatctcccattagataaatatgtatagcaattatcataccatccatataagattatatatatatatatatatatataattaagaaaaaatattatgtataaaacatttggttgttgaagtttactacataagtttacctgattatttatatgtgctagctcgactgttcaattttaaacttcattatttctacactattggaatctcaatgcaatgattcaatatgtagtttgacgattacagatttgaataattggtaattcttttaatattagtactagataaccttaagataacgggtgccaaaaaactgaaaaaaaagaaaaaccgtagacaacatttaggaatcataactacttatattagaatgatccaaactaagttcagcttatagaacaatttcttagttgcatttcttcccttggatatgcgattcttgtaagagagcaagggaggttggatagcttaatctcgtctctggttatacttcttcaatgagttcttgtttttctagttgaccacactaatgatatagttcttacactacttaaaaccattgatatagctcaaccttccagggttaatttaaagaaaccaaaaaaattagtaaaccgtaaaagaaatttcggatattgtatcaaaataatattcacatcgatc

SEQ ID NO: 18879 - DNA, 994 bp, Arabidopsis thaliana landsberg
acaatcctaaattttggaaaagccaacataaatgcccaattataacgaaaccttttttttttatcatatattccttccgtctcacaaaaataaattttttagaaaaaatttttatcccacaaatataaaagttttatatttccaatgtaaattttagaactgtttatctattctatccttattaaataattagataaatggttattattatttttaaatagttataaaaagttaaaattgtcattatacattatttcttaaagaatgtgaatttttttttaaaattcatcttcatgggacggagggactatcaatcaaaggcctaacattaatttgacctcacatctcgatagtaatagtgtaatactcaaactattgcgtttggtgcgtctaaaacacaaacgctgtagtgttaaatgaaaacttattcgccaaaagtgtcttattgctctcttgtacataattaataaacaaaggattgagaaaacacgagacatttttattcaaattcaaaaccaacaacaaaatcaaatcatgaagacgaaactaacaacatgaatcaacaaggaattgggatcaccattgatatggttttacacaatgtgtacacatatctagagctcatctttgacatcaccgtctttcggggtaggattagaagacgatagcttgatcggatacgatgcctccatcgcaataccgcaacgcccttccggttcatcaatctctctttcaatctttatatagcctccctctccccattcagctccccatgagtttctcactatccaatactttttccccctctcagatccatacccgaccgctgccacaccatggttcagctctgttccacaagatcccgtaaacactccctacaacatgttaccaaagatatgaccaaagtttatatacatgacatatgctatattattacaagatatgatatttctattacagctccaatagtgagctgattatctttttccatctc

SEQ ID NO: 18880 - DNA, 541 bp, Arabidopsis thaliana landsberg
gcgtctgagcgggatttataaactgaaggttgtttgcaatggtcccatctccaaagtcattgctaatccggatatgggggaagtggaagaaatcagagtagttgtctattagtttatctcttgtttcttttattcttaataactacagatttgtaaccgaatttaaacatatcctttatttatgctaaagttttacttatttctgacattatatttcatggacgtatattgtatcagtgtacgttcaaactactacagtttacttattacaaaatacatcataactgtaatgacttttcatggacgtacatttatatcggtgtacattcaaatagttgttctgtacgttcaaaagcaacttcttgcctaaccttgtcttccggtgattgtggcagttcgattctgtgctcctccaacttttgtgactcaggagcaacaacttcttcttcacgattaccactaacacctttcgcaacgtcctataaatatgcaaaccatacaaattagaaataacatgtacgtacactataattagtagtac

SEQ ID NO: 18881 - DNA, 474 bp, Arabidopsis thaliana landsberg
acatagcaggagaagccgcaattgcttatgagcacggtgcatatatcgaggctcttatgccgaagctacgacaatctgattatttcacagagccacgtttccaagaactagcagctaaggaaagagcggatccgggttactgcaggcgggtaagagactttgtagtgggacgacacggttatggtagcataaagttcatgggagagacagatgtgcgtaggctagacctggaatcactgggttcagtttcaatacacgggaagcgattgtatacatggacgagagcaagaaaccggctgttgggcaaggtttgaataaaccggcggaagtaacgttgctgaacattaaatgtattgacaagaagacagggaaacagtttactgaaggaaagagagtgggagaaatttaagatgatgcttaacaagaaagcttgagcacaaggagctgagtttgggtcatttgatccagcgaaaa

SEQ ID NO: 18882 - DNA, 851 bp, Arabidopsis thaliana landsberg
atagaaatgcagttggaatgacttagaaaacccaataaatagtatcacagcctttgttgaaaaaatggatttaggggtgtgggctaaaagttcggtgtggaagaagccattaaatgtgacatgataagaaagtgattcaagaacttcgaaaataagaaggtgacgagttaagggtaccaaagtttcgcttaaaaagaggtccaatgtccgtggttcttggtttgaaggggagattattgggtacaaacaaacatcccatatcgaaagtttagaaaataggtgtctaatatataagtcaagtccaattccaactagaatgaggcattttggaagaagccaataacaaatccatgcgggttgagcatgtaggcccaaagcagaaagtatcatattgaaggagagttggaatgggcttagaaagcttttagattggtaatcatgaatactcatatattcaagactcggagcatcaattttaaccacaagatcatcatattcaatatatgctgagactctagtatgatgcttttcagtgattgagaatgaacatgtatgactttgagataatcattcagatgcgtaatcataattaaatcctcaagaaccgtacagcttgatatgagagtcttcaaaccggagtcgccaacaaacttaaccccctttaaatatatacaaaaggtaaagaaaccaattttgatttcggatgataaaagacaacacaatggagatttaaatccaccaaagtcgcacaaaaatagaccaagacaggcatcttaactctctaacgctttggaaccttagttatgatgcctttctcgctctatacatgttcgaatttggtgaatttgact

SEQ ID NO: 18883 - DNA, 672 bp, Arabidopsis thaliana landsberg
ttctaatccaccctaacccggttttttggttcggatattggattggttatcggatccgtttttcgtgagccctatcaaagataaactaatattggacccaattaggtccacaaatataaccaaaattctataaaaagactaattctaagttaggccaaaaattagatcctctattacaaaggaaacatgtttcttaccgaaacaacttgtatacaaattttacacatttacttaaaactacatatgttgtatttaatataaaaataacatttttaaacaaagtcaatccaatgcagcattatatccaaatagtaaaaacattgaaaaatattatggcatcacttttatactatactattttttatataattcaaataaagtatataatttaatttatacaaaatattaatgccgatcctgtatagcacgggttataatctagttatcaatcttaaaagtgatatcaaaagtgtcacttaaactattactcttagtatttgtataatttttatgtactatatttccgtactttcttacattattccataaaaaattatcgctcatgtttgcaattaaaatatttgtacagtcatgtgttatcaatcggacatatgattatcatatgtatatttgtttgggttttttacgaagacatgttcgaatttagatctg

SEQ ID NO: 18884 - DNA, 780 bp, Arabidopsis thaliana landsberg
acaatcgaatccgtggatcatccattgtgttctttagaggttcttatttctcctcctgataaatcgtaacaaagggcgaaaatatagaagcagatgggaatgacgcctcctaaaaagagatgatttgggcacaacatacctcagtaaggtcatcaggcaaatgaaatatttcgcgtatctcctcaggggtttttccctcaataattcgtgcaagggcacgactagtaagatcaaccaacggcttcaactgcaaactgtcagcggctgaggtcaactcacagagcctctttgtatccatccggatgaatttttcatcataaactttacgttcctaaaaagtaacaaagagctctatgaaaaaaaggcataggataatcgacatgtcattaattgtttcaaatttaataacctcaagtaaaccttatttgaacgtccaggtacttgatgaaatctgcagtaatcaaaaatcaggcttaacatggctggattgactcgctgtggaagagatattgcgtagttcttagaagacccaacacccttctgtattacttcttgacatatcatgggacagaacattgcaacctcttgttccacttgttggattgagccatcagcagtttcaagccatatataggatttcatcatctatgttgataccacaaaaaaaagtaattagtcttggtgcaaggtaaaagctcaactaatcattcaaaaactccatacataaagaagataacacttaaaataaaacactattactatgaaaagaatctatgatgt

SEQ ID NO: 18885 - DNA, 699 bp, Arabidopsis thaliana landsberg
ctgcattgacatacctaaatatccaaattcgtttcgttcacttactttctttaatttagatctatcgatagagtagaacaaacaaggcgcttgtaaaaagaagaagatgctaggacggaggaaaaggcggccggtgaaatagatgagtcggccgaagatagtatctcaaaaggaggaacgtttccagagtggacgaagtaaatatcgagatatcgatttagatttcgatccaacaatatcgacggaggaagatgcaacaccaaagaatcgacggccggcgaaatggatgagcggaccagagatggtttcctgagagttgacggagccaattgaatttatacaccaaaaatggtgaaaaaaaaaagcggtttctatcaaccggagaaaagcgtcgctagaaaagaacgaggttatgcctcaggataaacttgtagaatttgttgcacataaaaaaaattaatttgtgtgttttggatttgtatttctcggatttgaatgaacaattcaacttggtttagcttattgaattagattaaaaacatgtatgtatttgtttttgtggtaccttttaatttaattagttgaagtagttcaaatgtatttctttggttttcgtagtaatatttaatataattagttcaactagttcaagtaagtaacgctaaaatatttaatttataaaattgataatttatttta

SEQ ID NO: 18886 - DNA, 264 bp, Arabidopsis thaliana landsberg
  unsure (1)..(264): unsure at all n locations
aaaactgccacaaatgttggggcaggtttgattacggtcgcctgtcatacatgcactgcatcaacatctttggcatataaagttagctttattttnnnnnnnnnnnnnnnnnnnnnnnnnnnnnnnnnnnaaaaaccattcgctttcttcagtcttcacattcattcactcttcccattcaaaacatgactaatcgcaccgtttcaaggactctagttacttgcttagcctaccctaaggtctccttgaacgtcttgggtcttg

SEQ ID NO: 18887 - DNA, 555 bp, Arabidopsis thaliana landsberg
cattatttgaggttgtattgtatgtgaaggaagtgaagtatattgataaatgcatcatgccatatatattgcatgattcacttgcatatgaagttgggtcgtgacctatggtccgaccgtaccggtacaacttagcatcgtacgttgcccgaggaggggtacgatgcggcttcataccctcagaggtatgaaggcagaggacatatgcattgcattcatatgcattcattgaagtgatatttgcagatgatgtggttttataccctcagaggtatgaagacagagtacctacactttgcactcctatgcatacattgaagtgatatttgcaagttttgttgacgcagggaagtgttatagaacctattgtggttgttcgaggaaatgagatggtattggttatattgggactactgagttctatatctacaagtatttgttatcttaattgtgattcttttaaaatgttgattaattcaatttgtggtgtaaatatctcgtcaaaacaattcgcttgctgagatgtttcactcactcttgcattactcaatgcag

SEQ ID NO: 18888 - DNA, 517 bp, Arabidopsis thaliana landsberg
actttctcgatatcttcctcggtgattctctccttattgctgccaagttgttctcggatatcgccttgaactttctttatcagtttcgggtttttaacgagctccgtcactgcccatatcatggtgatggcccctgtgtctatccctgcaagaaatatattctaccaacaaaaaagaaaagtaagttagaattttgaatcaaatttcaacgttaatgtgtttagataacttttgatttaccgcgagaaaccccttgatatgatctattgtgagctctaaggaactatcctctccttgtttatgaatcacatccaacattgaatcgatgatgtcttcgtgctcttttgatcttccaggatttaaatgatcatctatgacatgttgaaacagagcttcgagcttgtaaaaaacatcgttgagtctcttgtgttgtccggaaaaccaatcaacgagccatccaagtccggcaacagggaagaaatcagaacaagtgaaacttgctagggcagtctcagct

SEQ ID NO: 18889 - DNA, 1017 bp, Arabidopsis thaliana landsberg
gaatggaagttttagtaagctgccttctgctactgcctgaaatgttaattttgcaaggttatgttacaaacaaacaaacaaaagataagagtgctcagcattttccgtgaacgaattcaataacaataaacaaatggtctaatacatacagcttgctgatccataacagccattttcacagcttccaaatgtgatgtatgaactgaaaaccaacaaaatgatgtataaagacacataatttacaaccatagagagcagaaacacacacttaatatccataaaccatgaactacatttgaataaagatgaatctatgtgtatagattgagaaagagatgttctaagaaaaaaaccttgaatgttagtcttatcaggaaactcaaaacattcaaggaatggatcatcaggaagagatcgacaatacggttggcaagttcccctaaagattcgcataataaaccgatatcaaaaaccaccataactattaccaacaaaaacaaaaatttcagttatctttcaactacacacaattgagaaacacatgacaaggccaacgttacctcctatagagaaatatcacagcatatccagccttgacgaaattcctttgcaatccaaatcaaaaccaaagtttgtattcaataatatatatttttaccagttctataaagagtaattggaaaacaaaaactataaaaacttactcagtagaagcagcacctctatttccagagctgaaattatcaatgtatcttacacatcgttgctccaatggaactgtagttccacctgaagtcacacatacaatcctcctcatccctcctgataaaataaaagaaagaaaaaaccctctaagtcattcagaaatcaaaatgttacatatatacacaaattctgatctcaccttgacacgaagaattcagctcaatgaactgattaagattggctacgatctcttccttgttcttcagaggtggagacgattcgaaaaacgaactgatttcatcttccaccaaa

SEQ ID NO: 18890 - DNA, 597 bp, Arabidopsis thaliana landsberg
gcatgtattgagtttacatatgtatggtggtatcattgcccatagtgaggtgatataatcttcattccttataatcctgatttcataaagtgtagttttgatatttttccagcatttttcaactacagattcatttatcttctacagcaggtgctcaatatatgttttctcaatttcaatctctccactgcacaaatttatctatccatagagataaaaagccccaatggtaggtgatggtgcatttacagcatttttgaaaaaatgtaacccatcagttgtattgttgtaataaatataatcaagaactctttgattgtgcggtggggttaaaatggagtagacatttcaccattagattaatgtagttcccaacagcaagcaacaccttcctttgaagcatacgcaattccaagtttttgaaaactttgacatcatcagccgagatttacgaattccttgcaagtgagtaggcaatttgaaacatcaacaagggatttttggcctacattccttactattttagaaagaacatctcgagggagtgcatcaagcggtgttgaacgtttcaatccaaaaggttaggatgaggtagta

SEQ ID NO: 18891 - DNA, 616 bp, Arabidopsis thaliana landsberg
tcggaagccgatctgttatagcaactgccaccagccagctccaatgcagcttcttcttcttcttcttcacccataagtgtatgttacttgttaagccgcattcaagtaacaaagagagttgatctcttctgaaaatccctaaagaaagattattcatcaaataagataactcactcgaaagataaaaaggaggaagaaccaagggctcaaatctctcttttgagaaatcaaaactctgtactgaaacgggtttatgatttgacttattgtaagctatccaataaggaggtccttggaaacacacactcgactatggttatcaatataaaccattagaggtcttatcaacagccgtcttccaagaatcagatttgaatgagtaaacttcaaccgttgaacttaaatcagattcaaactcataaaatgtaattcctatctgtttcttgaatttgaaagtcaaaaaaaaacatacaatatccaacgatagaaactgagaaatccttaaaagaaaaaccgaaaatgttccaaacaatggagccagctgctttgttcttattctcatctcgaaaagcctggaatctgaaacacgctctgaatatagcagcaatcactgagc

SEQ ID NO: 18892 - DNA, 541 bp, Arabidopsis thaliana landsberg
tccctgctgctacttcccactccccttgatgagcaacaagcacctgcattgagtaatgcaagagtgagatgaaacatctcagcaagctaattgttttgacgagatatttaaaccacattgaattaatcaacattttaaaagaatcacaatcaagatcagaaatacttgtagatatagaactcagtagtcacaatataaccaataccatctcatttcctcgagcaaccacaataggttgtataacacttccctgcatcaacaatacctgcaaatatcacttcaatgtatgcataggaatgcgatgtgtaggtcatctatcttcatacctctgagggtataaaaccacatcatctgcaaatatcacttcaatgtatgcatatgaatgcaatgcatatgtcctctgccttcatagctctaagggtatgaagctgcatcgtagcccttctcgggctaacgtacgatgctaagttgtaccggtacgtcggaccataggtcacgacaaaacttcagatgcacatgagtcatgcaatgtatatggcat

SEQ ID NO: 18893 - DNA, 1530 bp, Arabidopsis thaliana landsberg
agcctaaagattggagcttaacacaatctgaggttcttgttgttatattcgcagtaagttttcacaaccgagatgtaatatgtttatttgggtgtgtttgtgttttggagcttgagctcaaatcatttgaacttgaactcaaaaagattggaactcgattctgtacatacggattcatcttactagtttgtgtttaattgttttcttttcggtttttattcctcagggagtgtttgcctcagctctaaactatggactcttgacttggtccaataaaattcttggagctgctttggtttccctatacaatcctcttcagcctgcaacatcggcctttttatcgacaattttcctcggcagcccgatctatcttggaaggtttttaaattttatgcactcttctttgtatctttgattcatccagacacatacaaacctttctgtcttcttgtattggatcatataaacaccttggtttttgttctctccgcagcgttttgggtggaatcctcatcatttgcgggctttatatggttacttgggcatcttacagagagcaacaaacaacatcagctgggaatgagattgcttcttctagtgatgtaagaatctcggaacctttcatttacagagatgagactggtaaataaataagaaaaggtaaagaaaggatacttgtaccgttgtacgtagttaatatcagacaaaaacttgacaaatcatacaattttttcgagttcaaacattgattctttaaacggtaaataagtcaaaataattacttcgcctcttttttggtaatgcaagttcaactatggaaacaaatctctatttttattttaagaattggttgtttcaatacgtttcttagttgggtgacaaagaagcgtatattttaaattcaatcttagataaaaggaatcaagaacacttaaaaagtcattgtacctaaagacaagcacgattaacaaaaaggaaaacattatatatgtcaacggacatgttacatacttacatgtcagtgtgagataagctgggaagaagacaacaaaagttttagcaacatattatcttgaatttgtgaagatagtgtctattccataattccaacggagtggtatgtctttgcgacatacacacatagacgagctcatgagaatcaagaatcaatatatattatctatatctaacatattccacgcatttcgagtaaccaaaatagatgttttagtagttattgccaaactatgtgtgtgcataaagtattaacaagtaggtactgacctagtaaaaaaatgaaaggtataacttataagtttcttacgagtacttagatcactcatgacatcattgtccaagtggaaaccattaatagcaaataaacaaaaatcattgacttattgaagtacgaaattattgactttctcccatttcatcatcaataatggtaacaatttctaatttgtgtggaaagtatcttaaacgtcatgacaactcttgggaatggtaatttaaccatagaagggattc

SEQ ID NO: 18894 - DNA, 634 bp, Arabidopsis thaliana landsberg
agaacttatttacaataattatcgttggcattaattcttatcaattaattaatattcctgattactaacattttattatctaatatatctccatcaatatttgattaaaaaaactaacttaaagatttatttgataagaataattactatcattaatatacagtttattgagttaaaatctagattaaaacaaaataatttaatttaatttttgttaatattgtttatttttatttagtttttaagatcattatcatttcttatcaattaattaatattcttgattattagtattttcttatctaatatatctccatcaatatttgataaaaaaataacttaaagatttatttgataagaattaatgccattggcaatctagattataaaaaacaaattactagcattaatatacagttcactgagttaaaatctagatgataacaaaataatttaaattaattttttttttgttaatattgtttattttgtttagtgtttaagatcattatcattttttaaaatatgattaaaatataaattctaatatataaggtatggtcattatcatgtcgaccttgagatgattagcgttaatggaataactatttcaaatcacttgacacccatcaaa

SEQ ID NO: 18895 - DNA, 1787 bp, Arabidopsis thaliana landsberg
atgatacttggtgtcttttttagaatcaaaaaatgggaagaagctacttacttgtttgaagatatgcccagaagaggttgcagccctgataccttatcgtataggatagttttcgatgggctttgcgaaggtttacaattcgaagaagctgcagttatcttagacgaaatgcttttcaaaggttataagcctcgcagggataggctagagggatttctgcaaaagctatgtgagagtggaaagttggagattctgagtaaagttattagtagcttgcatagagggattgctggtgatgcagatgtgtggtcggttatgatacctacaatgtgcaaagaacccgtgatatcggattctattgatttgttgttgaacacagtaaaggaagatggtcctttatcagcaatgccacaatgctaggtcacgtgttgtacaagttaatgaggctggtgtttgagtaccagagagcaaaactttcaacagccgaatcttggacttagggatagaatgctatctgtgtttggatttgagattttggttttagaaaaatagtaaccaatgtaaagccaatctatgtaagagtgggaagttggagattctcggtaaagttgtcagtagcttggcatagaaggaatgctgttgctgaagatatctggttgttttgtttataatagtcacagtgtgcaaagatcaaggaagagggtcctttatttttgttaaagggtttataatgttgctgagaactttgttccggtgggcaagatggattatctgcaggcaaacatgagttcattattagttgatttggctactggccaaagtcaccctttttatattaatgaaaaccctttaacaaaaataaagtataggactaaaaaaaaagtagaacaaggctaaaaaaagcagtatatatagtcgagtgagccacgtgcgtatatagtcgagtgaacagggctaaaagcagtatatggcattgctcatatatatagtcgagtgaaccacgtgcgtagatcttgagatggtttgttgagtgagttgacacattcttcatgcgccacgaagaagcactccttgcagtgatagccggagccactagtttcattgcaatttagcgagacccgtccgatctcgaagtattatcaatatagcccataaaaaaagaaatgtaattgtgggctcaatgaagaccttttacgagaactgattaaaaatgttgatctccaaaacgaaagaatcaatggtctcttgaatgagtcgtctacttattttcctctcttctactacagttttctttgaatcagaactaaattcacccttacttatagaatctttaacaagaacattatcatagagtccaagaccttttaattgaacaaaactgcaaaaccatctttttttttcaaattcgtattatctgtatatgcctatgaattctaaccaaaccaaaggcagcaaattttggaagttctccaaatttcgaaacagatgagaaacattataaaattatataacagaaatcaacaatggtcttcttaaagaacaaaaagtgaaaacagagcacatgtaacatcgatcaaaaaacataacaaacttacatataggaagaggataagaaacaagattacaatgcgttttaatgaagaaatatggagagattaaaaaattacaaagcgtctggctatgagtaatgaattatatgcttctggcaagatgcagcacaaaatatataactataattgtaaatgaaaactattttctgtcgacaatgttgctcgcacgtactggaa

SEQ ID NO: 18896 - DNA, 618 bp, Arabidopsis thaliana landsberg
gcctgcaggtcgactctagaggatcccccgcccgagcagaacccgcgaactgcggctgtaaattaaaatttatttccttctactaatgctcctcgaaccgtaactgtccctttatttacgcgattatgcagcacgtctttccttatatcaaactggtcaagatttatataatgcatggtttatgcaatcatgttacacatcgttatgcagtcgtaaacggtgtacacatagtaatattcgtttccgtgagtcaaggtacaaaatatcccttctatgcatgatttatgcacattactacatatatttatgtgtgcgtatttattttctcccgtaactgcgcctttatttacgcgcacgaagagcacgtctttccttatctcaaaaccggtgggagattttaaatgtttgcatggtttacgctatcatgtatcacagcgttatgcagtcgtaaccggcaagcacatgcaaatattcgttcccgtgattcgtggcataaaagattccatttatgcatgagttagcacatttgtacatatatttatgcgtgcgtatatcgcatgtcgcgtctcagccggggatacgtgggctacctatgcatggctgacgcaagctgacgtc

SEQ ID NO: 18897 - DNA, 985 bp, Arabidopsis thaliana landsberg
cttttattcatatcattgaaacaaagtcaggtcttctacatatataagtcaacgaccataagaatgtcaactctttctgaacatttctttatgcatcattgtggtgagtcaggtggttattaaatccaatatctttttttgtgtgattgacatgttctttgaagtaaattgcagaccaagaaactattctgatgtccaataccacaaatgaccccagtcaagttcataataagtgatgttggatcattgttgtcctcttatccttcttcttcttcccatggtgaagttgcactagaaaacgcatttactctttcttgtctttgacttgaaaaagtcttttcttttagttaccaatctggttttgcttatatatatgaattatatatattctcctgttatcttccagagcttgggcaacgatttttcttgatttgtccttggtgggtaagagaagaatatggagaggtctctttcccttttgttgccgttaatcggaactttggcaatcattcatattgttcaagctcagagccaacaaggtattcacattttaatttagatatatacatatttgtgtatgcttcttcttctccatcttactaccatttttgttcttgatcgtagtgttaatttttatccatttctgttctacaggattcatcagtttggattgcgggctccccgccaatgaactgtctccttataaagaatcaaatactgaaatagagtactcttcagacgcaacattcatccagagtggaaaaactggtaaagtccaggcaaatatggaggctagatttctgaagccatactcaacgctgagatattttccagaaggaatacggaactgctacaatctaaacgtagagaagggaataaatcatctgatcagagcttggtttatctatggaaattatgatggccaagacaaagacccgaggttagatcagaatcttggaccaaatccatgggccacgatcgattt

SEQ ID NO: 18898 - DNA, 502 bp, Arabidopsis thaliana landsberg
atcaaatctttcattgagaaagatgaaaaaattgttatctatctacagttaaaaaagttttttcttcagatgatgatcatccttggatttgagacgttacagtgaggaaagtatcttcaggacaaggaatcgtcaagccgcccatcggatgattgaatccgaactcttcttcagctttgatgagtagagcttgaaacaaatgctggttcaagtatgagaccggcacaaggtgtctctgcttcttcctctggctctcaccgacgtacactgcaagaaacccttttggtgctgaagtttctttcctcgttcctgctactgagccaccaagaatcttctttgcagccatgaaacctcttaccaaagccatttttgtttcctgaaacttaaactcttgatttttgtagtttcaagttcttggattgcttcttgttgttgatgatatgaagatgctgttagaggtccggatatatacactaaaatattaagtgtttcgtgggacatg

SEQ ID NO: 18899 - DNA, 767 bp, Arabidopsis thaliana landsberg
agcaaataatcgagtggatactaaattttaaaaccaaaagaactttagtttaaccaaaattgaaccaaactttcaaaagggtggaataaatactaaactttagaaccgaaaaaacgataaccgaatagatacaaccaaaactgaatggataacagaacgccgagaactatttttaatggtcaaatcagttgccaacaattttgaggcattaatactctcaattttgccaaaacaattttgatctatgaatctggaccgactctactctccaacccaattggtatttcccatctacttaaaatatgggcctgtaacggcccaaattattttttttactcatcgttttaacgtcattaatgattttctgaagaaacgtaatcctttgcactgtttgccgttttagagtgacaaaaacaacagatcagcaaatttcgattaccgtagacgacacgatgtttcacacccgactacgaatcacgacgacttatacaaaacagcaaaagcgtaaagacttgaacttaaaacaatggcgagaccgagacgaagaaacacagagatcggtgatggcttcacagagatattcaacagagagattggtttctctcatccaatcaccatctctcgtcgaatctccgcttctgaggttttcactttttttcaaatactcttccatttctctattccctccgatcttgaactctctctataacttggttccatttttgaatgagacttttcaacttgtgaagactttccaatttcttgct

SEQ ID NO: 18900 - DNA, 679 bp, Arabidopsis thaliana landsberg
ccaaaatatatttcattatgagcgtttaaaagccatactcagattttgtttaaattatgttacccatattagaaagcaaattatgaaaatttggtttaatctaaaagactagttaatgggacctgaataatatatttaaaagagagggatatggtttacatccataactaataattacaaaagacttccatgaaaaactaaagatatgatcgttatcaatgaatgcaaaaaaaaatatatatatttcacggaactcatactaggtaagactatttggaaaaagttgaatttaaatgaagaaactctattccaaatatttaaaaaagtagcatccgattgaattggacataataaaatgattgagtggtcaatattctcaattttaagctagcctagtagtgggttgagagtctaatgaagttttacaacaactattacatcaatttaaatgtaatatctatatacaattcataaagagaagtgattcaatttactacagagacatatatcacacaccctttcgaatgtttttttgtttacaattgtagtttgtgtagatttggaaaacaaaaagcggttgttagtgtaaggagattttggtttaaggactttagtcacaaaagagtaagagttttttgttataatagttaatggttttatcttttgctttaaatgaaca

SEQ ID NO: 18901 - DNA, 1285 bp, Arabidopsis thaliana landsberg
acagtttggattcctcatggtaaaacctcaatatagcaaacattcattttgctacgtttaaggcttgagtcttatacgaaatcatttaatccttaaataacaatggttttagatgaatttgataatccatagccaagatttggttaaaaatagaagaagattataatgatgaagaaaaaggttttattatattatgaatgctgtaaaaaatccaatttatgatggatataaagaaggtcattagaaccagtgttaaaaaatgggtaggcggtagctaggtggttaacctgagtctagcgcctagagcgattaatcaggaccgaggcggagcctaggcgttaatgtatttttatttaattttatttatttattattttaaaacttttataatagactataaattccaatatccatgataaagttcaacaaatgtataatgataaagctaagattaagatctaaatgatctcgttgaaacttaagctacaaaataatgtaaaattctcctaaataaaacttaacgtaaggcttaacctaatgaaaattaagagtaatcttaaatctttgaaaacccaaaagtaatcttaaatcctaaacttgttctcctctgatcacatccacattcaccacctgctcattatctgattcaaattcaatatcaatagtgatatctcgctcttcatgagattcaagatcttctctaggtttatcatttggagtttggtaaacaggctcaccattaggctcttcatctctttcgcttggctctacaaactattcttctgcatgtcttccatctttatcatcttaaatcacatcattattttttctttgattatttgttgcttgctgaacaacttggcattgaattggacatatactagattattaagtcgattaacatctagtctattccttttccatgtatgaatctacaacataaagttttataattcagtagctatccttcaaaaaatcaaaaagaatatttaagataaaagaaaagcaagaaacttaccccttcaaaagcactccaattacgttcacaactagatgatctaggtgttaaagagaaaatctttattgctaatctttgcaaagtaagcacatgacaaccatataacgaccaccaattccctaacatataaactaaatcaaaaaacgtggatgatcaaataatcattaaggttattaaaatcaagaaaatacctggttcaaatttctaaacattttgttgacatcctctcaaagctatagctctcccaaaatctccagacttcatctt

SEQ ID NO: 18902 - DNA, 1184 bp, Arabidopsis thaliana landsberg
ccaactggtatcagaaaacacatcacataaccagtgaaatctcttacgcttcgaggatcaatctcagaaccctacaaatcgcgaagaacaagattttggagagggaaaacaaaattcgtcatctgggttttagattccgacatgatcagagtattgggccttttggggctgatcgttcaaaacaatgttaaagcccacaatgatctaactctattatttacgactgtgccactctttccttgtagctttgcttttttctctattaagaatgtacggacaacgaaaccctctatgttattaagaagcgttcactgtttgttgtctagtcttttcaagtttcaacaaaatgttattaaaaaaaggttaaatacataagagaacaaacaatttcacggactctttagttcggagacagcgatcataatctgatatatactttgtagtcacgggcttgaccttgaagtttgcatcggaccaacaacgatccaaaaaacctttagttgtaacgcaataaaatgctccaatatttctcgaagtttggaacatcttcttttttcttcactttcttgccttacacatgttcgtttgtacgtaccataacaaataatcaaatctactacacttataaacactatacctatttatatgcatagtggtttacacccatacaattcaagagtcacgggtcacatttaagcttcaactatatatttgcatgttatttgccaaaaggatttgacaataatgcaacaagagtttcattgaaaatttcaagaaccctagttaataacaataatgggttcgagagttttggcttccttctttgttttcttgattttcacggtcatcacattgcctccaacgatccaagcttgcactccttgtattcgtcctcaccctccggttccgaaacctccacaacacggcggtggtggaggtggtggtagcaagccgccgccacatcacggtggaaaaggtggtggtaaacccccaccccacggtggaaaaggtggaggaccgccgcatcatggtggaggaggaagagggaaatcaccgccggttgttagacctcctcccgtagtggtgaggccaccgccaatcataagacctcctccggtcgtctatccaccaccaattgtgaggccacgccaatcacaagacctgccatcataatccctccaatt

SEQ ID NO: 18903 - DNA, 541 bp, Arabidopsis thaliana landsberg
agttttagtggtaggttatttgcagcagaaatctaaatagataaaaaaaatttgaattggtggttaaatgactatataagtggcaaaaattatcaaaaagaaaagataaaagtttcaaaaactaatatgagcttttgaacaccaacctggtagtattgtccaaatgggataattggtgaggtaagagagttgaacaacactttatttattcccattccatacttgataccattagatgacaagggcgacaacaataacttcggttccccatcctttctttcacgcatctcttccaatagataatcatcaccaaacggagtccagaatttcacgagatatattggaatcttttttagtgtgcaatattcatccgttggtcgaccgttgaacgaaaagccgccattgaacgatatatcatgagttttgatacctaagcagcgggaatgatctagtggaggtacaacagaccgccatgagctgcagacggaacggaagaggacaatctggaaagatgtttcaagatgacccatgattagttcta

SEQ ID NO: 18904 - DNA, 2837 bp, Arabidopsis thaliana landsberg
cctgctacatagagacgcttaatgttactagatatatctggaaaacttctcagacgtgagcaattactcatgttgacttcctcaagagatgctaagttgatgttggtgggaataacttgtagcttaatgcatcctgacgcatacagcatttccagtttctgtagattccaaatagaggatggaatctccaccaaactctcacaaccggtaagcgtcaacgtcttgaggttagtggctttcgaaagatttgggatttctttcaaattagaggaatatcccaaatttattttctttagatttgtgaggggctgcatgtcaaacacacaaaaaaatgaggaatatcatactaaggttaaatatcattggtaaacaaacgtattcacaatcacaagtatcaaataccaacctggattcctccccatagcttctccaacttgctgaatcccatatagagttcgacgagacattctggcttaaatgtcagaggaagactttttctcgggtatgaaccccaataaagtaaccttagacgaggtagatattccatgtcctctaacaagctaacacttccattatagaaatttaagaatttgagattacgcattctattaaaggctcgcttgcttatagataacgtctcgatcttcgaaatgtcaaacgatatacctatgacggattcagtaccctacaaaatattgcaaaagaagactgatgacactgttatcacaaacaaaattaggcaatatccagggtatatagattagaacttactgtttcatttgccaagacatcgcgaatctctttggcctctactaaaaactgacgtttccccgggtcaccctgttgaacaacaacttgtctacccaattgttgtagtagacagtgcatcgttatccatccattagtagacacaagagatttagcggctaaggtctttaacccattttcgacatccaaagtactgtcagcgagcatggttgtcacataatcaacacttttatggttgaaaaagcatgcaatatgaagaaacaaagattgatgtcgctccgacaatttgtcatatcccactctcaagacattctcaattttcctatcaagattagtttcaattccatataattgaattctccactcatcctcgctctccccataaaaagaagaacccacaacacgaaggcccaatggaagcttaccgcaaagctctactactctttttgcaacctcttcaaaaccatcttgtggagaattttgtttgaaagcagatagacataagatctcaagagcttcttcctcggatggaaaacccacatggtatacatccttgataccatgttgaaccaaaatatctttgtcttcagtgatcacgatgatccgacttccaggaccaaaccaagaaggatcttcagccaaaacctctaattgctcaagatcatctacatcgtcaagaatgatgagcactttttgatcgtgtagccattgtttgattgtgcctaaatgatgtatcttcatattctcttgcttcaaaatctcagacagaagttgcttttgcaagctcaacttggaatagtgatcaacacccactatgctcttaagacttcccttgaggttccccataaaacatttaagttgaaaactactagagagttggttgtataaagctctagcaatggtagacttaccgattcccgcaggaccccaaattccaatcatcttcacatcatcgccctcgaaacatagcaaagaattcaattttgtcaaatgagcttcaagtccgaccatcccttcaaaatcccttgatggtatgacattcagtttgtttgaaacatctgtagcaatcttttggatcatatctgcttcattagccctagcaaaagcaaaaaacaacatggctttggtgggtctaaattacaagaaatttcacaactgagctttccttaagaaagataaaagcactaattgattcaaaaaaaaacaaaaaaatgacataccaattaagagaatgttctccttttatgtttgcaacatgagtcaaagctttgctccatctctgcttcacctcctcagttttcccttgacaagttttctcgaatgcgcttccgaaatctcccttctgtttccgtacactcgacggatcaacatcgtagaagatggtcatcacaatctggccctgatcttctttgcactttaagatttcaaccagttcatctaaacaccagctcgaagaagcatactttttcgaaagcaacacaatcgagactctggactctctaattgcacttacgagctcaggtccaatcgtattgcctctctcaatctcctgatccttgaaggtcgtgattcctttgcttgcaaagtgatagtgtaaatgactgagaaaacctttacgaacatctgggccatggaagcttggaaagacatggtatctcctgatgttagacgaagaagaagacaaagccataaaagtatcacaaatgcttcaatttcaaaaaaaagtatttgtagaatggtttgaagaaagtcttattgagaaagcaagttcctttgattatgtattgaagaaaaaaacgcgtaacgtaattgtaaaggattataaatgtgaaattccacgaagttgtcgactcgacaactcactaaagtgtgtttttttatagtcgtcgaggaccaatggtttttttacaattggaatcttttttttttgtttttttgcaaagcttgacttttttcggtgaaatgagctgatagagtgtaagagactaaaaatttgaagaaagagaaagattctaaaaccatcttcatcaatggtttcttattaaaaattgtttaatataaaaatagaa

SEQ ID NO: 18905 - DNA, 946 bp, Arabidopsis thaliana landsberg
ttgggtatgtggtattttgggtcggttcgggtcggatcttttgggttctaatttagaaattttagactcggtgggttatatgtccaatttcgggttgggttcggttcgggtttactttgggtccgcataattcgaatattggttaaagaacccataaataaccaaaactatttcgggtttaagtactatttacccaaattttgttcaaatataccgaatctacataaaagtatccataaaacccaaaaatctgaaattataacaagtttttctttaagacaataatataaaactagaagtaaactttattttgagcttgttccataactcaaatcattaaatatgtcacaaattcaagttattagtgaatatatgtcctatatgtatatatatgttcgagtaataaatattacttacgagtatcgggttcggttcggataataccgatacctacaattatttgaaaatagaatccgatcggataattaaccgaaactgaaatagaacaggttcgggtatttcagatcgggttcaggtattatgcccatgcctatttttgtaaatgatatgtattcaacggaaccacgttttcagaacgtgaaaaaactctatgttattcaagaccattgtgttcaatatcatacatcaatcaatttattggaaataaaaacttaaattaaattgtgtgcaaattttattcttagaaatgttatttaaagatgagcagatcttttggacaatgaggatcggcgaagaacattgccggaaacatcatagtagatgaatttagctttggagtgagtgatgtgaagagacatgaaaccttgtccatcgtaatacagtttgagttcttttggatcccatggctgaacatctcctctccatgcctttgatcctcctccacttgtaagaaattgagttttacttcaccatttccaaaatatat

SEQ ID NO: 18906 - DNA, 2109 bp, Arabidopsis thaliana landsberg
gtttcccaaatcttacaaacgtaaaaccagatggcctatgtaatttttctcaaaggcctaggcccatttaaaccaaccaaacaaatattgaacggcttcaagtgtcacacctgaacacgtgtcaacatcacattgcgatttccatttttcgttactctactccaatttccattttgtcttgttatttccatatccttctctatatatacgcagagtatcaatcaatatcattatcatcacagattatacaactcattgtttccgaacaaactagggttttgtttttccgttcgatttcagatactgatttgtcgattatgtttctagtaagtaaacatcttctgcaactgaaatccaaaagaccgaagaggtcgtcctcgtcgtcgtcttgcttcgatgatttcgtcaagagattacaaaaccacgctgcgatgtttaaaaagcatcttactacgcaactctttcagaagaagacggagaagaagcttcacctagtccttgatttggaccacacgcttatccattcgactcttgtttcgtaaatttctaaaaaggagaagtatctactcgaacaagctggttcaacaacaagggaagatctatggaaaatgaaagtcagaggagatcccatatccataaccatagaacacttggtaaaactacggccatttctttgcgaattcttgaaagaagccaacgagatgttcacaatgtatgtttacacaaagggtactcgcccttacgctgaagccattttgaagctgattgatccgaagaaactctattttggacatagagtgataacaagaaatgagagtcctcatacgaagacacttgatatggttttggctgatgaacgtggagtggtgattgtggatgatacacgtaaagcttggcctaataacaagagtaacctagtgttgattggcaggtacaactatttcagatcccaaagccgggtgttaaagcctcactctgaggaaaaaacagacgagagtgagaacaacggtggattggccaatgttttgaaattactcaagggaattcaccataaattcttcaaggttgaggaagaggttgagtcacaggacgttaggttgctgctaaaagatatagaatttgttcgcctacgatttatgtgtaaaatgatctctttaagtatatagaactttgttcgcattggaagtttgtctattggttcattacaaatttgtttgcagagatattttggcttcaaagacatacatacgttgaattgattcaatctttggttcaaatacaaaatacaacacaggaggataatgatatgctttgagtttcacttcaattttgtgggggaaaggtacaaaatattcattccaccaatttagctaaaatagtctactaaaaatggcttcatatttaactcatcttaaaattattatttgtttgacagctcatatttgactcatctaatttatctaaatttattaatttaatttattcttcataaagaaacttttattttcaaaaaatacattaggggggttattgaaggtaggattttgattgaatatgaaagaatttagaattctatttaaatctagtgttattcaattgattggttttagaattctattaaattctactgttattcaatttattgattttagaatttttttaaattctattgttattcaacattaaaattgttttattagcaatgtgatttgattagaatttaaaagaaatcaaagacaaaaacgtgaagaaacaaatcccagctattatggtgtgatttggatagaatttgtcaaatactttaaaatcttttacttttttattcattttaattcttttaaattcaattattcaataccccctcgttctaaattcacaattggtttttaaagtgagaacctaagaccaactttatcagtagtttcttaattgattcttaacaattaaaaaaaagaaaaataattaaaacttaagagaaagaagaaagagaaacgaaaaaatctcttagctaagagacataataacaaactaagagacactttataatccagttattggtttatttaacctgtagaattaaaataattagcattttttattctctttaag

SEQ ID NO: 18907 - DNA, 847 bp, Arabidopsis thaliana landsberg
tctctgttaatctgtgtctttcttgcatattcagccgctaaagaatctcaaggagatgaatttaaaagggtcctccaatttgaaggcactcccaaatctttcaaatgctacaaagatggagatattgaaactgagtgattgcaagagtttggtggagatttcatcctctttttcgcatcttcaaagattagagaagttgcggctgagggggtgcataagtctggaagtcattccagctgacatgaacttggaatttctttacgacttagatatgagaggatgctcaagattgagaaatattccagttatgtcaacgagactctactttctaaatatatcggaaacagctgttgaagatgtgtctgcatcaattacgtcttggcatcatgttacgcatctctcgataaacagcagcgcaaagttaaggggtttaacacatctcccaaggcctgtcgaatttctagacctaagctactctggtatcgaaaggattccaaattgcatcaaagatcgttatttgcttaaaagcctaactatatctggatgcagaagactcacatcattgccagagctccctgcttcgctcaagttcctagtcgcagacgattagtgaatcactggagaccgtattttgccctttcaagacatcaaaatgttgggcccttcaacatttttcgaattcaccaactgtttcaaattgtaccaagaagcatgaagagctattatccaacggccattttttcacgggacaacgctcttacctggaagagaagtgccagccgagttcgatcaccgacgaagagaaaataccttgaccatacctctcgaaaggaaaacgtcttaccgg

SEQ ID NO: 18908 - DNA, 1023 bp, Arabidopsis thaliana landsberg
cgactgtttgaccttcagcgtgctacagcggcacgggtacgtaggttcagatacgtacccgtggagtcttggctaccagctcagagagaccctgcagcaggtgaccttttcagcacacgtattcaggagtcgtttttcagagctcagatgtctgctcagatagctctgcgagtgcaccggcttttggatcttccagcctttctgcttgcagccggtgctgactctgaggcgcacctcacctatctgcctggccttcagacccttctgactatcagcggcaggtatgttgaggagtgggtacgagtcttttatgcctctgtatggatagacccggatcatcactggatgaggttctgttttgagcgagaggatgtcaccattactgccagtcagatccgccagctttttggattcccgagtcgacgactcgtcttcacagcatgtgtatcgcacctctgaccctcctcgtcgcctcacggcagagttgctcctggtacagctcacatcgtggctttgttccgaccgcccttctcagatgggtcgcggtgttctccggcagacttcaccacagcggccaggtttctctatcagctcatgagacggacgcttctgccacggatgggttacaaggaggctgccactcatatttagctttggctccttggtgccctagtttctcactcagagtttgatgtcgtggattttctaatttgtgagattgaggacaccatattggatggtctccgtgctcgtcggcagctgccttatgctcactatctgtgtcacatctttgctcagctgattcggcccccacagttccagggtactcttgaggcctctcgcctcctctttgggtcctaccgtccagctccagaggatcctgtgccggcacttgctccagtgattgatactcaggccgaggataccactttccatcagtttgagactcagggcgcagcagcccatgatgatgatgactatgggttccacctccgctccgcctccaatgcctccatgctcaca

SEQ ID NO: 18909 - DNA, 1317 bp, Arabidopsis thaliana landsberg
gtgttttaaactgtcttatgtctcttcaccaaacgtatcaaaccaaagcaaagttctttcttcttcttctcttgcaccaatacagacgaaaaaaaactcaggttccaatctctctattccttcaattcctagatttgattttgcttattgaaatactctgtgagacgttttcttgtaactttttttttttttactttcttatgtgatcatatcaaaccttaaagcaatttccaacgattcttttttgttcaaatctcttttggaaatccataaatgtttgttttgtgtggttttggtgaagagttacttagtctaaggttaatctagctgtttagttgtctgattgattaattaactcataaattctgatcagagatgttttagaggacaaaaacattctctgtttctgaaaattaatgcacttaaagtttatctgaatcttaattttgtttaataggaattagtgtctgatgatgctagtggcctaattcgagcttgagctgaggattttgattcagtttttggtgtcatgcttttgtctcaagatcacaaaattctcttcaatggggtacgtaaatatgtaatcatggagaagaaatatgtattttcatttgttatcacatctcttgtctgcgttgttctccttgcaacttccttcaacattggtttaatgtcttcacttcgaccaccgattaatggaactttatcaagtttccccaaaaatgattcgaacgttgtaggaaaacaacctcgtgaagacgacaagctcccacgtttcgcttaccttgtttcaggatctaaaggggatcttgaaagcctttggagaactcttagagcattgtaccatccaagaaaccaatacattgttcacttggatcttgaatcaccggttgatgagagatcagagttagcttctcgcatttcaaacgatcctatgtattcaaaagcaggaaatgtatatatgataactaaagctaatcttgtgacttataccggaccaacaatggtggcgaatacgcttcacgcatgtgcgattcttcttaaaagaaccccggattgggattggtttatcaatcttagtgcttcggattatcccctcgtgactcaagatggtaaatgcttcaatcttttccttgtgttcttgatattccccttgttaagactatcaaaaactgttctatgtttatagatctgattcatacattttcgacattggaccggaaccttaactttatcgagcacacaagttccttaggctggaaataagaaagttttttttcctctcattttctgaaattctttttagtggttttcaat

SEQ ID NO: 18910 - DNA, 752 bp, Arabidopsis thaliana landsberg
acctaagcagaggctggagttttcgagttttgattttcctcttcacacttccgaaatctcaaattgagaacaaaagctttaattttgaactaaacccagaaattctatttcaagcgagaatcggaaatggaaagagagacatgaatacctttaggaactgagctaacgccaatggagaagaagatcgagtgatgatgagatcgaaaagaagattgagaagaagagagtaacgaaagaagaagaagaagctcaagagattggttgtatgttttgttatttcactaaaaaagaaaaagtattatgaacagagcaatattgaaggaaaaaatattgaaggaaaaaaaaaatttgtatttatgtattaattacaaaatattatttgatgagtttacatattaaattattacataatttcgaccataatgtaaatatgttttaaaaatgttataaactttataaataaaaaattaaaaaggaattataattaaagaactatcttttgaaatatttttttgaaagtaaaaataattattagcaataaatctacttaacatttttaaaatacatatttcctctttttattcgggtcagggttttataccaattgatttaaaaatcgtcaatcgaatatttccctatattatgacaaaacccaaaaacgattttaatttataaaaaataaatactatatctaaattttttatatatggatattctttacaattttgtagattaaaaattaaatatgatga

SEQ ID NO: 18911 - DNA, 610 bp, Arabidopsis thaliana landsberg
aaagaacaacactattagtagcggaactaatgttcaacaaaagcaggcaaggtttcgttctaaacaataaaaatcaaaattgtggtcggcatgtgacccaggttagtggaccaggtcctcgtcatcctcgcctggtcaaaaccgtatattgagtgacggtccaccctgaagaagaagtacttggttcgccaattggtgtcccgacaggccttcaaaccacctaggatcaaagatccgggatgcgcgctaatgtagtaagtgccctggtcgctcctggcgttggtcttgacctgacaaagctgaagcaggtcatggcagccgaattctctgttcacctcccgggcccgggtaaataacgccagtacatggcggacgaaattcgggcacatctgaggaaaggcaaagctaaggcagtaaagcatctcgaggatgcacgccgaaatcgggaaaaacagcccacatttctcaaagaaattggcgtaggcacaacaccacccctccgacacgttctcgagagacagcggtggccttgggaatatcatagtcaccccaccagaatctggcatctcctccggaggttgaccaagtcgttgttcgtcatcgacgtgcc

SEQ ID NO: 18912 - DNA, 805 bp, Arabidopsis thaliana landsberg
gttgagaatccatcaagaaacgaaagatgtgggttcttcttctacatctcctccatcgtctttgtcgtcttcaacatctcctccctctgctttatctacttctacatctacgttgtcttcttcaacttctccttcatcatctttgtcttgcaccgggactcaccatgtctttccaagcttccgtggggaagacgttcgcaggaactttctcagtcacattcaaaaggagtttcaaagaaaaggaatcactccgttcatcgataatgagattaggagaggagaatccatcggtcctgaacttattaaggccattagagaatctaagatcgcgattgttctgctctcgaggaactatgcttcttcaaagtggtgtcttgacgaattggtggagattatggagtgtaagaaaaagtttggtctaaccgtgtttgccgttttctatgaagttgatccatcccatgttaagaagctgaccggaaaattcggagctgtctttaagaaaacttgtaagggtagaacaaaggagaatattatgagatggagacaagcttttgaggaagtggctacaatacgtggttatgattcaagaaactggttcgtctttttgattttccactttgctcttaatctttcaacacattagaggaaaatggactaaccctctctgtttttttttggtagggaaaatgaagctgccatgattgaagaaatttccaaaagattgattaattcctcaccgttcagtgggtttgaaggtttgattgggatggaagctcatattcaaaagatgaaacagttgctttgc

SEQ ID NO: 18913 - DNA, 1532 bp, Arabidopsis thaliana landsberg
caaaatagaactagcttaaaattactctctttttaaataataaattttctaaaaaaatacatatcttaagaaaatattattaaaattaattatgaatatattattttttgtgttttatatttttttataattaaaaatcaataatatttaattatttatcttgaaatttgatattcatcagtaatatctaattaatattgcaaaaaaatctagaaatccatcttttaaaaacacttttttgtataaaataaaataaaaaaataaaaccctttttgtaaaaaattcaattaagaaaaaataaaaggagtatatgttttataatctctttttactttaacaaaataccttgtttttttttgttgttttcaagttatatattttgtaatcttgtcgcaggtctgagttgttttttgcactcagaaaagaaacttgtactaaaacctaggagaggaggagctggcaccaccgcctaactcgccattgacacaacaccaaaaactcttctttactttttgttattctacacacatcgataaagattaagtaatagaattccataaataattagatgcactaacttttcaacatcaattcaacggtttaaattcgtgaaaaagcgtttttattttattttaaaggttacaactttgtagtttttaccctaaatctctctctgattactgatactctgtctcaatctcttctttcttctaatcctttatttcttgtaagctacttctcctgaatttcgtatttgatccgtttaatccaagtttcgattttatataacaaccacatagatcctgaggttttgtgataagaaacagagagagagagaaacagagtaatggcgaacagagatgtggagagagtagggaagaaaaacagaggagctaataccaattatttctacgatgagtcttctggtgaaactcattgaacttcatggctgattccggcgattgtagtggcgaatctcgctgtctttatcgctgttatgttcgttaatgattgtcctaagaaaatcaccggacctaacaaagagtgtgttgctagattcctcggaagattctcgtttcaaccacttaaagagaaccctctctttggtccttcttcttcaacgtaagtattactttaaagttggagattcatgtttcatcttctgggtatctccaaagtctcaaactttttgggagtccaattcgcaattgaatttgatcactattgtctgttcttatggaaattgagctcaaagttttcatttttctgcagtaattaagattacccaattagtgccttactgataacgtcaatgaatttgtagttgaagctcgagattctagaatttgttaatctaagttactggcaaacaagtttgatcttttgggtacctaaaacgtctcaattttttttgttttcaacaaactgaaaaagtctcaatttttgtgtttcaacttggcaattgaatttgatctttattgtctgttagtggcttggaacatgagctcaaacttgtagggttctcaaagttt

SEQ ID NO: 18914 - DNA, 744 bp, Arabidopsis thaliana landsberg
  unsure (1)..(744): unsure at all n locations
agttatttttcaatttatttagtactgataaaaaattatttgattaaaaagttggataatctttttcaattaatatgtatttttaggaaaatattaagtttatattgaaaacagaaaaataataatgagtcttgataagagaaataaaataaagataatgcttaaatttgattggaagtagaaaaggtgattaaacttatagnncttttttttnnggtttntttttccnttgggcatctaaaattaattagaactcaaaagagccattcctgaagaattttgtttacataagtgatatgatacggttggacacgaactttacgcgccaaattatccgctttgacatttgcactacgagaaattaaagataaaaaaaaacttgaaaattctttcttgtcactctgcaattcctccaaatacactgaaaaagccggccattcggttggagaagacatcatcttcaccagatccgaacagtctgtgagaaacacaacatcttgattgtcggcgccaatcatgcacttcatcgcccatagaagagcttccacttcggcatgtagtggggataaacttcgtctaaggtttgctgctcccattgttggcgtctctccaattgctgatgtacagtaccatcctgtcccagagaaaaaatcgtcttttttccatgacccatccacgtaacaacgatatcccaagaaattgatatcaggatagatatccctcgctctactcctagatccgaaa

SEQ ID NO: 18915 - DNA, 431 bp, Arabidopsis thaliana landsberg
  unsure (1)..(431): unsure at all n locations
ttttcgacagagaagggaggaagcttacaggttctccgaaatagccaggcgttcggagggagaattcatcccagacatgtcagatcgattcattccactcagaatgatgacaggggaagccagcagcagannnnnnnnnnnnnnnnnnnnnnnnnnnnnnnnnnnnnnnnnnnncctcggcctccagctccaagggacagaggtgccaggggtttcggaggaagatttggggatcagcccaggaagatttattgcctattctgtggtgaggacaagggccataccaccaggatgtgccatgttaccatccagaaacaaaaggagatatcagaagctgcagcccaacagagccagccgaagcaagttatgcacactgcttcgtaccattcgccttacattccagagtatgtaggcaacaccctgcaacttct

SEQ ID NO: 18916 - DNA, 1555 bp, Arabidopsis thaliana landsberg
gaacttgctaaacatcaacaacacccaaccaaaatccctagtggttaaacatagataccactaagtttaacactaacatatgaagttcaaaaagcacaagtaatctaaataatcgagcatgtcatcgtccaaacaggatatttgatcacgtttgtatcaattcgttaggattataataataaaaaatataaaaatcataagatcagttttgaggcttgtactggtcaccaaactgattatgcacactgataagcaatatactattaatctttgcccctaacatctgcttgagaagtatttttttttctttttctacagcaaatatatgcctcgtcaattctacagcttaagagcatcatcaatgatagtttcttaggctagctcttagataaattaggtattaaatttaatgtttaaatttgattaaatgttagaaatgacttttatataagggccagatttaatgtttcttagattagtttttagataaattaagtattaaatccaatattttaatttaattaatcttagttcttagataaattaggtatactaaatctaatcgtttttgtttatgtttcgtcatatttgtttaaattttatgtcatgtatcttttaaattttatgagttataataattattaagttttaaaaattaattattaagttttaaaaattaaaatttttatattttttatttttaaatatttttttaagaactccaagttttttttttgtcaaacaaagatcttcattcaatcaaacctcaagagagggaagttcatacaacgagattatgatgatacaataaaataaagatagaagcttcatgagttttccaatgattgaaaaatctgttgaggccttggcggattcgaccatgaaggcgggcttcgcgaaatcctcgaccacattgtggtcaaaagtgactcttgcaaataatgcatccgagcttttgaaaaggtgctccatggaggaggctgacgggttaacgaggttgagaaagagacggtaaccacctcttgaagacatggtcataatgccgtactttcccaaacaaacagaggattgcaaattatccaagcaatatattaacacatgactgaactcgataattggtgaatgggtaggtagagaggtgaaaaagctttggtaatacccactccgtagaggcggtatcataatgccaatcttcttcactctaaagggcaaaaggcaataggtggggaagagggtctcgggtagggtccaaaataaacttaacatctgaactcgacaaaggtaactattagaccaatctaaaggaaccattactctgttagcgtggcgtccacaaccagccaaatcagagtcagagggtgctaaagggtgatgaggtgcggtctacagaagttggattctccatggttgggtgcttcactagcgccggcgccaaagtagagctccgatacaaaggggagcagggagatgctgaacttggcttcaaggagagcagatgaagcgggtaaaccacgaggattgcgggaaggttgagggaagaactacaccagagagc

SEQ ID NO: 18917 - DNA, 478 bp, Arabidopsis thaliana landsberg
aagggctcgggaattcggttgatgcgatctatccttctaatattttgttctatttatttgagttatgtgtgggggggaaacaacgggagcatcatagcatatgcatgatcgctaagtgtaaaccacgacattctcattgttcgttaatttcaggatgtgaccaagtttgtggaaaggatttggcttagcggcaaggatggctgtcaggacaagtgggtggtgtttaagttaaagtattggatcacatgattgtcatagcctatagtgcatacaattatgtagagcgaaaccttatgtatatatgaataaagtgggcttggatcttatgcgaattcgacactttattaattttgtatctcaaaatttacgctgcctattacactatgagcaattgcctataggacatgttgatgacttgagttatcctcggatgggaacaccgtcaccaggcgaacatccctggatgggacgttttaag

SEQ ID NO: 18918 - DNA, 397 bp, Arabidopsis thaliana landsberg
gctcttccccatcccacacgtcatctcttgttgcacatagtgaatgaatagcataacgagaacaaagagaacatgagtaagcctcgtatgaccaatcaatctcatcccaacaaactccacatctccaatctccaggaccaagaggatacttgaaggaaactcggtggtcatggtgattaacatgaatgacacgtggtaaacgagcacacttttgatggaaggtcatgaaatcacattgtacacatatgtaaggagaacgatcacctttcgtcccacaggcatcacaaacgaaggagatcaattttggcatgagtgtgagtgtatgctcatggaccttcatatttgaaagagcaacgggtggagagctttttatcgcacactgcaaatccaaattgta

SEQ ID NO: 18919 - DNA, 588 bp, Arabidopsis thaliana landsberg
ccttcaactacctaacgaatgattatcacagtcttcgccgttttccgacttctcatcataattatcatccacattgttactagctctttctgatcccatattttccaccactgaacaagaaccagttttacactctccattaactttttcagtgttgttactacaatgttctacacatatggaaacatgatttctcataagcaactccacatcataatttaattcacaaatttagaaacgtacttgctactctctcgcctcctatttgttccaattaccaaaccctaattttgtaaccttatcatttagcagaacatcaatcaaaaaagcagaatcaagtacaataatgaagaaaatctccgctttctatacagaatttcaatatccatagaaaccagaaagtctctcgcctctaagaaaaagtagagaatcgttacctgggtcaagagaacggattcgattggagagaaggtgattacaatccttgcatagatctttcgataaaaaaggaagccaattcgtcagatactccgaagcgatcttaagctccgacggctggtactgccggagaaatggatcgtttccatg

SEQ ID NO: 18920 - DNA, 977 bp, Arabidopsis thaliana landsberg
cctctgagtgaacagaatatggttcaaaattctacagaagtaaaagatttctttgaacttaaagaaaggattgttcttgaaatttcctctactatggtccgaccactaggggttgtgaaaggaacctttcaagtatgctctcactaacactacctatttatcttttgaacaaatagctgacacaaatgagtattccattgatgaccaagaattaaaacagagcataagtgaccagattttgtaatgtttgttttctgtctttctcagatcacaacacggagaataaattttattgttgacatcagagaagaccaacatttggatgacaagtcagacggttcaaaatcaagagacgaagaaagagatcgaagttggctgatgtcttctcttcatcagatttatagccgacggttaagttcatcattaatgttgtctctagctcactatttcctccgcattatcatgtaaatagatggagacctatatctttgttaatatttttctttcacagatatctactgaagaagagtgctcttgaactatttatggtggatcgctcaaacttcttctttgattttggggtatctaaaaaactctctctgttacattacattatttgatctctttcgttggaaatttcaagtttctagctcctctcactatatgatgtttgatgaaaactatagaacaccgagggactaagaaatgcttgtcgggctattgttcaagcaaggcctcctcatttgaaaaatatttactcggcaactcaggttttttttttccctccgttagcccattctttaatgcatggtggacaaaactaggaatcaagctgagtaaatttttctcaatgctgcaaaacttacataaaacgcttcctttttagaagccagaacaagtttccaagaagaacacagttaatggagcgttgggctagatgggaggttaccagagaatatcctttatctccatcatgc

SEQ ID NO: 18921 - DNA, 1813 bp, Arabidopsis thaliana landsberg
gacatgaaaatctgaaaacgaaaacaaacgctatcaagaaaagtgaaatattacaacctcaagagtttaattattgaaaagtaaatttaggataacaatcttaaggcaggacaggacttaaacgttgtccttaagttttcttcttcttcttcaatggtatcattttcactctctttccattaactacgacaccctctcgcagttcgagccattgaaataatcttatggccgtactcctcctcgtcgtcgtcatcggaaataaccactacctcaatttgtttcttggggataaagatctttcgttttactttgctacactctccgaaaaatgcggagatagcaagatcgtaatgggctttgatgggtggcttagacagcagagaccaagctagcgaggctttatcagcagcttcttggctaaatgggaaatagttatgcttcttatcaagaagtttcgtcaatttctcgaagtcctccaataaaactggtccgaatcggttcgcccgaatcatgccgtaataatcctttaaaccgtttggaagccggttttctgcggcgatgagaaggtcgcagatggcttccacttgctcaaactgatcatcatcatcatgccgtttactttttagcagctgattcacttgaatgatataccgaacgctgagaaactcacgtgatttgaggagtttacggcacgtttcgatcggtttcaagtcggctgctgtgcggttctgcgaagcaccttctctggtcgacatgacaacgaacggtgaaaccggagtggaggaggtgttttggtcttttagatgagaaatgatggttttatgatgatatgcaacttcagtgtcatattatggtttgatattaagttttgtttttaatatgattaatgtaaagaatctagtcttacaactatgattattgtattatccatttgtttgggattagattcactgaatgtttttctttctatataattttttttaattgtacagtttatttcaggcacgcatagaatataattcttatatcttttaaaaaatatatataagaatttagattttatatgttgcatgactaactatttttgtagatattagttaccatttagattcttttaaagattattactatgtattttcaatacaaagttaaacggtaattatattttataatgatgatttaccgtttaatttgatggaacaccgttaactataatcattgtatttctttacgtatctttctatacattgctagtcaacatttacaactaactaaaatagaaaattgcccacatttactataaatatatacataaatttggttaaaattgttctaaataagttattattttaaaattgttgattttctaatcatattcaaaatattttataacttatttttaaaataaaacaaaaatccaagaaagaacaatccaggttcattgaaaagtctactaaaccccaaacatgaactagtaatatttcactaaaatgaccatgttaattcaattcgacacatattggttttgggttaataaattgttttggcgtttaattcatctttcatgagttttaatttatgttgttttggatttgtgaaaataattaaaattagcaagcaaaacctaacaagtttgtttattacatgagcaaaacctctgttctagaaaaagggtttcgttaaaagcttcaagatacatcaacactacaaagtacaaacaaagttttcaaagagaaaaaaaaaatatcctctctctctctctgtgtgacactgctctctctctctatatcaatctcaccccagtggaattaat

SEQ ID NO: 18922 - DNA, 2098 bp, Arabidopsis thaliana landsberg
  unsure (1)..(2098): unsure at all n locations
tccgactgcggtgccactcgacagagtgaggctgacaggcagtcaggcccggtcgaaggcaccataggaagctccgcttcgcccgacccagggctcggactcgggctaagtcccggaagacggcgaactccgcccaacccagggctcggactcaggctaagtgccggaagacggcgaactccgcccgacccagggctcggactcgggctaagtcccggaagacggcgaactccgcccgacccagggctcggacttgggctaagtcctggaagacggcgaactccgcccgacccagggctcggactcgggctaagtcccgaaagacggcgaactccgcccgacccaaggctcggactcgggctaagtcccggaagacggcgaactccgcccgaccccagggctcggactcgggctaggacccggaagacggcgaactccgctccgcccgaccccagggctcggactcgggctaggacccagaagacggcgaactccgctccgcccgaccccagggctcggactcgggctaggacccggaagacggcgaactccgctccgcccgaccccagggctcgaactcgggctaggacccggaagacggcgaactccgctccgcccgaccccagggctcggactcgggctaagacccggaagacggcgaactccgctccgcccaaccccagggctcggactcgggctaagacccggaagacggcgaactccgctccgcccgaccccagggctcggactcgggctaagacccggaagacggcgaactccgctccgcccgaccccagggctcggactcgggctaagacccggaagacgacgaaactccgcctcgcccgaccccagggctcggactccgccctggcctcggccgaacgacttccgcctcgcccgaccccttggctcgggctcggccacggcaacagaaggcagactcaacctcggcttcggaggaaaccccacgtcgccctgcctagggacagaccgccacgtcaacaggaggcgccatcatcatcctaccccgaatcgactcgggtcacggagaacaagaccgacgtctcatccggccagctccgccagagagnnnnnnnnnnnnnnnnnnnagctctatgacgacggcggctctcagctctcttacggaagcaggacaacgtcagcagggactcgaccgccccaacagctgtccctccatcaggctccgcgcacctccgatagccacgacatcacacgaaccgggtgcccagatctctccggctgccacatcggcatgtacttagggcgctagctctccccccgctagacacgttagcactctgctacatccccattgtacacatggatcctttccttacaactataaaaggaaggaccagggccttctcagaagaggttggccgcgcgggaccgaggacgggacaggcgctctcttggggccgctcgcttccctcacccgcgtggacgcttgtaaccccctactgcaagcgcacccgacctgggcgcgggacgaacacgaaggccgcgagatttccacctctctcacgcccgtctccggccacctcgcctctccccccttcgcgctcgcccacgcgctcgacccatctgggctggggcacgcggcacattcactcgtcggcttagggaccccccggtctcgaaacgccgacagttggcgcgccaggtaggggcctgctgtgtgttgacgaacagcttcccgtcaagctccagatgggcagtctccagcgacctctccaacccgggacggtgctccgtttcgggagtctcgagttcatgtccctcgacggcagctacgacatgaaactcattctcacgccgggcggtagaggcaacggcggccgacagcccgccgctggcggcggaatcgacgacgtcttccccgcgtggtggaagaacaaccttcgagctcatcccgccctnactatccaggcggcggggaaggcggggcaaccaaggccaagcaagaggcagtcctcgtcggtgtcgagcgagtcgacagctccggctacccaacggggggcgcaccgggtatcgacctcgcgcttgaggggatcctctagagtcgaactgcaga

SEQ ID NO: 18923 - DNA, 269 bp, Arabidopsis thaliana landsberg
accaatgccatagactgcgctctcgggctcgacgtgagctgggaatatagcctcctgagccatttctacaggcgcatgaaagccacacgatctatcaacgatgccgacatatgggtccgcgggatggggaataaccgcgattcccacattcagttgaccgaggctgatatccttgatgatgtcagcagccccactcattgcgccgtgtcctgctattatatacacctgaccagggcaaaagaggaaacattaactttgaacttccctat

SEQ ID NO: 18924 - DNA, 1699 bp, Arabidopsis thaliana landsberg
  unsure (1)..(1699): unsure at all n locations
tcagtaattgaaacctcatacagtacgggtgtccttgggggtaacattactttttacgcttatgcggatcccacagtcctgtttcgtgttggacaacagtactgcatcctgttaccttaaccatgancctgtataaaatgcactttgcttttatttcgttggttgctcaaaacatttgtgtgaaacggtttcaccctttaagtataatgtgcaccttattcaaacgcacttgatttgaagctgtgacttagcctaaatttaataacagtatagtatttacactgaagaaacagaactaaaacagagctgaatagagaaaactattagagtccaactgaaccaagttatggaataaaccggaccgaatcacccaaatgctattctcttcggtttacttttaatttgaccggttaagacatggttagattactcaattggggttaaacgtgtttaattatgatacctttaactattaatttctttcgagtaaccatataaagaagttgttccattccagcgccattatctttctctgtatctgcaacatagttttgtgatttgacatttgttaagaaaagacacaaaacttgtccaatttatcttctagatctcgaaataaatacaaaaagctttcctttttgctttcatcttctgctacttgatgatggattcaagtaaagagagtagcttgattgaaacccattttctaaaaccctatgtaacctccattgatggtgctgtagcagagcttcctcgtcaccgtctctctgtttcttcatcagacctaaatgagtcgttttctaggatttctttcaatgggttttggtctgcacaacccaatttcaaatcatgggctaaaaaaatggaagctttgcacgaacccatttggagaaaagctgggatttttgaggcaataaaggcatcgatgtacaaaatccgtaaaaatcagtctttgcttctagctcttgttgagaaatggtgtcctgaaaccaaatctttcctcttcccttggggtgaagcaacgataacgcttgaggatgtgcttgtgcttttagggttttctgttcagggttctcctgtttttgcccctttagaaagctcagagatgagagattccgtagagaaactggagaaagctagattggagaatagaggccaggatgggctagtgagacaaaacttatgggtttcgagcttcttgggtagaggtgatcaaatggagcatgaagcttttcttgcattttggctttcgcagttcgtttttccggatatgtgtcgtcgttctatttcgacaaaagttctccctatggctgttcgtttagctagaggcgaaaggattgcttttgctcctgctgttctagctagactatacagagatttgggtcaaattcaagcttctgctagagaaaagtccactccaaatgtcactctgaaatcactgtttaagttagtccaactctgggcatgggagagattcaagagtaccagtccaaaagctagagtgataccaaaaggtgaacctaggatatctcggtggcactcacaaacatctaagaatgtgagattgaatcttgttgattttgattggcgtccttacactaaacctttacagatttggaaccctcctcggttttaccctgaagaagctatgtggatgactgtagatgacaatcttgatgatggatttgtttcctttgcc

SEQ ID NO: 18925 - DNA, 1429 bp, Arabidopsis thaliana landsberg
ttttttaaccggcaacctctaagcttggcctattgtctttaccaattcagctaacgacatttggtataaatgaattcatttttagttacactcagatggatactaggctttacagacaaagaagtcgagagtgcacaagcaccaatcctactaaatccattttgatcacttcacaacatgatatcaagtgaaatggatattatttatgaagaagtgtaatttaagaatctaggttacacctatgtgtatataatgcaacaaacaatcaattagtaaaactacaccccaaagcgaattacaagatcaacacaaagagtcacataaatgtgcattcaagaaatgacaataaacactaaggtcttgaatatgggagaacccaattagacgagataaaatgcaagccaataacaggtaattaggactacaaaacaaagagataaaatgcataacatgattcaaaattggaaactaaattgaacaatcaatgagctaactagggctattagagtaatcaacacaagagaatgcatcaaggtaaagaaggagaatcaagcacataaattagtcgtatgtgactaacgaccaatgaattagtgaaactaaaccctaaagtcaattacaagtatcatcccgagggaattacataaacacctattgaagaaaggaaatactaaagaccagagaacccaatgggcatgataaaacacaaggcaaagagctctacgtttcatgacagagaagaagaggtaacacaccgaattcaacacacaatgaagaaagaacatatatacaccatgagagaggatgcttccattcattatccattgtaggaattcatcaaaccagagaaagcattacttgaatatacattccatcaaccaagcaaaaagtcatgactgaaataaactacaaattcaacaaaacaaacgtgttttgtttttatcaaaacgtcattgtctagatttattgaattaagctttaactcttagcaaatgattgagatagtttaaacaaatatcaagaacttaacctaacgtaagctataaactctatataaaaaaatccatcagtagagatagtttataaaatttgaaaagaaaaaaattaaaaggcttgagtccgatcaaactactaattaaaagccatcactaaattgagcaagaaggtgtaaagacatttatatgagaaaaaaaaatatatatatctttttaattaatgtttttcaaacataagtttacataaaaaataaaaattcactcgaatcaaaattttgttttgactcgaatcgaattgaattaaaaaagtcaactacactaaatattcgaaagaggaaactaacaagtttacacacaaaaaagcccacgtgactcttttttctccaagagacgtctctttcctcttctctcctttgttctttcttccaaatttc

SEQ ID NO: 18926 - DNA, 993 bp, Arabidopsis thaliana landsberg
  unsure (1)..(993): unsure at all n locations
taaactacaagtatacttttntgagaaaggctaaacccagcagcaaaanatcccgcacactcgaatgaaacacgacagcgataatcttcatagagacaaacacacaagagcattgttcctatatcacttccaaagctctaagaaattcaaatatcacagggaagaatcagacaatacagaaacatctacaaggtataaacttgaaccttaggctaaaaacgggtctagtggaagcaccacttttggttctgtgcctcatatatcttatcaacatcatattacatccactaatcaagagcattgctacaacttatcaagagtattgttagttattactacaccacttccaagctctaaataaactcagagatgacacggaagaatcaggcaatgattaatccacaaggcatatataaacttgaatcttaagctaaaacatgtctagtagctatggagaagaagaccttgtggatcaaaccaacaagtgacaaacttttcgaagcccagcagcaaaaaactcaagcattgttacttactaatccctcacaagctctaaagaaactcaaagatcacatggacgaagaatccacaaacttactttacagggccaattctcacggtagaagtgacaaacgacgcgttcactagatttaacaacggagaagaaatctttctcagaatgaatctcagagtattcaccatgtccaatactcatccaccatttcttcttctccgccattttcttcatctgcttcaatctcctctctctcaaaacttccaaatcatcttcatcaagcttttccagagacgctatctcgtcgtctatcttatccttcatagctttcgctaccgtttgaacttgtttctcaataatcttcattcatcatcaccaaaacaaaaaaaaaaaatcaaatacggaaaaaaatcatcaatcgatgaaattcccaaaaattgtacctcttgaattgaatccccattggttcaaaaaaaaac

SEQ ID NO: 18927 - DNA, 2004 bp, Arabidopsis thaliana landsberg
gtgcaagacgcatggaaagaagttctcctgctgcagaaaattgccttgtgtccattagatccttgctccacattaagcaccctattccaggaatataagaaaacgccaagcaagaacaattgtggaggcaattttggtggcattcttcagcattctgagaatttgcatactcgtaaaagtctggaggctttatgttgggaacagtatagaagacatttgcatctttgccactggagtttccttgacaatgtagttcggtacgcctcacacaaccactagtccagtttcctttcttccactccttagcgaatttaggaacaaaacctttgaagcatttacattttggaggaattgatacaacacaaagcccaaaaggtccacatacgccatatatatcacatgaattggctggaccctcgtaggttgattcccagtccattccattatgcactaagaccttcattgttccctctgatgttaaaatcatgcgtgaaggtttgcctctttcaacaaatgaaaagtatcctgacccatttacatcctgtgttaagatgaatggacttgtgtatgattcatccatttgtggtgatccagtgaaccttgttttagcccatggaccggttctataataacgtgtcgagcctctcataataaacccctgtggtggcacttgtgttgtaatataacccacaaactcaccaggcaatggatcagtgtaacttttccaagaagacaatacccgcttctcactagtgccggggttatacatcagggaggagtaaggtagcatagtatcaccaagatgctcaaagctttgccataaagttattcccgaaactttgtctatgaccaaaagatttccgctgtctgaaagctctgcactagacccgttagatgcaaaagtttctccggtggaccagacagtgctatgtttgccatcaaataagagaagacttccattgctactgatagctagatccgcagtggcgtctgtaacagaattttctctattggccacccacacaaccgtccggggaatgatacccttgaaccagattccaacatacaaattccgagagttattaggactgaaaaaccccagttcgaaaattccattaggggagctgagagtttgtccaattgacaaaggacttgttggtgttatagctgcatagctaaaacttaagagcaaggtagagaagagaaagcaagcaaacctcgtcatccccaatgtccaagaacaatctcctcagattattgtaggaagagaacatgtatactgtaaaaaagagaaaagtaagcaaataaaacaaagtcaagtgctgaatagaaaatggaagcacctctaaccaatgttgactacaaagcacccattttccaagattctgcattactttattcacgatcaacttaaaaccttgttttataatacagattctagaaaagtgaaatgcttatgtttacccaatcaaccatgcaacagttgacctattattttcaggtaaattgagcccacaaccaatgaaaaataggcaacaccgctaccattcattttcaaacatgagaattgtaccactgacctttttttaccccaatacaacgtatctgccatctagtattccaagatacaacggtcctggcctggccactaggtcctgatcacctgcgtaagcacaagcatgcaaagcaccaatgatcttggtttccaaccctttgtccggcataaattcacgaattgcttttttaaaattctcattttgcacataccccgtcattcatcgaaccccatgaatataacattccactaaagagctatctagcaaattgcatttcaaccaaatccttgaaggcattcacaagagatccctaatcatcttgtcaatactcaaaaaaacagtggcgataaaaccagtctttagattctacataccatatcaaaatacaatcctcgccaatccaatctatctacacccagaaacccactgtgttttaaggaaaaccaag

SEQ ID NO: 18928 - DNA, 572 bp, Arabidopsis thaliana landsberg
tacaaacaacttatccaactcttctgggaggaatcctgcagaagccaacacaaacacacaaaggagatttcaataactgtttatcctctcaacacatctattgaattgaattggagatttcaataactgtatattcaaagactactaagaagaggcaatgagaagtatcctcttctgatcattcattatctctctagctaaatcacagatttaagcaatttgatccatatcactaacgactgttaacaaaccaaaccaagttttatgcaaatgcccagattcaatacctgaagcagcgagaataatgccttcgatgaggatgacgataccaagcccaagccaagtaagaagaaacgcgttttcgttttgtctctgctcctctgccttggccgctccttcttcgctcatgaacacaggtttctccacaggagcacgccgattcacctctctcttacctttccctttcttgtttcccgatgtagccgcactcaatttcttagccggcgaagaagaagacgccggtgaaccgaatcctacgccggaagagcttgaattctttgaacgagatggat

SEQ ID NO: 18929 - DNA, 1058 bp, Arabidopsis thaliana landsberg
tttcagacaagttgcattgtcgacagtgtttgcagatagaaccctaggtaatggacttaaccctaaatagtgcttaaaggggaaaacttaactcaagttaagaaaacctaaatactttagggtccaagtcataaattgaccctgagaataaactgagaatcacttttgtacccctgggataccagaaaccctgaaatggaaccctggaaaaccctgaaaccaaaccctagggacctaagtgcaaaattagtccacttttgggctaaagtgcaaaaaccaagtcaaataagtattttaagtcaattggatcacaaatatgtgattttgcaagccaaaccctaagttttggacctaaatgcaagatggacctcatttgagtttattctaagtctgaaaaattagtgaatgggctcaactttgggactttgtaacttacaaagtatagggtttttgccctaggtcaccacatcaaaattgaagaccaattataggagaacaactttgctaaagagtgtgagctcagttgttaagaaaaatttagagataattgagctcaaagttggactgtcaggctgatggaattctgaaattcagaacttcagtgaaaccgagctaactttggacttggatttaaacatgatccaatgcaagtttgggtatgattcccataacaactttgtagatggtatattgctctacaaatttgttgcagagtgtggatcacgttgccatagaaaatcgggagaaaaagacttctaaagttgctctgtcagacaggtagcaagcaacggaagctgaatttctgatggtacagtaacccgtgtggatcaggccgccagcgcgcgaacttcaccgccggcgaccgattgccgccgtgattcgtgcggcacgcggtccacgttgttcttaggtaagtgggtaacactggtgtacgccgccgtggataagcttccacgataaagaactccggccaccgtacggtgtcaccacggtagaagctgataagctcaccgtcgacatgcgcctcccggccgtgcgccgcggggtaccgagctcga

SEQ ID NO: 18930 - DNA, 451 bp, Arabidopsis thaliana landsberg
cctgctctctctgtacctgcctccacggttgctggggcggttgctgtgcctatgtccaatgagcaagaggttaaagttattgatgaagctgccccaataaaacgaaaacgggggaggcctccaagggcacaggctaatacgccgttgcatattcgtccacccccaccgccgccgaagaaggaagacaaggaagaagatgtttgctttatttgcttcgacggtggagaccttgttctctgtgatcgccggtaagtgattgttagcttatagtgataataattctgttagatagtatgctctagtgggagattagagccttgccatatgttttagttggttcacaacgaagaagagcttaatttcgtagtttttttttggatattatattatgaactgtatctcattatcgagattctaagtatcgattatgcgttggttaatgctcataggg

SEQ ID NO: 18931 - DNA, 546 bp, Arabidopsis thaliana landsberg
ttacagtatggattctgaagaaacgaagacacaatccacgtctgagaaggatgacctaaaccgataagccaacaacaacaattgatgttctgttcgttctgttgcaatgtgcgtgacctgtttgaacatcatcttaattagtctaccacgtccatttttatctccttggtatgaatatcctgaagaagacaagcttggaggcccacttagacgttaaatcagcccatttttgtgtttcttaaccgactaaaatcggataaataaattcacgaaagctaggtctctttagtagtatataagctaggtttctctaggtcttacattaatatgtaaattttaacaaatctccttcttcgttcgatctgaaatcatgaattcatattccttaacgaatgatctcatcatggagatattgtcgagattgccagcagagtcggtcgtgaggttttgttgcgtgtcaaagcgatgggcatcaatgtttggtactccatatttcaaggagttgtgccggagcaggtccacggctaatccgcgcctcttattctc

SEQ ID NO: 18932 - DNA, 1544 bp, Arabidopsis thaliana landsberg
agtaaattggattagttaatgtctacattagcagtttttatagatgggtttttccgatgaaacgatgcttcgattttgttcggtatagtactgattctaatcgattttaaggtagaaagtagaaaccctaatttcattgagaaaaagctatttttaaaaactctatgagcttttctagtgaaacttgtgagtaaattgaagaaaatttgggctattgcagatatgaggatgagccagcagagcctgagattgaagtaagttcaatattttttctttgtataagagacatggttattgcttattatacaactttcggtttctgattggttttttttttcttgtgtaggaaggagtagaggaagatgttgaaatgaaggagaatgatgatgtcaatggtgagcctattgaagctgaagataaagtcgaaacagaacctgtgcaacgtccacgcaaaacgtcaaagtttatgaccaagtatgagcgtgctcgtatcctcggcactcgcgctttgcagattaggtatggttcttgctactgagaacaatctttttaatgttaaattggcttgtaaagtttgagtcttaatgttgttttttggctgatacagcatgaatgctcctgtcatggttgagctagagggtgagactgatccacttgaggtgtgcttacctaccttcttgttgttggtttttgaagttatgtctcagtaaacttatatgaacatttgagctaatttattatgatttggattcagattgcgatgaaggagcttaggcagcggaagataccattcactattagacgctatctacctgatgggaggtgagagattgcattgagcttatattattctcttcactcacttgatctcttcttttcttgtgacttacttatgattcctgaaacagtttcgaggaatggggagttgatgaactgatcgtggaagactcatggaaacgtcaagttggtggtgattgataatctgaccagagacaaatcgacaaatacgtatgtaacttgcaagctttcctctcttatggatgataaattttctgatgttgtaatggaactaaaaatcagtgaaacttatggataatactagactcatattccgaaattctgcaaaactagaagccccaagtaccataattccaccattattatacatattagaaacagaacatgaacagatgtacacattcatactctttaagttaatcatacattgattaaaacaattccaagatcaagattttctcaaaacaagtaatatctcacgcttctttatccgttttgttgtatatctccctctcttgaagaatcctttggcccatatacctacacaaaacactctgacacaatcagttcttaatcaaatcattaacatgttttagattatttggatcatttggtttatgcatttaccttccgagcatcataacagtagcttgaggattagtccccggagacttgagaaatgtggatccatcgatgacccttaaggaatcaatgcctaagactctggaattcttggtcaccactct

SEQ ID NO: 18933 - DNA, 1005 bp, Arabidopsis thaliana landsberg
  unsure (1)..(1005): unsure at all n locations
catgtttgtcatgctcattatcactgcaaattttgagtagtanctatggtgagcgggtcgtcattttgtgaaaatttatatcatcagttatttcctatcaccaaacaaactttttggtgcaaccaattaaacatgcaattcattttctttcaattgcatcttttttagtttagtcatttaatacaaaagttatgagtcccatgtttaattcgctattttagtattttggttagcagtcggatttttcttcaaattcttgcatgtgtgaaacattttttaaaaactaaaaagtattatttttcaataatactacggtttaataatactaatttttaagaacttctaaagcgaagaaaaattgcaaataaatattcacaacttttaatttttttggtaaatttattctccacctgcaaaggctgcaatataagactcaactttaacagactatataacatcatatatattataaaacaacgtcgttttggttaaaacttgttataaaaacatcgtgtgagtcgaacttttggtcttgtcgaaagtccaaagatacattatgcgcttctctaggagtaggcaacataggcatttctttttttttaatttaatgttaaattatattcaaagaaaaataaactgtttatacatagaaatgcaaacttttttaaaaaaaatagatcaaatgtgtatcttatctatccttgattttgatcttgccttgaagcaaaccacacttggattcctcttgggtacttctcttcacctctcacccttagcgtgcttaatcgattccttatgtttttgtcgattagcctgattatcttctccgtcctcgatggcgcgtctctccatgtcttctctcatttctctctctccatatagaacgtatcgttttttgaaacacataccgaagcacaatccttgtagtggcgtcaagatctttactcactaactccttcatgatatctagccaattgtccgtatatttgctagctagtagtcttc

SEQ ID NO: 18934 - DNA, 1564 bp, Arabidopsis thaliana landsberg
gaccgcacttcatctctcgcaccccttgtttgggtagatctagtctcataagcccccaatgtggtcggcggaaagctcaattccgttctgccgccgccgcttttggtgaggaacagaagaagtgcctggctaaccctaatggtgctccggtttaggcctagcccatgtctcatttgccctccctcaagccctttacccaaagctttgaagcccatggagatttctgctgacttaagcccatatcttctaaggccaaggtttggttttatttcccttttgcacagcccaatctttttgaaactgtcatcgtttagggattgtagtggacgctctcatgtgatggtgatgatggatttagcttggtttagttgctacatttcacaaaacctggttgctagttcttatcgtttggtccgcttgtttctttgttggagtctgattttgaatcgtttggagggtagttcctctttggaatcctagagagttgctgcccatgtcaattatcgctgatctcctgtcaagtttcctcccttcagcaccatctatctctgttttggctggttatggacgccacgcaaacagagtaatgatttaccttgactggaatgataggtacttttgtcgagatcagttactaagcttactatggaccctatccgagactcgcttacccaatcgtagtttgtcgtcctttagagttaagaagttcggcattatgaccctgtctctacggagtaggtgttaccaaagctcttttaactctctacttaccctttcatcaattatcgagttcagtcatgtattaatctattgcttggataatttgctatcttctggaaggtggggaaagtacggcattatgaccatgtcttcaagaggtggttaccgtctctttctcaacctcgttaacccgctagcctcctccatggagcatcttctcaaacgctcggatgcattatttgcaagagtcacttttgaccacaatgtggtcgaggatttcgcgaagcccgccttcatggtcgaatccgccaaggcctcaacagatttttcaatcattgtaatcttttttaaaaagttcacatctctttggaaactcatgaagctctatctttatttctttgtatcatctttgcttcattgtgtatgaaccttcctctttttgaggtttaatttgaatgaagatcttgtttgacaaaaaaaaaaatagtatcatgttacatttgagtataagttagtttgattccacactcttccagaatgatcattcaatctacaagtttatcatcttttttccatcttcaataggtgatctaatttgtttgtttagcttatatattatacatttaaactttcggatgcgactggtcaacaactcttggatagacatattgccattgatgcttcttgctgtaggtgtggagagccagagactattcttcacatgttgtttcactgccagtttgcgcagttagtgtggagtccggcaccgtttgcaagacactgggcaagtgttggagcagggagtgttcgagaaggcttgatcacctggttgtaagcttgcatg

SEQ ID NO: 18935 - DNA, 584 bp, Arabidopsis thaliana landsberg
gggtgcctcttaatggaggtctgctaagcgagaaggaccctcttgacccatatctacaaaatgagttcagcttgtgtacatgcggttcgcgctaaaacctagaagtgcatgattgattgggctataactgcaaacttgtcgatgtagacattcagtcgtgcctgtgatggcggacgcctgaacttttattgctgtaagttttttattttaaataatttataaaaaaatggattaataaaatataatagttataataaaaaaaattatagtaaataaaatatcttgcttcactaggtatcataggggtagggtgatgatatctaagtaaaatataataaatatttttttttgttatatatttatgttgataattttaactttttgtatttatttaatgaattaaaatttctacagtcaaaagaatatgactttgagaatttattctcgtacaaccttaaaaataaaaataaataaaaattaaactataaagttttaaaaaaaaactacaagtacgtaatcaaaacttaaaaaaaattaaagttggaagtctgacttacaacctaacccatcattaggggtattag

SEQ ID NO: 18936 - DNA, 528 bp, Arabidopsis thaliana landsberg
gaccttcctcgtacggtactcgtcgacacaaaggacacgaccttttactcttaagccactcaaagatacaattttgggggagcaaatggaaacagtcaggtaacagaatgatgttatcatcatgactctccgaaaagtcctccaaacaaatcgaacaagtggtttcttcttcatctcccaaatcagtcaattccattgtttgttcctcaagcaatctttgaaacgtatctctcgacctaacagcaatagacgagaacataacatctcttgtcacttccacgtataaggacacactaaaaggttggggaatatgagcacaatccaaaacgatcctttcgctcaacaatcgacaaaactcagtatgtgtgatgaactcgtcaaggtcttgatagatgtgatgtgaactgagatatgatggtttcaattcgattttagtcataagtggagccgcgaacgttcccaaacacaatacgacaccgttttgatcttcagctaactcgttgaccacatcttgtagattgacgaaca

SEQ ID NO: 18937 - DNA, 2101 bp, Arabidopsis thaliana landsberg
agagagcatctttttaagaaatgtaataaattatggtttgtgtatgtaataaagaagtatgtggatgttgctatcaacattaccatacgtgtctgttactatactagccccaatgactacgcaatagatatgtttttttcgaatgaggacaagagctcgtaatcagctacacgcacgtccacatatatacttcaatttcatccattggatctgattatgattacgttttaaccattggatttattaatcatacaggtcttaacataaacgagaagtaggtaataaatactagaagctaccccagtatcttaaaactctgaaaacgtgtcagccaaacggtttctttttaacacttcgtgtaattaattaatgggattgaaaacttacttattaaaaatcgttatagattccagaaataaaggaacagagagacacacacaagataaaaaaaaaagtaacgaaattgagagctgaatgaaaccaaagatttggaattttctttgtatagtttttccacgaatcggagtatcacacacggtcttggaattttccagcttaatttctaagatttaaaatcgtaatttttatttggaatttcactgtctcttcatgttgtctatataacttttactcggaaacaggagtgtcccgtgttcttgagcacaaacaaagtagcagaacaaagcatatacaaaagcttcattgcctcgagattaaacagcatcaagacaacatccaaaaattacccaggtttcttcattttcttaatatatcgtttttgtttctggatctcctttctaaatctgtagattcaggcgtgtgtagatttagtttttttgttattgtttggatgagtaaagtatgttctacaatgcactagatctaaatctcttcgagattctgatggtgtgttggtgttgtattaaattgattttggggataatctacgacaagggtttcttttaatgttccttaggaaaatggtaatgtaacgtttaaagggttttaagagttgcttaatatagctgttgagatgtctgattgattatgaatcccgatccaagagtttttttatgaatagaagagccatgtcgttcttgattgaattaatcttaatcatactgtttcgtaattcttaaactttgagcttgatgttgcgtgagaatctgggaactttaaatgtgtcggctgggttctctagtttgcttcttctttctgtatttggctctgagaaacttactagagctctaacatttgtgcttgctgataggtttttgtgtttgaaactcgaagattgttgcggattcctgaaagattaaggcttttagctccaagtttccaagagtgctgtgaatcagctcccactctgtctctgcatattgcaagacaccggttttgtttcagaagtttgtttcttcttgtctcatgatcactagttttcagcaatggggtatgtaaacgtggagaagagatgggtttttcctcttgtcatcacatctctcgtctgcgttttccttcttgcaacttctttcaacatgggactagtctcttccctccgaacaatcaacgggattttctccatcataccttcccgtctcgtcaagaaccaaacgagacttgattttgcagagtctaaagttgctagacaaacccgtgttttgcctcatgaagacaagcttccccgttttgcataccttgtttccgggtctaaaggggatgtagaaaagctttggagaacacttagagcagtgtaccatccaagaaaccagtatgttgttcacttggatcttgaatcacctgtgaatgagagattagagctggcctctcggattaataacgatcctatgtactctaaaaccgggaatgtatatatgataaccaaggctaaccttgtgacatataaaggaccaacgatggtggcaaatactcttcacgcttgtgctgttcttctcaagagaaatgcgaactgggattggtttattaaccttagtgcttcagattatcctctggtgacccaagatggtataaaaagctttgatctcactttcttattagttttgcatcaagatatttcttcagtcttgtctttgattaacttact

SEQ ID NO: 18938 - DNA, 572 bp, Arabidopsis thaliana landsberg
  unsure (1)..(572): unsure at all n locations
aggaccatatttgatgtgtgcagcgttggaaagatatcctcactcttgcagcaggctgctcagagcaggtattgtcttggaacttttatgatgatttctggcctcttttgagagccgtggattatgagaatatagtaacattcttgttcttgtacgaatacatggtatttgaaattggattttcttgaatgcataacgtaacaaataaataactctctgtcaattgaccaatcatagagtgaattctctttttgcaggtcagtagggaagactcaaatgaatgagcaatcatctagaagtcatttcgtgtttactatgaggatttcaggtgttaatgaggtaataatgttttttcttgccttgtagacttttcgttcttatttttgaaatccttttttatcaacactttttatcaacacattcctcctctttcagagcaccgaacagcaggtacaaggtgttctcaacctaatagatcttgctggaagcgagaggctatcgaagagtggggcactgggagatcgattaanagagaacaggttntttgttgtttcaacataatctttccagct

SEQ ID NO: 18939 - DNA, 1694 bp, Arabidopsis thaliana landsberg
  unsure (1)..(1694): unsure at all n locations
gtcttgattttctaaatcatgcataggttttatctaactaatcctgatgtgttgttgtttgcagcaacttgtaagaaaganacgcggtttacttctcatcgatctgcgagtgaaataatgtcgaaaatggaagaagccgcaaagccattagnnnnnnnnnnnnnnnnnnnnnnnnncaaggtctgttcttcttcttcttcttcttcttgatttagtttgtgtcaagtaatgtctttgtagcttcgttaaacattgtttaagtaaccttcgcagataaaaatgaaaggagacaaaagtggtcgtaaaggtcagctctccgtagctacagaggtaagaaagaaaaaaatactccggttcagttcggtttttggattttgatgaatatcgttatctaattgttatggtttggtaatcggtttaataggtgtttgaagtggcgccatcattgcatgtggtagagcttaggaaaaccggtggtgataccctcgagtttcacaaggtatgtgattcggtttgatcttcatcaaaaaccggttcggttttgatccggttaacatctctagtttagtgtttaaattggttttatgtttgaatctcttttgcagttctacaaaaacttctcatctggattaaaggatgtagtctggaatactgatgcagccgctgaagaacaaaagcaataagaaataacaagttgttcaattcaaagtttttaatcaatgttgaacatgtataatgaatagtaaacattctggagttggcaatatacaagtattgctgacaaaagagccaaactagaactagaagtggtctatagaggtagatcaccataggttagtcaatagccacatatgtgatcatcctcaaactcggtttgaaacctataaatcaaagttcaaacaattcaattaggcaaaaaatactctgcaagctggctatttgagtatagttgaaagttgcaacgatgttgtcgctttatggcaacgcgttacaatgacacaacatatataacaatttggaaaacacaatgatagaattattaaagagaggttatcttagctacatagatctacgtttgcaaccaaaaaaaaaaagttttattttgatgtacagtcacacattgatgacggagtggtttctagtgaggagttggtgttgagcagaccaacgttaattgcccaataagttgtgtgagttgtctaatctttcaaatcaaacagcccgtaaagcccataaagtcgcaaatttcgcattccaaagtttttaagaatggagaaacgttcagattcagagagtgtagagattttgggtgattgggattcacctcctccggaagaaagaatcgtaatggtttctgttcccacttcaccagaatctgattacgcgagatcgaatcaaccgaaagagatcgaatctagggtttcagacaaggaaacagcgtcggcatccggagaagtggctgcgaggagggtgttgccgccgtggatggatccgtcgtatgaatggggtggtggcaaatggaaagtagacggaagaaagaacaagaacaagaaagagaaagagaaagagaaagaagagattattccttttaaagaaataattgaagctctccttggaaactccggtgacaaggttcaacaagacaacaaggttaatcaaagtcagagctctgttgagatgttgaaatcaatggg

SEQ ID NO: 18940 - DNA, 577 bp, Arabidopsis thaliana landsberg
ccagatagatgcctgatgcatttctagcaacctctttacctagttaatatttcagttctccaagggctttcatgtggaaacacgacgagagataagccttaaatgattctgtagctttaagactacttccagcaataactaaatcgtcaacataaacgagaatgttaagactggtagtacctttgtgatatgtgaataatgagtaatcactgcgtgattgttcgaacccgtattctagcaaggctgatgaaagtttggcgaaccagcatctcggggcctgctttaggccatataaagatttgcgtagcctacaaacttttgtcttatcatctgattcaaaccctggaggcatcttcatgtacacttcctcttctaaatcaccatgtaagaaggcattgtgcacattcatctggtgcacaatccacccttttttaactgcaatatcaagaaacaaacgaactgtgcccattttcacaacaggagagaacgtttcgccataatctttactttcaatttgcttgttacccatggcacgagtctggctttatagcgcttgattgactcatctgattgaact

SEQ ID NO: 18941 - DNA, 1537 bp, Arabidopsis thaliana landsberg
gttcttgcggcgattattggtagctgggcagttaaagtatgctatgactctctgcttcagagtctttctggagtcttaagcactcagattggatcgggaagccatctgggacgaaagcattcagcagcaagggtaaaattacactgcgggtagtagctttgtagtctaccttgagattgctcctgcctgtgttattcttgagtcaggaacatgaagtggttttctgtcaactttacttactcaagccatctccgcaaggtagaaactatggttcgcgttatttcgtatgtaccatgtttttggtcgtttgtgtagtttcttctaaccttccacacccttggcttgcgattctttccaaagcagagatgttagatcagaggatggagtgggttctcaagtagaatgcacttgcgaatccctcagatcagatttttcataggtaaagttcgttaacttcaacaacaccactttagtaaacatgtgataatcaatcgtcataagcatcttcgattcatttttatcttatgcaagtgtttgctttattatgatttgttaagttttgcataaatacggacactccttcggagtcagtataagaaaactataacctaaaatataaattaggcaaatgtccactcacccatccaaaattccattgtaaataaatgtttctttcaaataaatgaaaaaaaaaaaaaaaaaacaagttggaagaaggaaccaaccaagtaattgccagtcaaaggaggcgactcacacttgaaaggataagctgacatggcagacaacgatcctgcgtagaaattgcgtgaacgtggaaaagtttgaggatatagccgtcatttcaaataattcgggtactattatataaggcttcaagtcctggttcgtagtacaaattgtctcacaaactcttctttcagtcatcacagaaaacaaaaaaaacaatggcggataagctcactgacgatcagattacagaatacagggaatctttcaggttattcgacaagaatggtgatggtatggttcatcgtctctttccatttaatcgtacatattggatcatgaatcatcttcaaagcaatgaaatgactaacacaagtccttgattacttcttgtaggtcacattaccacagaggagttcggtgccgtgatgcgttccctcggtttaaacctgacccaagctgagcttcaggaggagatcaacgattcggatttagatggtgacggaaccatcaatttcactgagttcttgtgcgcaatggctaaggacacttactctgagaaagacctcaagaaagatttcagactctttgacatagacaagaatggtttcatctcagctgctgaaatgagatatgtgaggactatcctccggtggaagcaaactgatgaagaaatcgatgagattatcaaggcagctgatgttgatggtgatggtcagatcaactacagagagtttgccaggcttatgatggccaagtgagatttaaacaacttttccgcttcccctttttttactacctcttatct

SEQ ID NO: 18942 - DNA, 1450 bp, Arabidopsis thaliana landsberg
  unsure (1)..(1450): unsure at all n locations
tgaaacctgggaaaataatatttgaacatcagtagttgtggcttattttttaatcatcaaaatgaaacccagaattgtaaatttcaacctttacaatcaccataataagattaatggtgactaaaacagatgttatcaaattttatgactcacttcctatggatttgcatcaagaaaactgttaaccccttccctatgttcaatcctagactgggcagtggacagtatactggacttcggaaaaaatcctgacttcatgaaaatttagaggcaactttctcacatactaccaatgagatatcacaagttcacaacaaaaaatactcatggtaaacaacagagatcaacacatgcaagaatcgcagatctaaagattatctatcctttataagctttttgttgagagggtgaaagcctgtgccaggagaagtatccttttaatctcacaaacacccaaaaaactagcatacttcattccgagataacgacgaccacttgggtgatttaaaaatcaataaacatctacgaggaatgaaatcattttactgccattgtattaaagtaagaaattaagttcatgcccgaaagaatgtgacccagaaactctcattaaactttgaatccaaatcagcctgtccttcaataatttctacaagttcttgcattctttcttgaggagctttccctccaaatatactcaaacttttcaggaaatccataaacatattgaactcttctccagttacatcccctaggctctgttaacgtcataaaagggctaaaaagaaatccagataaataggtacaaagaaaaactccatgcagccaaagatatgttctcacctttttgattaaatcggttatatgtctttccatttcctgttgaggctttaacagttcctctttaagagggaacacctacatggaaatacgaaatcaattaaaataggataagatatacaaaacctttccaaggaattcctagcataccattaacttgcattatcagaaaattttcattttacatcttgttctataagaaatatttttcggtgataaacaaactttccaaattccaaaataagaatgactccactaaatatacgctagctatcagcaccagtatggcagtacctactcaagttgatttggcgaaaagaatcaaaagatcatataggtctaacatgagagtataaatttcatttaagtcaagtcaagctaagatatagcagaacctcaaaaaaaagattaaaaaatgtagaaaggactctgaccttatctctataaagtgtaagaccttttcacggatttgctcatcagtactaagagtggcctcagtgtgcttaaacaatgcagtcaaagatgctacacataataagacgaatatattgaacataagaacagtttaaaaactatnatactgtcactaaccacatactaatatatctta

SEQ ID NO: 18943 - DNA, 1822 bp, Arabidopsis thaliana landsberg
caccctcttaagtttctcaccagtggagctccaaattacacaaacccaagatgtcatatatgcggagaagacactgggaacttactttatcattgtgatatttgtaagttcaacttggatttgagttgtgggacaaaaagccctccactagttttctctttcaaatatgaaggtccatgagcatacactcacgctcatgccaagattgatctccttcgtttgtgatgcctgtgggacgaaaggtgatcattctccttacatctgtgttcaatgtgatttcatgaccttccatcaaaagtgtgctcgtttaccacgtgtcattcatgtcaatcaccatgaccaccgagtttccttcaagtatcctcttggtcctggagattggagatgtggagtttgtttggaagagattgattggtcttatggggcttatatttgttccatttgtccttgttatgctattcattcactatgtgcaacaagggatgacgtgtgggatggggaagagctagatgaagtacctgaagaagttgaagatgtcgagccattcaagaggaatgatgacatcacaatcactcatttcgctcatcattaccataacctaatgagcttcgagaaaggatgtggagaaagtagctggtgtagtggatgtctttgccccatcggtacttcttgctctctctacaagtgtccagattcagattgcagtttctttcttcatgaaacatgtgctaatcttcctatgaagaaacgacattttttgagcccacaaccactggcacttagctttgacctccttcaacgccgccatattggcgaagaaatttgcgaagcttgtcatcaaattttttgcaaaggattcatttactcgtcggagttgggagagaacttcgacttactatgcagttcgattactgtgccatttatccatgaaagtcatgatcatcatttactctacctcaaactagaacatggtaacgtcaagacttgccagggttgcggcatcgatgaaaaaggagtcgccataggttgtaccaaatgcaattactttttggatttccgttgtgccactctaccattaacggtaatgcttcccaggtatgatgatcatccactcactctttgttatggtgaagaaaaggcaagcggcaaatactggtgtgatatttgcgaaagagaaacaaatccaaagacttggttctacacttgtaaagactgtggggtcactttacatgttttctgtgtagttggggatgtcagatacgccaaaccaggagcaatgatcaagtactatatagaattgctgtctaacaatagctcttcaaggccactttgccaccgctgccattgtcgttgcctaggtcccttcattcttaggaaaagaaagcaacagtattgttcttattactgttacataatcaccaaaagtaagaaggagtactccaaaattaagttgagatgtcctccttggagaagtggacatcaaagccaagtgatggagttgcaaaacgaccagtaaaagcacaacggagaacatccgtaaagaataaatgatttatgttttctttctctttttagtttaattctgttatttgcttcaattagaaataagagagaatctgttctccttatgtttaggatcataaccatctcgttcatattttccttgcttgtaattgttggagctacgactccactttgcttcctgttttgtctgtttctaaaaatgaaaaagctaaaagaaaaggcaatcttaattgctaaacaaagtgtgttcttattctaaagctttggtagagatcaaagctaataccaaaatttggcc

SEQ ID NO: 18944 - DNA, 472 bp, Arabidopsis thaliana landsberg
gtttagttcaggaaccccgataacgtatccggcttccgccgtaacagttatgatccccaagatagtttagagaaggttgggggttagttggggcagggcaattccaagagtttccaagtaacagaccaagtcttcatgaaaaggaaaggtcaacccgcaacccttgaaatagatctcgtaaacgcaaaaataaccatgagcgatggtcctccggggactccatgggactccatgggaccatgcatctttgattccgcaattatttccggcggaatccggcatagctccttcagtcgctcaagggattgaagggtacaagtagacatatagtgtggactggcgatgttgttcgggcgagtgcatatgtcattgctataaccacactcgtcgaaagatggggattcgggtctttcagtatcaggattcatcgtagagaataaaaaaatccggtgttcgaagaaaaaattggcag

SEQ ID NO: 18945 - DNA, 823 bp, Arabidopsis thaliana landsberg
atcccacacaatcaatcaaaaactatggatcaaacagataaaatcttacatagatatgacacaaaagatttcttaccggcggtttctcggtttcaaagtggatttctcatattcacggtagatatctcagattcacagagtatctagagaaacaagtgaaaagggaagaagaagaagatgaaagggtatcgactgaaaccagatagagaagaagaagaggatccagaagaaaaaatgaaacaaaattgagatttttcaagtcggattctccaattgccgaaagagataaaaagagtaagacgaaggcgtggggaacttttagaaattaggttttttcatcatcaaactatcttatcacttccataaagctaaagcctttatcagaaacaaataatgaaatcgatggaaggataaagtttaaagttaaaagattaatccttttaaacccaaatcgaccaacatagaagatacaagaaatacttcagtagaagtgaatttgaattccttaaatagggacaaagaagaagatgataaagcaaaaataaaagtgaacaaagaataatttggagattagcgcaaaaaaggttaaaactcaacgatcagtttcattaagatccaagtaatacaatcatcctgtcttgccatctcgttcttcccctctccttcgctccaatcccatcgtcggcaagttctgtttctgtccgtattccttatctccaatattggaaactcgaatgtcgacaaaattttcaacacttcatcttctcctctctctctctctctctctctctctctctgtctctatatctatgaatgtctcttg

SEQ ID NO: 18946 - DNA, 499 bp, Arabidopsis thaliana landsberg
  unsure (1)..(499): unsure at all n locations
tcgaggaatggtgtgggggatagatatccctcgggtcctcatgggcactaaagaagatcatggcccgcatgagggtttcctgctgagtcgccctgtggaccgggtcagcgggatatagctaactcaggtaagcccgacccaagttggtgaagaccgacgtccgagttaagcgtcgttgaagcctgaatgtgtcagatgatgcagttgcaaacacccgaagcttgnnnnnnnnnnnnnnnnnnnnnnnnntaggcaatgaaggctccagatatggagggacatgatctgcggcaaatgaaacggaaatagggttaaccttttcctataattaattttggtggttgatcatcaacaaaaacatatggactaactagtttgtctagaattcatgtattacaggtgaataaggttcaacacaaaccaataaaagattcaagttagggacacaattttaaaggagcaaaaggacttgagtgtgttgtggactagcgcaccgtac

SEQ ID NO: 18947 - DNA, 2730 bp, Arabidopsis thaliana landsberg
agcagcaaacgacgtgtcataagcccattaaagaaactccaatagaaaattatcagaatatttgcatctaatcaaatcaaggatgggtttaagagatacaaaaactacctcatgctttcaagagcaatcttctgtaactcaggattggggtcctgaactctctcaacatagagctccagattctgctttagttgcaagtcctcttcagactacaataacatcatatgcaaattgagtcagctgccaatcaaaccagctataaccatagccatagtacaaaagattcctattaatttaactccatgtgacttaaaccctaacaagaattgtatcttcccagaacgagttataatgtggatttaaccaacttcttaacctcgctttctgaatagcaatgcgacattcacaatatatcagctaaaccgtacatctcggaaaatctacagcttaatcgtgaagttttttccgatctccctggattctttctaactcagctaagcacgattccaactaataatcgaaatcgatataaagaaaactcaccagatcctcttcctttttatcatctttcttcttggaatccttagaaggaatcttcgtcgtagcttcgtcccgcttcgcaccaccgccaacactgttcggatccggaactggagccattgtaagtcagactatcacttgaatatatcaacgaatccaaacaatgagtatcgaaattcgtaaaactcggaagaatcgagcagcttctatcttatgagctctcgcgtaaaccctaagtctctctggaatggctcgttagagaagaactatgcttttcttcaggaactgtagcaaaaaggttcaactgtaaaaaataaatactatcagataaaaaaaagtacttatacggaagaagattacccctcgatcaagaattccattgtgggctcagcccataataaattgggctattcattgggccatagtattctactatggtctctatataaaacaccttgtctttggcaaacatctctatatataatcaacactttaaaatttattttatttgggcgatatagccaatcacaaaataaaggactccaaaaacatctattttatcggatttacatttgatcaatttaaattcgaagcaactaattcgatcggatttaaattcgaacaacataataatagcaacatttatataaatacgttacatgtcttagtcgacatgcttttatatggtaaagttagcaatattagtcgaactcaaacattataccttcacagaatgaaagaggaaataacatttaattgtttttttaaaaattaattatataaatgagagaatctgaattacttgagcgataataaaagaagaaaaggaaaacaaatggagaagggaagaggcaagatggcaaagctgtgattaaaaacaccgtcacctccccgtcaacggagacaaacaaagatcgtgttttctcgaaccttccacgagatatactaagccaaagaagaagaagagaccagagacgaacaagaaatccagaaattaccaattcctttttttgtttaatcggattcaggaaaagtgaagaaacgaaagagagatgaagaaggtgagatgggagttgattattacaaggttttacaggttgatagaagcgctaacgacgatgaccttaagaaagcttatagaaaactcgctatgaaatggcatcctgataagaaccctaacaacaaaaaagacgctgaggctaagttcaagcagatctctgaggcctacgatgtatgtgtttgattcctccactgcttttgctttattgaaatcgtccctaaagttttgatttttatttctattgagaaattttcattcccttgatactgtcggtggtcacgaacttgtttctgatttttgatatgagatgcaattagtctgatttcacgatttgatgttgtgttggttcgtggggtttctagatttcgtgttcctgagtaattcgaatcatagtatatagtaaaagatgattgctttatatttgggcaagctaggttatctccaaagctcttaatttgtgctttctttgctgatcttctgagtcatgatttatccgttgtcttaactctgtgattgattattgagaacctcttaggcactctgtacttgtcaatgtgtagcttaggattatgaggaacatactaagattgtttgatttgactcaggcttttatggggctaatgttggtttttgttgtgagatgattaggttcttagcgatcctcaaaagagagctgtatatgatcaatacggtgaggaagggttaaaagggaatgtgccacctcccaatgctgctactagtggagcatcctacttctcaacaggagatggatcttcgtctttcagattcaacccgagaagtgcagatgatatattcgctgagtttttcgggttctcgaccccgtttggtggcggtggtggtggcactggagggcagagattcgctagccgcatgtttggtgatgatatgtatgcctcgtttggtgaaggagcaggtggaggaggagctatgcatcatcatcaccatcatcatcatcacgctgcagctaggaaagtggctcctatcgagaacaagttgccttgtagccttgaagatctctacaaaggaaccaccaagaagatgaagatttccagggagattgtagatgtcagcgggtaagtgattgaactcagataccatttcgatcacac

SEQ ID NO: 18948 - DNA, 810 bp, Arabidopsis thaliana landsberg
ccgcctccaactgttcgagtaagtcctctacaagggaattctcaaggaacaaggcagactgatataaccatgtttctactgattttatctatgttttacgtaaatgattttgattctttatatcatttctcgagtcttttaatgtcttttcaggtactctatgtagtgggacaacaatgaagataaggagacattttggagcaagagctaaggaaaaggaagctaaggatgattttggattcaagaatcagcgagtagtgtcgatcgacacagtcttggtgtcgatcgacaccagtttcggcccaacaaagtcctagatgctttcgagtttacagaagaggaaatttgccccagaaaacttccctatttgcattattagtccctggacgtttttagggtttatatattatttttagacctagtttttattatcaagtctttcatctagtttctatcatcaagttttctacaaaccctgttactgagagacataagctattcgtcggttgttttcagagtttcattcagatcttaatacagtgaagagatcctttcttttcccttctctatttactgtgtttatctttcacacccaaatatgttgcttgtttcattcaatatgtctgagtaatctgcttgttgggaatagggtttctcataaggggttcatatggtttagtagattgccccatttgctaggatatctgtagaattcttcatctttaattatgctttatactagaaaaagagaaattaactagatcttgaatccagacattaagtatgcccgctataggtatctatagttgg

SEQ ID NO: 18949 - DNA, 446 bp, Arabidopsis thaliana landsberg
atatttatcgatctttttttggcaaatattatttaatcttttggtatttaaatgagagttctttaaatttgtcacattatatactaatgtaggtcaagttagtttttctggaaagtaatacttcctctatttcttattatttgattttttagaaaaaacaattgtcttaaaaaaatattttgtaagttttctatgcactatttattagttattattaatgaattttaaacttcaaaacaaataattgaatatcattggtttagaattatagaaaaatgtaaatcacaaaactaatatatttctgatcagttttaatcacaaaaactaatacatttttttaatttgtgtgtttttctataaaatcaattaaaaaatgaaactatatggcaatattgaattaaaacaagtggcaagaatttaattgtgtaactatgttagagatcata

SEQ ID NO: 18950 - DNA, 905 bp, Arabidopsis thaliana landsberg
tagttattgcaaggtagtatatcgtggatgcattccattttggaatcactcttacaatgcatttcgcgttcttgcacttgctgcaacgtgcatagtttccatggatcggaagccgttccatcggagttcaacttctcctcgggggtcataattgctgctttgtctagaaatctggcaacataataaacaaacatttttcagcaaaacaaaagccagaaacataaagcaagagaaccaagaataagtagatatcaatttacctgaactggtcggtgtattttagagtagtatttgcatagttagacgggatatggttgtaaagattgacccaaggctgcttaaccggcttcaaacctcgtttcttgatcgcggctgctataacacgagcaataccagccaatggactacccgaggctttcacttttacatacaatctatcgccagcaaagaaaatcacacacgccaagaacataagagcctccggaatgatcaaaccgattgtccaactcacatttgactggatatacacaactgctgtgagcgagatgatctgcgcgaacgtgaaagtgaagaaataccagttgaagaaactgttgatccctttctttcctgattcggatttggggttgaactgatcagcaccaaacgctaaattacacggtctgataccaccagcgcctaccacaagaaagcctaaacccatgagcagaaacagtatctgtcccacacttggcccttcgcacgagattttgtttccgcatgcaacggggtgcaacgacggaattgcagcagtaagttgtttcacaaacgatccctacagagatgaaaaatggtttaaaaaacattggcgaaaacgaaaccggcgtcatgaaagattatatataaaagtctgtccagagacaagc

SEQ ID NO: 18951 - DNA, 562 bp, Arabidopsis thaliana landsberg
agaggatcccctgagctaagcataggataaagtcatattccatgtttaattcattataaacagaccaaagtaaatttgaaaggattgccgcgcggtgaaacacacgacataacacttagattaaattaaaaatgaaatagctcatcgcacgacggggcgcgccacgagacacttgaattaattataaaaataacgtcaagcgtcatgcgacgaagcgcacgacggcgtacatcatccaatctgaatttaaaatgaaacgtcgcgcgactggatgcgcgagccacacattaaataatctgaaattaaattaattagccgcgcgacgaagcgcacgacgcaacccattaataaaatctgagatcaaactaattcgccacgcgatgaagcgcgcgacgcaccatactaataaatctgaatttaaactcattcatcgcgcgacgaagcccgaccgcagtacgttcattaaactaaattcagaactaattaaactgaaattcgatcgccacgcgcgctgagggtgcgtgcggggggacgcgctgggcaagcagcgagctggacaagg

SEQ ID NO: 18952 - DNA, 415 bp, Arabidopsis thaliana landsberg
  unsure (1)..(415): unsure at all n locations
gcgggtaatctgcggctaaagaatcaacgaagctccaaccacattcttttatattgtaagaaaactaaacaaaaaaggcttaattatctctaggagtgaaaatcatcaatgaatagtaactgatataaattgtttcgttctttttctatctttgtagctgcagcttggtacccgattcgaagcgattatggtgctgggattgaacaatatcatantgatgtcagagctaaatgatgcatcaaaagggtatatggttgaatgatgccattatctttgaagctgaaatgcctaaggttctctgtgacaaacatagtctccgcttaaatatatatcactacttctttctcaaccagattaaccttacaggtagacgtgtgatgagtttaaatctgttatacgacaacgttattgatgc

SEQ ID NO: 18953 - DNA, 602 bp, Arabidopsis thaliana landsberg
  unsure (1)..(602): unsure at all n locations
tgataggggcacggctccttgagcattttgtcgaagagattggcgcctccgggaggtttccgagggttcttgtactcggcggcgggacaatgtccgcgtcggcgcgtcggtttcgcttgcgacttcttcttgcctttcttcttggcgtcgcgctgagttgacgcctcggggacatcttccggtgggcgaccctggggctgcttgtccttccggaagatggcctcaaccgccttctggccagagggaacttggtggcgatgtccatcagctcgctcgccctggtgggggtcttgcgacccagcttgctcactaggtcgcggcaggtggtgccggcgaggaacgcgccgatgacatccgaatcggtgacgttgggcagctcggtgcgctgcttcgagaatcgtcggatgtagtcccggagagactctcccggctgctgtcggcagcttcggagatcccaggagtttccagggcgcacgtacgtgctatnnnnnnnnnnnnnnnnnnnntggaccaggtcgtcccagttggagatctccccggagcaggtgctcagcaggcgcgacggtgtcggaaaggacagggggaggttgtgatggggtacg

SEQ ID NO: 18954 - DNA, 866 bp, Arabidopsis thaliana landsberg
ggaaagtagcaaatgaaccttctaccatttattatgcttgcaatgcaccctttgctatttgtagaaaggataagaaggtaattgctagaaagttagggacaaaatgcaagggagacaaaacttgcatttgggtccctaagaatatttgtgctaaccttgtaggacccaacaagagttgggtacctaagtcccaagcctaaatttgccttgcaggtttatgcatccgggggttcaagctggattattgatagcggatcacaatccatatgacgggggagaagaagatgttcacctcctacgtcaagaataaggattcccaagattcaattatattcggtgatgggaatcaaggcaagataaaaggtttaggtaaaattgcaatttctaatgagcactccatatctaatgtgtttttagttgagtcgcttggatataatctgctatctgtgagtcaattatgcaatatgggatataattgtctattcacaaatatagatgtgtctgtctttagaagaagtgatggttgactagcttttaagggtgtattagacggcaaactctatttagttgattttgcaaaagaggaggccggtctagatgcatgcttaattgctaagactagcatgggctggctgtggcatcgccgcttagcacatgtggggatgaagaaccttcacaagcttctaaagggagaacacgtgataggtctaacaaatgttactttcgaaaaagatagaccttgtgcagcttgtcaagcagggaaacaggtgggaagctctcatcatgccaaaaatgtgatgacaacatcaagacctctggagttacttcatatggacctcttcggacccgtcgcctatctaagcata

SEQ ID NO: 18955 - DNA, 794 bp, Arabidopsis thaliana landsberg
tctgtgcatctctccaagttgtccttgctccatcacctcatcgtcgacattattagtattcatctctgacactgacttagatctattattctcagatttcttgaactcggcctacaacaacaaacatatacatatatactctaatttctatatttagtccatgaaatttaataagatatattaaccatataatttagcttatttttgacttttgggctctttgattgatggaaatgaaactgaccttaggagactgttgcatattttgattaaatccagccactaatccaggaattacactcatttctctctgaaatttttagtccatgaacgatacttacctaatcagaacaagagctaatgactgtccattcttgtatatattatagtttgaggaatatgagattgaaacttgtttatggaatcgagaaaatatcgagaggttagtgatgggggtagtgtacgttatgtttacctaccgcgaaatgaagtgggcagctcggattttgtgagttcttgacgtacaggcaaaaactaatatagaaagaaggcaccgtaggtattatctcgtgagaacttttccatttttttataccatgaaataaagatcctttaatgcatattcgtcagaattaggaggacagttattcatttgttccacacattgaactttgtctattaatgttgccagattgaggtcaaacgagcaaaaatatgaaatttccgaaatataagaatccctttctctgatttaatggaaagcacaaaagtagcttacatattcgtatgtcaca

SEQ ID NO: 18956 - DNA, 1507 bp, Arabidopsis thaliana landsberg
ttggattcattggttttaagactggaccagtcacgaattcttttgaaaaagaaaagaaaagaggacacgaattcttatcttcttatcataaaaaagaagaatgccaaacgagtatggcttgcgcaacagagtaacagagtcgtgcttccacttttcgagaaaaaatatatgcaaatgtattacgcaatatatatattttttaacatcttcattctttataaatttaaaaacgataatacaaatgtatcaatgaacatatacattaaagctccgcaaaccatacaaccaatacttaagtagcacgaaataaacgaaaaagtgaaaaaaacatgttgcttccgaatgttggtaagctttacacgctaacagattcattaatctgttattttccttcgtcgtattcgtcttcagtatattttgatttttttgttgggctatcttttcttagtattacacaataattattaaatgacattacaatttttaaagaaaattaggcttatttattccattaatttgatattatctgttttctttagtggaaacttttgtagtggggaaattaagctgaacatttttactaaaatgtattaaaatgagaattgtcgttataaacaggatacatatatatatatatatatatatatatatattttctaaacagacatattttaagaaccactaatgattcttattatctgttacattgatccttgtaacgtgatgatgattctacaattgaacaccacaatctgatttgaaagtaatgtacgatcaactagtcaggttatagaggaaggtttggccgggttaaaattgatcgaaacgctgttaacacaaaggcgttcatcggttggagtactataaccttcacctttatgaacatggcctaaatgtccatcacatacggcacaagtgatctcagttcttctcccatctggatcaggctggtaaatgtagaatcaaatcaagcaaaaagaagaatgttttactaaccagtagtcatgaaaataaactaaattaaacatacaaaagataatctttacggctcggttaatggcaccggggagtccttcaaagaaagctggccagccgcatccggcgtcaaacttcgtggtggatttataaagaggagttttgcatccgatgcagctgaagattccttcctcaaagaacttgtcatattcttctgttcccggcgttctgaaatatttttaaccataagaacacttggattgaattgtattatgcatttgtatactatgtttcaaagtaagaactgaaataaatcaccccaaaaatcgtaagaacgaaggagcaatctatacttggataaatctaaaaacaaagttctatagtaaccgagaaaaccaataaaacacttaggtttagggtttagggtttaagatcgttactgtttgtttgcgattgcgtttagtgtagttttttcttttcaaaataaatcaacaatcttaagcattctaagctaaaaagactttgttaattg

SEQ ID NO: 18957 - DNA, 575 bp, Arabidopsis thaliana landsberg
  unsure (1)..(575): unsure at all n locations
acctgaaatggcttataaaacacacacaaaccaccaaaatccacacaaaccccctatgggacactaaatgcaacaaaacacaatgaaaatacgaatgaaacacaataaaattactcttaacaaccatgataaagtgataaatatagagtatatcacaactcatgcgtgagtttgggttgcgatcacggagcctgaaactttgttattgtttcatgtaataacagaccttggtaagatcaataaggattacttgtttaattgttttccaaattgatgtctcgattcgaggcctactaaaaaattgggtgatttgcaaaactagccatatttgataacttaattaagaatatagtatcatatacataaattaagaaagtaacatataagggttgggaaaagactattttcgtgtggagtggttggtgagatgatttantaacactaagtttagttttcacccatttgtatttttttgttatatatcttttcaaaaatatagattctaattctgaaatttaaatttaataaaaatttatgtttttttctacatacaaacataggttgaatttttaaaa

SEQ ID NO: 18958 - DNA, 497 bp, Arabidopsis thaliana landsberg
ggaccgggattccccttgctggttattgcttaaccacggtttgataattactgcgcgttctttagagagtgtcaatatgtgtctttcattaaggaaatttcctagtacctccatgtgctgcaagttgtttagcatgaatcatgtaattagcatattgatccacatgaactaaaatgaattaataggaagtttgttttaccatggtatcaatcctattgctcggctgtgcaagctggagtaggaatctgtgggatatcacaatatcaccacgagtcatgtgttccctgcaattattaaataattttagtttgtcgataaaacatcaaaacatagagaaaagtaaaaagggtaatcaaattacttatgtggctccttccggagggtatcaatgaaatctttgaaattttgttttgtccaaagtaggaaacaaatcaatctggtcgtgggaaagcatttgtttttttttttgcaaaaacaaaacaagttgggcttctttt

SEQ ID NO: 18959 - DNA, 1932 bp, Arabidopsis thaliana landsberg
aaagaccggcggagggacaatgccatgacgcaggttatggttgtgtgggaagtcactagcgccaatattgttgggccattcttgctcatctacaacgtcagccatcatgtgtgtatgtgtctgttctcttagagagcgagcgatgcggtcgatgttgtcgttgaagaggaggttctaatgtccttgtgaccatgtttagaagaaaagccttaagtttatcaaagtttaaaaccaaactcgctagactcttgaatcgttttaagaaaaagaaccgcctacaacttgaaccaaaaagagaaagaatgagaaaaagggtagagttaggacatctatgagactgagatcatcttctaagctatcatactatatatcattgggtagatgtgagtctgttcttgcatgtgtctgttggctttaacctttagcattctgctaaatctcaatcttttatttgagagtcccctgttactcgaccaaatcattagagggaccatttttgtctcttagcctaagcctgaaaccaagtgagttcataaccattccattgcttgatccactgttcgtgcttaagaaatattaaagggaattggttgatgtgaatgcttgaatatattaaggcaggttgtcaggttgcattgtgacgagtatggctaacgtttttaagtaagggtctatcatcttgcaacctagaattagctacctggacattgagcttacccgttctatatgcattcttcggtttttgaatccccaccttcaaacctctccttcaacttaaaattttttgtttgcttgagggcaagcaagagataagtttgggggagttgataacattatattttactcattttaggtgtgtatttatcatcatttagttgtgcatttgctcattgtatcatatcattttgcaccattttagcttattttgcacacttaggcatttaggatcatcttgcatacacattgcatgttttggtgtgttttcaagtgcagaaggagcttaaaaggattctactcgaccctctactctatccaactaggagagaagcagcagggcatgctactcgacccattcactcgatccaggcagccatagaggaggcagcagacactactcgatcctctactcgaccaagtactcgatcacgggcaccggattctacaagacttgttgatcgttcaaagcgccttcggatcctcctcatttccccactcaaccagatagctgagcataagaagaggagaggaagaagcaactactcgaccaattgatcactcgaagcatggaggcaaaggcgcagactttgcagcaccctctttactcgatcccctagatcgagcatccatctaaaccgcctcaagtctcttgtcttctagtgaatctagggtttttgaggttttactataaataggtcttttggggtttgtccaaaagaccaagcttttattttgtagtttttctttgtgttttagaatcttgaaaccttaattactattaatctatttcgtttttgcatttagttctttgagtaaagttttttatcttgtttagatctacattttgatatgtttagagtaatttttgggtttgtaatcttgattatgttgcttgagtagtgattagggttcttgaggatggattagattaggtaatctctaggttattcaggtggataagattaggttagatcccttttggaatcgttggccctaatgcttatttcgctcatttaagtttggaatacgacccaaggtattccagcgtcctaaagacgttcaaatgaatgtctgatctacgaattccagagatttgtagactctaccccaagagatttgatgtttagactacttattgactttgatagattgttgattaaagcctgctttactatgtttcttcacgagagttgagataggaagtgataaagtatg

SEQ ID NO: 18960 - DNA, 824 bp, Arabidopsis thaliana landsberg
acgcatataacataaaaatcaaaacccatctctctagacaatgtctctcctctcaggatttgacattgatctttcttcaaagatagtgtccccaagcattgattagtaatattagttcaaacaaacaagcatctgctaggtaattactactttttgaaataaaattcagaagtgacaaattagtttgctatgcagatatttctaagttaaactgaaggtgctatcaaacagatgaaggaaccttgatagttcaaagtgactagaaatatgccccctactggacatgacaattgataaccatgagataagttctatatccatctaaagagcaacacataatataagatcaagcagtataatttattcaacgcatcatcaaccacatcaaatatccacctaacctagcagtatcatcaaaacagaagataaaaccacaaggcaagtaaaatataggctagaaagctctgattgccaaatgatactgtgcataaactgttatattgtaatgtatacatttttaatatcccaacataacagtcataagtgtgtatatatatatatatatgtgtgtatatatacatccagttcacacaaccaaataaaaatttcctcaaacatgttcctgtgttacttggaaaacacatttctaactactagagctgagaccattctatccattgtctgatgtccttatcacttgcatactggagctccacatatacccaggtaactgtcaatatctgtaactggtgcagcatcaactgagccaatttccccaggacttgattcagttagctgaaaccttatcataggggttgaactgg

SEQ ID NO: 18961 - DNA, 1469 bp, Arabidopsis thaliana landsberg
  unsure (1)..(1469): unsure at all n locations
acacacaccctttggaggaagggcgctcccctgtcttgatgcataggtttttggtagttgcgtatatatggcttcatctacagcgacagtaacaaaagcgttctatatctcaagacgtgtaagagacactttagaacgcgcaggcacaccacgaggaagcttgacagacttaagctatcgaacaggagaaaccgtctcaccgatgtcaatacctgctttgtgagtgtagcctagggcaactaagcgagcgtctgctttcttcacactaccatcagaagtctatttgatcttagagatgcagcggcaaccaatacaccttttatctgcaggcaaagagcaaacttcccaagtatgtgtaccttctaaggaatcaaattcagcacccatagcatcacgccaaacctgaagtttctctgcctcagtatagttagagggttctttagttttatcaagacaagcgagaaaagtaagataaggatcattaatcctatcataagagaggaattttcgaatttcatgtggagttgaagacactactgaatgacagtagtaatcttgaagataagcaggctttttgacctttttatgcgatgtttgaacagaaggttcagggacattattagtaggatttgcagaaggcaaaatctctacagacgatgatgaatcagaaggattaacatgatcagatgattgacgttgcataggaggtgaaagattcagatcaggaaagaaattttgctcttcctgagagagatctgatccaagaaagggaaagagctcttcatggaacacaacatgtctagaaacaattatagaatgtgtctctagatccaagagtttgtatcctttaaatccagatggataaccaatgaaagcacaagctttagctctaggagaaaatttatgtctgtctttgggagaggtggaagcataacatagacatncaaaaactttaatatgatcataagttggaacagtcttagttaacttcttaaaaggacatttgtcctctagaataggagcaggaagtcgattaatgagatacactgcagtaagaatacagtctccccaataagaaatacgaatgtgtgattgaaagaaaagggatctagcaacatttagtatatgctgatgttttctttcaaccacagagttttgctggggtgtttcaggacaagaatgatatggcacaatgcctttagattgatagaattgagtgaaatttaattcgggagcattgtcagacctaacccctttaatagtggtttcaaattggttctaccaaggacaatgcgggatgacagtaaggacatcatacttatttcttaagagatatacccatgtagctctagaataatcatctacaatggttaagaaatatctatacccatcatgagtttgaacagaaaaaggaccccaagggtctatatggattaaatcaaaaggtctgctactctattattatgaga

SEQ ID NO: 18962 - DNA, 625 bp, Arabidopsis thaliana landsberg
gggaaagtatatccatatttttttagttattttagtttaactttcacattaatttagagcatgttttgaatttgtaaaaacaacgaactaagaaaaactgtttatatctctagttttgttatcgtagcttttatggtcaccaccgaaactatcatgaccattatagttcccactggctattaccatgactagtttaaccgccagattttatctggccaccactaaaactacaacgactagttttctgattgtagctctcttaacgtctaccgagactagtttgaccaccatagtgtccttggccattaccaaaactaatattatcgttataatatgcatatgtaaaacagtttatgaatgatgtgatcaatagttgtgtaaagattgtacaattgttcttacaatgcatattagttatgacttagaatacataattttatatgtatttatctcaaatccttatatatagactcaactgcctcccataaccggtcttaactatctgcttaaattacttttaaaatttttttaattgcatttaccttctttttttaatgcatttaccttaaactaaccgtttgaatttttacaaataaaatcatttggcaaaatctaaattaaagca

SEQ ID NO: 18963 - DNA, 1573 bp, Arabidopsis thaliana landsberg
taacttactctcctgctgcagatcactgaatgttgataacctgattacactaacctgtgtgttttggttattttttctttcagctactcagaaaactgttgatgggccatcaatgaaggactggagaggaggtcggggcgctagtcaaaacatcattcctagctcaaccggcgccgcgaaggtacacaaaaactcacatggttatcgcaagcatgtaattatcctaaattgggaatcatatctgagctgtggttttttgatcaagtaggctgtaggtaaagttcttccagaactgaatgggaaacttactgggaatggccttccgtgtaccaacatcgaatgtttctgtggtggatttaacttgtcgacttgagaagggtgcctcttacgaagatgttaaggcagccattaagtatgcttcctaaaattttattgcccgaccagatatcgtcatcgaaacattatcgtttaatgtagaactcttaatacctctcatggtttaatgtaaacctctaacaggcatgcctttaaggaccttttaaaggcattctcgggtacacagatgaatatgtcgtctccaatgatttcgtcggtgattcaaggttggtctctctccttttcttcatagtcatctgaatctttttttgtggttgaccaatgtggtgattccaatttggttataacaggtccagtatctttgacgccaatgctggtattggattgagcaagtcctttgtgaaacttgtctcttggtacgacaacgaatggggttacaggtacacttttgtttctcatcttatatttctcatcctagctaacagttctaacacttacaaatcttctcccattttacttacagcaaccgagttcttgaccttatagagcacatggctttggtagctgccagccactaaatacacacaccagttcttgcagaagcttgagtctttctgctttttgcgtaacctgctctacaaagccggtttggatttgttcggttcaattaggtgccactgtgctaggtgttttgaaatatttggcttgaatctcgagcctttactctatttttgttctgttccagtatcagcaaccatggaaactagatttggtccaaaagactgaaaaactgtgcgacttacatctatgaataaggggctaagctagttgtactttacgaaaaatagcttaccagtataagcaacgtttggatacttcttgatagcgcgtcgttagctttgcccgtgcttatgacaaaagatcactaaccactgaaacatattttttacaaatgaaaacagaaattgaacttgattagcctgtgtaaccatgtttcagaagaaagcttactcgttttttcatccgacgaaactcgtttggtattggcgattcctggaagggaagcatgaagatttatccattgagatggacaacctcatcatctatctcctctgtcttgtttctgatctctttcaaaacttgtttgtcttttctctatcatcaaaacttaaaaaaaggtggctgtttttgagttaacggaagtagactcactcaagtgaggctatagctaaggaag

SEQ ID NO: 18964 - DNA, 578 bp, Arabidopsis thaliana landsberg
acctgttaccgcaaagaaggttccatagatgaaacaaactccctgattttcataccatgaaccatccaccatttggaagtcctcaatgtacttaacccccttgtttataaaccgttcaacctctttccttttgtatcctggaaactgtttattaaactgagccagtgctgcaattgctgaccccgtacattctacatacctaagagatataaataatatctcacaatttaaaccaaaatttgttttattcaaaattaaagagatcgagaagattgggttgatgaataaatcttactcatgctcgacgaccgcgtcttcaataaactccactggacttagccactgcatttaattggagtcatattttaaatgttatattctcgaaataccgtgacaaataactaaaacaaaatttacctctaaataagtttttccatccgctggttgccatgcggttatacctccattatcactctgtaataataaaaaatgcataaaacattctctatatataaaacatcaaataatttaatgaataaaaatatactgtattagaatgatgggtagcttccaaggag

SEQ ID NO: 18965 - DNA, 502 bp, Arabidopsis thaliana landsberg
catccatggaggtatgagaaggggagcccgctcggacaccctcgggagctgggttgcagctcgcactgcccatcggagccggatcaccaccggcaacaccctcgggggctgggttgcagctcgtgctacccacctgagccggatcattaccggcaacaccctcgggggctaggcaaccgctggcaccatccttgaggactgggttctctgcaacagccacctctaaggctgaaggactctcagtcacctccatgggaattgaacaaccttgaccaacctcttggctccgaagaccgccttccaaggtcgacgaggcacgagtcgctgctcgggataactctaatcccacatctggaatatcagaacaaacgtccatcatatcaccatcagttggctcagacaacagatcctcaagaacaacatcctcgagagcctgatcaaaattcactatggataattcttgcagaccaacaagagcagacaaagctggagaaggaatatc

SEQ ID NO: 18966 - DNA, 2318 bp, Arabidopsis thaliana landsberg
cggttttactcaaagggaggatttgacgaccttataactaacgtcggtagtttaattgacttcgagatagacaactccactgcttccgagaccgttcacaggttaaacgtaggtggacaaatggtggacgaggtcaacgattcagggatgttccgacggtggctttctgatgattatgagtacttaattggtggagccagtccatatatgccagatgtaaatatcagctacactgagaaaactcccgcgtatgttgcgccagcttacgtgtactccacgtgtcgcatgatggggaacgcccaagacacttatctaaacctgaatttcaacctgacctggctctttacagtcgatgccgggtttagttaccttgtgaggcttcatttctttgagaagtacctgaacaaagccaatcaacgcgtcttctccatcttccttggaaatcagatggctagggaagagatggacgtgattcggttgagtggtggtcctcggattccgatttatctagatttcagaatatatgttggttccgaaagtgggcccagacctgatgtacgacttgacttgcatcctctggtgaaggatactccagagtattatcaagctattctgaatggtgtagagattctcaagctaaacaactcaggtaatctcgctatcatccaagacaatccactaaaaccaaatcctccactatcatcgaactggacaccaaaccatgtaacacagcagatcaaaggtaagtcttcacatcttctggtgaaaatcttcatagccgttggtcccggaactgggctggcgactttcgttgttgttctcatgttgtggatgcgtcagatgaagaggaagaataggaaggaagaaagggtcgtcatgttcaagaaactactgaatatgtacacttatgcagaactaaagaaaattacaaagtcattttcttacataattgggaaaggaggatttggaactgtttatggaggaaaccttagtaatggtcgtaaggttgcagtaaaggttttgaaagatttgaagggaagtgctgaagatttcatcaatgaagttgcaagcatgagccaaacatctcatgtgaacattgtttctcttcttggtttctgcttcgaagggtctaagagagccattgtgtatgagtttttggagaatgggtctctcgatcagttcatgtctaaaaataagtcattgacacaggatgtaacaacactatatggaatcgcgctaggcatcgctcggggattggagtatttgcattatggctgcaaaacaagaattgtgcatttcgacattaaacctcagaatattctgttagatggcaatctttgtcctaaagtctcagactttggccttgctaagctttgtgagaaaagagaaagtgtattgtcattgatggacacaagaggaactataggttacattgcaccagaggtcttctcaagaatgtatggcagagtctcacataagtctgatgtgtatagctttggaatgcttgtcatcgacatgattggagcaaggagcaaagaaatagtagaaactgttgattccgccgctagttcaacttactttccagattggatttataaggatcttgaggatggagaacaaacatggatatttggtgatgaaataaccaaagaagaaaaagagattgctaagaagatgattgtggtaggactctggtgtatccaaccatgcccatcagatcgtccatcgatgaatagagtcgttgaaatgatggaaggaagtttagatgctcttgaaattcctccaaaaccttctatgcatatctccactgaggttattaccgaatcttcttcactctctgatggcggggaagatgtataaaaagaattgttcataattattagcatgaagatcctattcttgtttgttttgttgatcggatagaaagaagtgtaaaagataaaatttaaagttgtcacagtaaaaccacaaatattcttccaattcaaatcgcatttcaatctttcttcttgcggtaactaaatagactctccccaatttcttagtacattaatctttgaacaagatcttgcatctatgaatttccgtggatagagcattttcgacacaacactcgaaaccttcacatacttatagaactaagaaaataattaaaagagttaatgtttgactcaaacatgtatattagattgtgttttgctctgaatagatactattattcatatatatatatatatatatatatatatatataaacaaaaacccttgcccaaaaaaaaaaattaaaacagaaaaaccttaatttaaaaaatttagat

SEQ ID NO: 18967 - DNA, 468 bp, Arabidopsis thaliana landsberg
  unsure (1)..(468): unsure at all n locations
tctgtaaaaatatgcacatttttggacctaagtgcaaaaaccatgaaattagggtaccttaactcatatgattcnnnnnnnnnnnnnnnnnnnnnnnnnnnnnnnnnnnnnnnnnnnnnnnnnnnnnnccccatttgaactctattgggttaagtctgaaattcagtggaattggctcaactttggagccctatatcttccaaattatgaagattttgccctaggtcaacacatcaagtttttagatctatgtaaggagaacaattttggttaagtttgaacagaaattggagaaaaatgtgcctaaagtttagctgtcagactaccctaggtctgaattcagactgatagtgtgattgagccatctttgagctgggattcgagcctaatccagtaagaatttangagtgattgctatagcaggattgtagctagatcatcangcaacaaattttgtactggtggatt

SEQ ID NO: 18968 - DNA, 3410 bp, Arabidopsis thaliana landsberg
  unsure (1)..(3410): unsure at all n locations
ttttgatcttttaaggacttggccacgggcgagagtccaaatttcgcaaatttgcccgaatgcatggacaattaaccttaattgctcaaaacacaatagactatcaaggggaaaagatgggcaagtttgggcatgaacgggcaagtttgggcaccagtgggcaagtttgggcaaaaacggccgtgccgcaggcgaagtttgccccgccatgcgttgaccgaccgttgaccgcgcctaggacgcgtggctcggctcacttggggcctaagcaaagttaaggtcccaaagccgaaaactctgcccgaatcgttacacgcattccattgattactgagtgagttctggataatggtttaagtttcataatcatattctcatgcatccttgattgattttgtgagttatatgaatcatgtgaatggttacattggattgcatatgtgatctttagattcttctgctattgtttatggttgagaggttgtgttgaggtattgatgattctatgagtgatttaacaatatgtttcataatatcttaaactttggggtcttggtacgtggtgcttgtggtaggaggcaaacaccataagcgtgccaagattgtgatatgtctgaccttcttagtgaactgtgctatcgtggggtcttgtaacgatgtcacttgatcgccatgaagtgcgaaaaactcggagacacggggctagctaccctggccgagtgtctacaagacggtgtagcattttgttgtgatgctcggttgcatacctttggagtgtgtgtgtttggtgttgggtttgaaggcagcatatcgggccctttaaaacttaataaaactagagtcttaatgcatttgcatgttttgtagttgcttcgacaagctacctttcgttgccattctctgttgcgtgttttgggatggggaactaatatctgtttcaggtagacccaactcactgagtaatgttagattactcatgattctacttgtcttacaggaaaccttagtgggaaccattagagggatgcttaggacgtaggaaagccggtatagagttttgttgctttttgtaaaacttaatagtttttggttcttgattggatttgagcatatatgctcgaggcaccattgttaaaacgttttggttacttggttctacgagaaattatatgttataaaatattattttcatacaaagagtgtgtttcatgcaatattagccttgtctggactgatataactcacgatcatggcaagggctgaaaagcctaaaccgcgttcgtgagggatggttcatgtcggtaatccggctaagggtctaaatttgtttggaacctaagttgggttgtctgtatgagctatcattgtagcgttttcgggttgcccttggcttgtccggccatagagcgaggggggcgttataggcagcccccacggcgaaccttgaagggcccaagagaggcgaggcaaccgcgaggtggatgatgacgagccagaagctgctcgagggagaatcttcacgattttgggagattcagctttttgtcaagacacaacggattcaatcaaagcttatcagaggaaggccggttcaaactgtaactggacgcggttatttaacggaccagacgacgaagtcactttccatgagagcgatactaacggcctgtatcggccgcacaatgatcccttggtcattacaatgactatcagagatttcaatgtcgagcaaattttagtcgatacagggagcacgctggacatcatttttctgacgaccgtgcgagaaatgaagatcgatatggcgcaagtcgtaccgactccacgacctgtgctcggattctcttgagagaccaccatgacccccagcaccatcaaattaccagtccgagccaaaggaataacgaaaatcgtcgatttctccgttactgaccagccaaccgtttataacgcaattatcagaacgccatggctaaatcaaattcgagccgtcgcctcaacttatcatctctgcctgaactttcccacaagcaacgtcgtgaagaccatttggagaaatcagaaaaatgcccgaattcgcttcatggcagcacacaaacttagaaaccccgtcaccgaatcaacagccgacgcaaatcacaagaaggctaagttgggacgagccgaagaaaaagcaatctccgagcagttatagcaactaatgatccgggaatcaacgagaccagtttctgacccagtaatatacgtttgtcttgatgaggagaacctcgaacgatgcgtggaaattggcggagatttgggcgaagaggtgacgaccgagctaacttctttcctcagggaaaacgtcaacaccttcgcctggtcctcggaaaacttgcctggagtaagcgtcaaaatcgtagagcacgagctcaacgtcgacctaatgtttaaacctgttaagcagaagaggagaaagttatgtcgggggctgtgaaagccgaagtagagaaactgtttaggatcggctccatcaccgaggcaaaatatcctaactggctcgcaaatccggtcgtagttaaaaagaaaaacggcaagtgaagagtctgcgtcgacttcaccgaactgaacaaagcctgcccgaaggacagtttcccactgccgcatatcgatcgcctcgtggaatcaacctctgggaacaaactgatatcgttcatggatgcttttgctggatacaaccaaatcatgatgaaccccgaggaccaagagaaaactgcattctacacagagcaaggtattttttgttaccgagtgatgccattcagacgtaaaaaacgctggggcaacttattagcggttcgtcaacaaaatctttgcgttatagatcgggaaaacgatggaagtgtatatcgatgatatgttggaaaaatctatagaagaggaggaacacatagcccatctgcgcgagtatttctggtagcttaacctctataacatcaagcttaatccagccaagtgccgcttcggagtgagatccggtgagttctgggatatctagtcacgcgatcggcatttggatcacgtagatcatgcctgatgatcggggattttaattgatcggaccaagcgcatgatcgagagtgcttttgttgtgtaagcagctagttagaannnnnnnnnnnnnnnnnnnntgggcagataggtattattttagataagagcaaaatcggatagagatgagatttggataagtatggttgtggataggaacgagaacatatagggacgaaagtggatagggacgtgagtggatagggacgaggtacggataagaacgagtgtggataagtatgaattttggataagtatggaagcggataaggatcgacttgtggataagtcgttcatgtctatccgtccatatagataag

SEQ ID NO: 18969 - DNA, 561 bp, Arabidopsis thaliana landsberg
taaagtcttcaccaccgttgagcttgccacttattgtacatctctcggctttcaaaacatgacacaagtaatggttagtttttatctcatgttccagctttgaatgtcatgaagatatagagattgttttgagttgttaaaatacctgaagcggatgcgtttgagatcatttcctccagtgggaagagaagcgaatgtgatatgactattttccagaattatgaaagtcaacttcaccatctctaaaatcacctgcaatacaatccttacgtgtatcgatgacgtggcactcgataactctattagaaaacataagaatttgtgcaaaaaaaccttcaatgtaattttttttttgcaagataaacctccatgtcaaataaatatagcataggtcaaaccacaatctgaaaaatctcctacaacatagctcttccgtgtatcgatgacgtgacagtcggtaactcatttagagattgtataagtctatcgaatatattactttattgcatataatttaattgagttattgcattaagttctaaataaactgtaagagaagcg

SEQ ID NO: 18970 - DNA, 1899 bp, Arabidopsis thaliana landsberg
  unsure (1)..(1899): unsure at all n locations
tactcttgatgactttgagaaatatgctctgcattttaaagactcgtactttgaaatgaaagattctggtggagatatagtaaaatggacaccgtctgtggatgatatagaaggggaatactggcggatagttgagcaaccaacagatgaagtggaggtttactatggagctgacttggagaatggggtgcttggaagcgggttttataaaagagccgagaagtttaccggtagcgatatggagcagtacacattatctggctggaacttgaataacttaccacggcttcctggctctgtactctcttttgaagattgtgacatatccggagttctagttccatggctatatgtgggaatgtgtttttcatcattttgttgggtaagtacactttcactctttgattttattataaacattttttctctaatggttggatgtttgatgtgatatttctttgtcttgaacagcatgtggaggaccatcatttatattcacttaactatcatcactttggggagccaaaagtatggtatggtgttccagaaagcaatgcaaccgctctcgagaaggcgatgaggaaacatttacctgacttgttcgaagaacagcctgatctactacatggcctggttactcagttttctccttcaatactgaaagatgagggagtccaggcttcccggagaagtgcagaattcaggggagtatgtattgacattcccgagggcgtatcatgctggattcaactgcggtttcaactgcgcagaagcggttaatgtggctccggttgattggttggctcatggacagaacgctgtggaactatatagtaaagagacaaggaagacttctctgtctcacgacaagcttcttcttggagcagcttatgaagcggtgaaggctctttgggaactctcagcttctgagggaaaggaaaatacaacaaatttgagatggaagagtttctgtgggaagaacgggacacttaccaacgcgatacaagtaacgaaaaacagatactacttgagtcatgatactgaatatagttttcactttctaatgcttactttggttcatttgttttgaaaatgttgacaggctcggttacaaatggaagaggggagaattacagctcttggtagggattcttcaagcttgaagaagatggagaaggactttgattcaaactgtgaaagggaatgtttctcatgcttttatgatttgcatctctcggcttctggctgcaagtgctctcccgaagaatacgcgtgccttaaacatgcagatgatctttgttcatgtgatgtgaaagatggatttattcttctccggtacacaatggatgagttaagctcgttggtcagagcattggaaggggaatcagatgatttaaagatatgggcttccaaggttttaggcattgaacatagtgatgaagatcagacaaagactagttcagttatcagtgaggagaagaagttaaaggaaggttcttttgatctgaacattgacttagagatggattatcaagaagacgttaaagaagaagccagcactagtggcggcgagttaaccgcctcagagaaccttggtgtatcggtcgagcctataaacctcgggttcttgatttttggaaagctttggtgcaataagtatgctatattcccaaaaggtactatctttgaaatgctcttttgttaatgttacttgatcaaatttgctgaaatggttgttgatgtttgttttacaactttaacaggattcaggagtcgcgtcaagttctacaatgttcttgatccaacaagaatgagcaattacatctctgagggttttggatgcaggactcatgggtccattngtcagggttactctggaagaatctccagacgagagct

SEQ ID NO: 18971 - DNA, 1613 bp, Arabidopsis thaliana landsberg
agtttaccattattttttctggaatattttcaatatctattgcttcacattttgattctgtttctgtatgtgggtttctcaattagggtttagccaaaaccagttctttgcgtactctcaaattaaacactttagcttcatatgtaatgtggtgttctaaatctattgttgctcatttacagagtataatgagaagattttatttgctctgtttttgttttttagggtctctgctttaggttctcatactatggagatgatgtcaagaaatggttggaggatagtaacctggcttcttactccaattttgtatcaacccaatcggtgagttgatgtgcctaagattgggtgtagggaatgaagcaattggtccgtgcttgtaggatagatgtataaaaaaagtttgatgtctatcttctcttccgtttggaaattatttgggttcttgaactataatcatttctgattctaattcaaagttttttcgatagatttattgaatcatacacatcaatcttattattaagtttctgcactacaaagaattttactctgcattcatcatacatcctgagagagtcagagtagggtcttagtgttagaaatcacgacaatgagatatcctacaacaaccacataatcaaattgaaagctatacatgtgatctcgcgttgttttgacatatgagtcatggaaggaatgcgcttgtgctgtctctaggtggatcatgaccttgtgagacttcttgtgaatgagccttaccttggcaaagccaagacgatgggaataccttctttcttgattcaggatttgacgccttcctttcaccgacggcacccgagaaactcctgagttcgttaagccgcttcatcttctccttgttctgtttcttcttttggaagaagaggaagaatgaagccaacactttggtcccttgcttcccagatgatgatgatgatgatgaagaagaagctttccgaagtttcaaatgccggtaatggtgtctgggacagctcctggtgattctgatcaggaggttcttacaacgccgcataatcttctgattaaatgtaactagtgatgctgtggctctcatctcgtgttattaaaaccgaaagcaagttctgagagaaaaattagagagacaaaaacaggatctgtgttgctctgtgccttaggtgggttctcttttgtagccataatgttgaaaatttggtaggtgggtttcacgtttttctctcttaacataagtttgtggtaagccatgattgtgctcttccctctactagtctatactgacaaagtcctcttactaaaagtgttcttaaactaaaatttgaaaggtcacacaaaaagggatattctgtttttagtaatacaaaagggcaaatttcaaattttgtttaatttgtcgtcgttggtctaatgcagtgattctgatttcaaaccatagcctaaaatggtgcgacctgctcaattgttaatgctgtcggtgacaacagatttgagttgaccggagtaattaatcacagtaaataagtgaagggcggaaataatcttatgttattgttcattgtataatcaatctaattgtggaaatgtgattaaaaatg

SEQ ID NO: 18972 - DNA, 1225 bp, Arabidopsis thaliana landsberg
gatgttttcgaaaataaaacttgatgatggatccatcaaggccttgatgggttcaacatcgaaaaagatgtacctctgcgaggtaccaaactttgggttgaaatgattaagctgagaccgggcaggtgacttgcacgagaagagagtctcggtgtagtgtctccgtctgagtcgattaaggaccgtctcgatgtaggtttgctgaccgaggaccctttaactggtcacatgcctcgtcatgggtaatctttgcctcgggcagactaaggccagaataagataacacgcaatgggagtggagcgatggcgagagtagcgtgtaccctccgtggcaagaggctggacggtggtgtatctgtgctctcggttcacgtgaacctgatctggtcttaagaacccggtgacgggttgacatatgcaagggttaagtgctacatatgtcgtgtgattgcagatcctcaactgagtataattgattcggatcgccgtaacttcgcggacatgaagacttggtcactgccctacacgtagcaatacagtaaagatgaagggttgttaagaaattggctagtgcaggtcaagtgattgaactagggtagagaaaccctagatgcaggtaaccttacttaccctgccaattaaaaattagatttttagggatccactattagtaagcatttctgcaaacagagtctttgattattgataagccataccttgactcccaaaggctagcatatccttgagagtcttttattttgatgggtaagacttgcgaaagtacactccgtactcagggttttcgaacccatgttgttgtaggtaaggaagcaacaattttttgttgcttttgttccaaggtggtgcctaaagaagaaagccaagactgaagcctcgagaggaagtgtcctcctttaaaaacttttactgtttatcgggagggggttttgcctcccaagttatgtgataatattactccagcactcttatatttctactggtctgtaataatactactctttccatactttaatataaaataaagttattgtaactacttccgcatactcgtacttcggtgtgttgtaatatctgcgtgacgggtaaaacgctcttgggcaaggtaaagaatatagataccgaacttgtcaagtgatcaggtgcacctacagggttgtctgaggtccgttggacaaggacaactgtaggtgggcctaatgacttg

SEQ ID NO: 18973 - DNA, 619 bp, Arabidopsis thaliana landsberg
tgaccaagtggcttattaagtaactataaaataaaaataaaaaaataagctttgattggtgactttcaatgtttctatatagtttgagggtatagctattatatgctaaaattgaaattctaaagcagtgcttattttaattgtagataaaacaatatctcatttgaaagtttgaaacagaggcattgcgagttatgtaagaatataccttttcataatttatttatttcatatactattaaaaacacactaaaaacatactagtgagactattatcaaaacactgtatttttcatatttgcatcaaaataaattgatgtattaggaaataaagcagttccttttatttaatactgtttttaatacattacaacaaaaaacggcattatcaaatggaaattgatattactgtggtacacaaatatacaagagatacaacgtgtttacacattcgatgaaacctgaggaactggtatatagccgttagactttaaaccgttagcgccgtttaatttctccaaagagatttcatcgctagatgttactaatgccttcaaataagcattcgtgattctttgaaattttgacaaatgaaaacacattaagtttgagatatttt

SEQ ID NO: 18974 - DNA, 1240 bp, Arabidopsis thaliana landsberg
tcatccatacttttcttcccctcactttcccagcaaacgaagcggtgatcaacaaggttaatctttgcttgtttgcgacgaagatggtatctgtaaactccctgtagtccctctcttttggtgcaacaataaagaaagtgattctcgcgaattccagtgcggtggatgcagagattcaatgctcagcgctagctattatgcatgtcttcaatgtgaaaaaaaattccacaaagaatgtgtagagtctcctcttgaaatcaaacacccaacccacctttttcattctcttcgactttactatcatccagcgcctgagttttgcatttgttgtaaaacagaagtcttcatgattttctatcattgtcttacctgcaatttgagtatgcatccagtctgtgcaatgaggaaagtacccttttttattgaccatccaaaaagccatccccaccctctcacttttttccctacacaagcttcgttagtttgccatttttgcgctttgattaagaagcttgatcccacatacatttgtaccaaatgtgtcttcgtaatccataaaggctgtatcggtttcccacatgtcataagaatatcccgtcacacccaccgtatctcttttacttcttctcttccatgtggaaagctttcttgtggagtatgtcatcagcaagtggacaacgattatggtgcatattcttgcaagaaatgtgatgcttattttgttcattcaaaatgtgcattacagagacatgtgtgggatggaaaagatctcgagggagtacctgaagagcctgaaataattctcgagccatttgagacgatagctgatggaataatactccatttttctcatggccatcatctaacactcgagatcagtagagtttacgacgaaaacaagttttgtcaagcgtgcatccttcccatctatgagggtaactattattcatgtatggatgactgtgacttcatcctccacgaagcatgtgcaaatgcttctcgcaagaaacatcatgccttgcacggtcacccacttacgctaaaaattgtccctggcgaacaagaatactataaagattacttccagtgttctgcttgttatcgtcaaagttgtggctacgtctatgaagctggatattacagaatagacttacggtgtgcctcagtttctgaaccctttcaatatcaaggtcatgagcatcctttatgtctagctttagatagacaacaaggacttctt

SEQ ID NO: 18975 - DNA, 1114 bp, Arabidopsis thaliana landsberg
gatgcatttttaaaagataaacattataccctaatagacataacataagaaacccatacgattaatttaaatgcatagtgaaaaataattaatataccctaaatgatacaatatatggaacccaaacagtatataatcttgtttaattacaacatatgaatattattttcatatatcattcgtaaaatcccttttttttaaactcaaactgatatataatatcgattaattacaaaatctaaaccctattcctattttgtgaactaaaccaaaatcgacatttaaactcgttttgttcaaaccaaaatgtttgttccgatgaattcaaataatcaatgaaatacttttgatagaaagatactaaaccgtaaggggataatatatagggaacccaagggttttaatctaaaacaatgatcaaatcacttaatatctttaatcaaaacaaacaattcattttaaaacgcatatagtacaaggtatacgtaaatagtatattcacaaaatataatagtatcgctcaaaaatatctcaaaatcaaaatcgatttattggttcccgatatagttctgatatctcactccaacatttatggattggcatttcgtcgccacacttcatctatccgaatccaaattagacaagaagtaacatccagttgttaaataaggaacccaataaaaacaacaaacgaaaatctcaacgaaatcggattaaaaaaatataatcatgtctctataaattaaaaccccaacgaaatcagagtaaaaaaatatgatcatgtctctgtaaattaaaaccccaacggaatcagagtgagtcctacacgacgtgtcggcaatttactcgactatctctcctcgagactttacacggtctgccacaaaaaaaaaaagtcaaaagcttaagattttgtgacattagcttttctggacaaaaactccaattcatatttttatagctacaaagagaagaagatgagttaagcaatatgaggaagaagagcgtgtacttcacaccaaggccaaacctgtctttattacataaaatatagataatatcttcttccttttttgatgtgtagtttcttaatttataatttttttgttataga

SEQ ID NO: 18976 - DNA, 668 bp, Arabidopsis thaliana landsberg
ccgaccttggcgttcttgtaatgatacagttcttgatttttgtgttctggccaacccctaccggaactttcccttccgccaaaagagacgcgatctcagcttcagtttggtagaaatcagctcccatcatcattgtatcctgaagctctactccagactcgagacgtgatcgtatgccaacgattgagtgctgcacactgcattctctcatgaagcatccatgtgaaactatggaatcaagtatctgcaattccataatacactttacaacatgaggatcgatgaatcattagctgaaacaacgggataatcgaattcaagatattgtaccctgcatttatcaactttggtaggtggcaagaatcttggagaagtgaaaaagggtgttttttgatcgtagaattggaatttaggaggctgccaaaacagaaacaaatagcatgattaggtttcactgagtcaccaccctgcactggagatgaaacaataaagaagcggtgaaaacctgttccgtggaggctaaattggcatcaagaatgaacctatggttccaatatccttccaatagtcattgaacaaaaatgcctatgtagccacagtttattaataaaggtcaaggaaacacaatattggttgatgatgtgtatgctaacaaaaatgaggaaaac

SEQ ID NO: 18977 - DNA, 1669 bp, Arabidopsis thaliana landsberg
ctttcagtttaattttctttccatagttttttctataagtctaaatcccaattaatacataagaaaaataacaaattactttagatttttcgtttctctttgagttcttcaatcaaagtaatgaaagaagtagtttatgttctgctacttgttcttcttgtttcggtttcagatgcaaatgaaacgaaaccaaatattgaaaacttcctccgatgccttcgtaatcggaccaatccgaagaatccgatcgccgaagccatctatactcatgagaactccaccttcgcgtcttcttacgtgtcctacacgaataacaaacggtgtttaaaccctaacgacacaaaactaatcgccattgttgctgcaaaacatgaatctcatgttcaagcaactgtggtttgcgcaaagtcaaacggaatccagatccgtatccgaagcggcggtcacgactacgagggactttctttcacctcctccgttccgtttgttatccttgacatgcacgatctccggtctataaccattgacgtgttcagaaagcaagcttgggttgatgctggtgcgaccatgggagagctctacaccaagatcgcagcggctagcaaaaccctagcatttgcgggtggcgtttgccctacattaggagctggaggacacatcagtggcggaggatacggaaatctgataagaaagtacggaatctcggtcgatcatgtggttgatgctcgaatagttgatgtcaacggcaatatcttgacaggagctaccttgggacgtgatctattgtgggctattcgaggcggtgggggcgctagctttggcgttatcctctcgtggaaaatcaacctcgtcgatgttccaaagaccgtgactgtttttaaggttaacaaaacattggagcaaggagttactgatgttctctacaaatggcagcttgtgtcgagcaaattgccaaaagaccttttcttgagagcaatgcctaaacttttaaactggtgtggtacctagcgagaaaaccatcgcggttgtgttctacgctcagtttttaggctcagcaaggaggctcatggcaattatgaacaagaatttgcctgaattagggctaaaacgtgaagattgctacgaaatgagctggattaatacgacaacgttttggcagaactatcctgtgggaacatcgacaagcgttttattggatagaccatcgggtcccgcaggagcattctacaagagtaaatcggattacgtcaagaaaccgatcccaaaggaagaaatggagaagatctggaaagcaatgttgaagttcaacaatatgtggatgcaatggaacccttacggtggagtgatggacaagattcctgctgatgccaccgcgtttcctcatcgaaaaggaaacttgttcaagattcagtactttgcgttatggacagacgcaaacgccacagacgctaatcttggtctaatgagagatatataccatgagatggagccgtacgtgtcaagtaaccctagagaggcgttcttgaattacagagatatcgatgtcggaagcaatccgagtggtgagaccaatcttgaagaagctaagatctatggatcgaagtatttcttggggaattttaagagattgatggaagttaaagcaaagtatgatcctgagaatttttta

SEQ ID NO: 18978 - DNA, 1537 bp, Arabidopsis thaliana landsberg
ctctcctgtgtggtggtgctttttgacttttttttatttatgtaaaatgcttgaaacatgagcggggggggttatctaggatgggaatgctggagaggaattcagtagagaagccgttgagcgtgatgataggcgtttaactgagttgggtagacggactgtggagatatttgttcttgcacatatcttcaggtaataaggcataatttttcctctttgtttttttatttggtgcaccaggcataattttgcctttgctttaaaatttccatacaagtcaatcataagcacataatttgtttacaagctaagacatgcgtgacgatcttattctgaaaccgctgatagtgtttattttgtatttctggtcttctggtattgtgtgtctttgtgttcttagctgtacctcatgtatagcactgcaatctttctgagaaatgcagcaacaaaattgaagttgcataccaagaagctattgcatggaaaaggcaagaagaacttattcgtgaagaagaggaagcgtggctggcagaaagcgaacagaagggcaaaagaggagcatctgaaaaagagaagaaatctaagaagaaacaggtccgtccttacacttctgttacttccaaaatagataatgccattaacgactagttggggtgctaatggagattcttattgttttggaactcataggcgaaacagaaaaagaacaaaaacaaaggaaaggaaaaaaggaaagaagacaaggtgagaacccaaacagaagaaagggaaattgagaaagaggaatgtgtgagagcgatagcagaatcgtcagctgaaaaacctgacacttttggagatgtctctgacgtgtctgattcagtagatagttcagctgaaattcttcagcttgattcagaagatagagagaatagtcctgttcattgggaaatggatgcctcagaggttcatcctccttctgcaggagacactagcagaggaagaggcaattctttttctatacctaatggagttgcagaaagaaagggtctgtccacaatggatgatagttcttccccctgttctaatgactcgattcaatcaggggtagccaatgggtcatacaaagggaatgtattaaattgccaaagccaaaagtggtttagcaagtaagtaaactttttttgaactttccttaaagttatttgtttgttccacatccggataacataccttgtgatgtgcagtggaaaaatacaaccaggaaaagtatctgattccaacagtttagccagtgaaaaagagcatcaaccttcaagacttgcatctgaccctaaaaatcagagccattcttctgatatacgcagagttggtgaagctgacatagttatctcccacattcaaaaaccagagagccctaaggaacgtagtcctgttagcaaggtggtttactctttccttttgcagttgcaatgttggaacttggaaaatatatatgtaaaagagggaagctaaattccaaagaattcgtgttggtttacctttcaaaacattttag

SEQ ID NO: 18979 - DNA, 409 bp, Arabidopsis thaliana landsberg
cgaacatatcaaatcaatgtttaaaagaccattatctcgtggggcgtattcgggatatgatcatacattggaagttaagtaagatcttaagtaatatatatatatatatatataaaatatgagtttttccacttattgtcaattggttttgagttggaagcctatagtttaataaatgtttgtctgtcaatgtagcaatgttgaaaatgtgatagggtagttaaaaaaataaagaaagagagaaccaacgtggtgttggcccaataataaatctcttaggtgaaggtgctgggttcggcgcacgtttagggccttcacacttaaacttcaagatattaaaaaaatatatatatatcatttacaagtttagatggagttcaatcttgcataagaaaatattgtagagtgt

SEQ ID NO: 18980 - DNA, 1642 bp, Arabidopsis thaliana landsberg
attcttgatggattgaaatatctccacgataaaggtcttatacacaggtttgactagaaaaatctctttttttatagcagttcatgtatttcacaagcatctgatttcctgggtcgtttacttttttttcatctgatgtgaaaaaggaacattaaatgtgcaaatgtattggtggacgctaatggaacagttaaacttgcagattttggattggctaaggttcttttccattaataatagatgtttatagtattttcaagtactaacctggtacatcgcttattccccttacttgatacctgtggcattttgttataggtaatgtccctctggcgaactccgtattggaattggatggctccagaggttattgttttaaaatccttcccgctgttttaatttgtcaatacaatgatagacaaacatatcatacatcaaaagaaatgttgtatcttaaactgttacttaaatatgttcccgcatatattgtgatccaggcttgataagctcgaaaatccccggttatgtttccttcaggtctttgattaatctgaaactagtttgaaattatttctattttagtttatagttcttattataactgtgagtatgtaattagtgatcataggtaacagacgcggatgtatatcattttgattgtactttaggctatacttgtacaactgtgtttctaaactgaacataataatttgatcaggttattcttaacccgaaggattatgatggttatggaactccagctgatatatggagccttgggtgtactgtgctagaaatgttgactggtcagattccctactccgatctggaaatcgtaagccttcaagattctcaaactttctttatatgaaagtaagcaaattcccacaattatcaccaactatttagctgtaaaagtaaatgaacaaagcatttggcacagtttaaatttgtacttctcaacaagtgattttgttttgcaccttcaattgttttgaacttttattttatttttatgggattttgaagtaataattaaaggtcataatttgtgtaaacgtgcagggtacagccttgtataacattggaacgggtaagcttccgaaaatacctgatattctatcgctagacgcccgggatttcatacttacgtgtctcaaagtgaacccggaagagcggccaactgcagctgagctgcttaaccatccatttgtgaataggcccttaccatcttcgggctcaggttcagtatcttcgctcctctgtcgatgaggctaatttttgaagattgccttggataggtgaaactttgggctttgttgtcatgagaatatattagaatcaaaagttgtatattctaacatatgccctaatatgctttgcactaaaatcgtttgaatctttgttccatacttcacgttgacaaatcacaaattttttatgtccttttgtttctgtttttttgcagaagccaacaaagttgtccatctctttcttgctctttccaataaagtgaaaataatatttcttccaaacttaatctgaaaagtctagactaattaagtgtagatgatatatgttatatgtgtaattaagggataataattgtcttttgtatatacctagagtctcctcatgtatt

SEQ ID NO: 18981 - DNA, 351 bp, Arabidopsis thaliana landsberg
ccaccaaaaggaaacgaacatcattaagaattagtcagatgaatcatttggatggaaatctaaatgagcaaacgaacaggatttacaaggtacaaacaacaacaaagattgaattaaatttggtgtatcctatcaattctacatatttacttatgtaagaatagaagcaaataaaccactgttccaatattggttctgttagtcaactaacagatgaaatgacagacaacctaaagtaataactaaacaccatgagctagtgaatgaaaaaaataaatacataaaaaatgatgcgagaagatttgactagaaaaaaagaagctttaaaataggaaataaacttttaaactc

SEQ ID NO: 18982 - DNA, 659 bp, Arabidopsis thaliana landsberg
agacacaaaacaacagttttggaaatataactccatataaatatactttattaatgtatcgcatgtatagattcttggtagcaaatctgaaatcaacggtgacatgagaaatggtcgccttgaatcccctatgttttaaagacttatttctactttgagtatgactgaatacaaaaccggtttcaatcttgaattgtgttttctatacggcgtcaaaagttgtaggatccatctactgttagcagatgggggaaatatatgatgtttcttgatagcaagaaggtaacggatgtcttgtattttgcaggctcttcaggcttcaggagacatctggatgtcttatcaaattcacgagaggtcattgcgtacccaaatgatttaaagagtgagaatcctattccgttttggattattttaattgatgtcaaggattcaaggaaataattagatgagaacctttacatagaaatctcttcatctcatttagaagttacaaatccgtccacatttttttctaccatcccaccggccatttttgtttgttgatagaaattgttttaatcgtcttcaacctatacattatgtacaatagtaaactcaaaaacctcataaattacgaccttaaattatatactttttttgtatcataatctttgaaa

SEQ ID NO: 18983 - DNA, 1683 bp, Arabidopsis thaliana landsberg
atcaggttctaaaagcagtcctcgacactttacgtgcaattaacatttgctacgacaatgaagatggatttacccgactcaatggtaatctgaagaactacatcacgtctatgtacgttgatctttgaggaatttacctaaaggaaaaaaaaagagagagagggaacacttgtttcccatatctatgagcagtctttgaaagttcaacgaatttgtagttggtttttttttttctttttttttttgttgacagatattctaaaaactggatattttatccacacgttatcgttctatgagtttggtatcagtggtttgtaatcagttcctaccttgcccatgtctccaaaaacaatgattattagatgtagagaaagatggtaaagtttgttatttctcattaaaggataaaaatgatttacagtttatatactaaataagattacaaatattaaactatattgtatatgtatatgaactatacactatactctaatacccttcactcaattcgaattattcaagaaggaagaaaaatacttgaaaaaacatatcgagacatgagcatcttgaactttttggaaggaagagccttattaaacaagtcaactagctggttatcagtagtgacatgcatcaggttcagaaatccagttcgtaatcaatctcgaactatgtggcagtcaatctcaatatgcttgttcataaaagattgaatttgaagcaatctgaattgcagctgtgctgtcaaaaaacagattagtaggaccaataaccttaacatgaagatctctcaaaagttgactggtccaaagtaattcacaagttgtatctgccaatgctatgtactccgactcaacattattgcaaggagctgtttgttgtttccgtgatttccatgaaatcaaagaagtaccaaaaaaaaacacagaaacctttaacaaagcgccttgtatcctgacaagttccccaatctgcatctgagaaaacatgtaatcgaatttcagagttagtataataaaagagaccacgactcggatctcctttcaggtatctgactctacaatgagcatcatcaagatgatgaattcttggttgagaaagaaattgactcagtgtgtgcactgcatatgtaatgtctgtcgtggtgatggtaagatataaaagcttgccaatgagagctctgtaaacagttgcatttgcatctgataatatatcttcactttctacatgtaacagtatatcagagtccattggtgtagctactggtttggagccagtagacctacactttccaacagatccaaagtgtattttcgttggcaaactaaaattccagtcttgttacgagctatttcaagtccaagaaaatatttcactggaccaaggtttttgagcttaaaagcagtagccatagtagtcttcagacaaggtgtctgtattactgttataaagttgaatggtgggatatagatttaaacaacttttgcaacaagtttaagaagattttttttaagtttcatagctggtgggatatagactaccgtaacaacttatgcaacatgttcgagaagattttttttttaagtttcatatctggccaaatatgtggagacaacatataaacatccaacatactcggaataatctgacgtttggtagacacttcgggagatgggaact

SEQ ID NO: 18984 - DNA, 758 bp, Arabidopsis thaliana landsberg
aataaaaaaaacaacgatgccatgaaatactcagaaaattacactagctaatgaatggatagatcatacttacgttttgattcttgattttgattttaattttcctctgtttgggtggatgccataattgagagaatagggttacaatatattgattagggttttctaataagaataagatatatagggtttgggtgaaagacataattattttaattaattaaaaaataataaaaaaatttaacctaaccgctaccgcccgcaaccgcaaacgcttgcgggaatgagcttttgaaatctgacgatttctagcggtccaaagcggtatctagcggtttctatgattggtgccaatcgctaacaaccgctaccacccgcaaacgctgcgtttgcgggtggcagagggagaactaatcaagccctaactatatgttagattaacttgtcggaaacatgttggaaaatacgtgtaattacttaaatatccacaaaaatctttctctctgctattttcttaatttatatattttatttggctattcaataatattacctatctattaaatcaaaaataaaactaaattataatttatatagtaaatgtttccaaattgttttttataattactttagagcatatattattgaagtaagcatttggaaactctattctttcaccaacagtggtggattagtatggattggtccccaaaatattaatacaaaaatgattgaatctttattgtgtagtgaaccac

SEQ ID NO: 18985 - DNA, 3006 bp, Arabidopsis thaliana landsberg
cagctagcttgtcaaaactcttgtcccctgaacgaagagcatttattgtctcactccagctcggaaaaactcggtgctctaagaactcagatgccttgcctaacaagttattagagctttgttcttcattcatccctaagtaatacgcgatgcagagaacagagacgatggtatcagatgtaaacttgaattcagagccattacagaatctagcgacgagctcaaaggtttctggatcgacttctaaatctcgtaggatcaaacgcagctcatcgatctcgtttcgctcgagtaatgagctcactttggacgatctctttgctaacatttcctacaaaaacaaacacagagaaattaagaaacgaaagtgtcgagtcttttcaacgaatttatggagaatcgagtgaaacttactttgcaaagatgaaatggaacacccttaacgttgatatgaagatctgatacatatgatgctgacattgaatttcttcaagcaatgaatatataattagagatatcatggattacatcgtaatgatgaatactactttaaaataaaagagattaagaaatcttaccgattctcattgctgttcttcttatctgaatctgacattttttgtaagagtttttgatcatctgaaggatagtagaattgtgagttgctctgtatcttaatctccaagaaacagagtactcagtctcatgtgttctgcaacaatggatgaaaacagagaaccaaaggcaaacaaaaccaaatttcagaaacaaaaatctatcttaaaaatcaaatcggtaaaacttgaaattaaaaacaaaaacaaaaaagcttatcaagaaaagtatggctcttccagggatataggattaagttgagatatagcaggattctccgggggaaaagtattagttagtttctatattacagtgaaattaagcaaacttgaaataatttttactaatttcttaataaggaactgtacgcaaaagactctaatcacatcattaactgaattaattttcacacaaaatcagaacctttgtagtttgtacaaagaaaagtgtgattgtctataacactagtacaataattccaaattcaaacattcaaaaaaaaagaaaaaaaaaagagagagtccaaattcaaagactcgtaatagagtgatgagaaacactacgatttcttaagaagtaagaactcatgatacatgtgttgttgactggttttgagtgtgaccagagacatcaccagtacctaaagacacaaatccattcaggactaaattgtttcaagaccagaaaaagatgtgaagaaacaaactacaggaaatcatttacctctgtcaagaagtatctttgaaccttcgtaagagaataaccgaacagcattttgataacttagttccgcgagttcttcattcttcatatccaacaactgcgctacatattcgagtacctgtaaccgtgattgattagggccataaatttaggaagatggtttaagcagccacaaagcaacaacatacgatatgaatattagccgggtgattaagtgtttcctttgataacttcatcgagtcactagacacattaggcttatcatatgaagcagaatcaagatcctgagctgaatttccttcttcgggtagagaaggatctccgtctacaaagtagagacaacctgactctgcctttggtagtgcatctggtgaatccgtctccaataagatcctatcagatggaacctaccaagaactgatatcaatgttccattctacctaaagctgtaatttggtgtacaaaaatttgaaaatcttactgctttcaacatcttcttggcttttttctcactcatggacataaggaaaccggagaaggagaaatatgcaccgagcttagcaaattcaggaaccatctcagcagaacccaaatacgagtgaagcatgaccccagaaggaaaaggccctacagatctgcatattacaataacacatcataagaacacattgacataattgtagcaacacatgaggaatataaagccgaagatcatactttaatatctcgagtagatccccaaatgcacgaacacaatgaactgacgcaggtttcttcaattcctttgcaagttcaagctgttgacgaaagacggtaacctgaaattaaaaatgatgtctttagcatcaaaagccatcactgagaacataaaccatttaaccacaaggtctgtttttcaattctgaaacctgttctgagaaatcaatctcccttcccttagaccctttgtccaaaccaatctgatcaaaaaaaacaaagcagtttcaaccatacacatatcaaggagagtttcaatcaaaagaatgtgataaaaagagacaagagataaagatagacttctccaacagcagcagtaggagtggtctcaaagaaactctttaatgtctcaaaccattgaggactcctctctgctacatacctgaactcaaaacatgaacaaaagatcttaaagtttgaaactttaccagtaatttgtaatgttatataatccctaccatggatggatcccaaagcaaggaacaacagaagggtatttagctcccatctctttgaccaaactccaatctttctagaccaaaccaaaccacagattcaattaaaaacgtagctaaactcgtaaatttggaagctatcaatctgacaaaatcgaaacctcggagactccattgacggcgaaagcagagacgccgcaagcaacggcggaggtgattatctgaggagctttggtgataatcctcgggtcttgaaggtgacagtgcgcgtcgaacagtttcatcttcttccaaccgcttcgttatgtattttctgagttcttcttccaaatatttttctctgctgaacaatttagagtaaattgtataatcaccccagaactatatataaatcaaagaaatacccagaaatttttgataggtgcttaatagaccccgccttactattgttaggttg

SEQ ID NO: 18986 - DNA, 791 bp, Arabidopsis thaliana landsberg
cattagtcacaagtaaacacttgagtttagcagcagcgtagagccaatacctgaaaccaaaaatttaaaaaaaccaagatttgagtataaccaaaccaaaccatgtttgtgggagtataaaataagcttaagtcagagtcagtccataccaatcatcattggaacctggtggagtcgcatacaggacatcgttattaatccattcttcccaagattccggtgattcgggttttctaaaagcgcattgacccgtttcttgttcaagagaattagcggctgttttttgctaccacttttattgtaaagttccttcactacagcttcaagctgctctttttcacaatgtttcactgtgtcagtatttgcaggaatatgtattcagaaatgcaaaggaagaaaaatctatgagaacctgtggtagactgaaaccaccatctgcaaaattttgttggtagagcccaatatttgctccatctagtatagcttcgtaatctccatgcttttcaagccactcctgtcaaatagttaagaaaaccgtttttcaagcatcaaacttaatagaactccaccatgaacaataaaaaatacctacattgcatccaagacaatcttaaaaacagaaactacattatagcattttcttttctttcttgatagtgtctgttatatagctaatgatttcacattcagaactatacagaacgcagagaatggttaccgattgatggtcacatttgctaaaaccgattaataatctatgcagagttaaacgaccaatgcaaacaaataca

SEQ ID NO: 18987 - DNA, 487 bp, Arabidopsis thaliana landsberg
acacattctattaactgtttataggatacgttctaactttggtaacaaagccctcattagtcaataaataaagtaaattaaaagcttctgctattcccattaataattatactaatccctaagaaaagcaaagacgacgaagaagaaatcacaagcataaagcatacaattaattaatgctcgaaacagcaacaacactaaacacgatcattcttgctgctcgacatcagaagcagcctcctcttcctcatgatcaattgcacaacaagggacatgaccattcccaaaggccttaacgtggtccttaagtgacctcttgtgcttaaaatccgacccacatgagcaataccatagcttcccacagttcttctagtgagtcctccaatctcctttgaccgcaaatgccttcccacacctacgacaagcaaagggctctacaccgtgcttccgcttgtaatgtgtctgaagcgtacggaaagtcttgagc

SEQ ID NO: 18988 - DNA, 551 bp, Arabidopsis thaliana landsberg
tcgatccattggctgtagaacttgagaccaatcaaaccgatggaatcaattgatgaaatggtaagcttgagataatttcgttaaataaaatcaaatttttttcttatgatatttaagactcttataagcttttggttctaacttttacaaggaacacaatctgattctctttcctttgttctccagttccgatagcatttactgaaagtcaacaaagaaccaagtcattttggtttatagactcaaacaccaaagatagttgcagataccaaatttacagtgctaatatgcattgttaaaaaggcgtaatgaatgataaggttttctgtagataggaattttatgttttttgttgtataataaaatgtatgtttcatacaaaagtatagcgagagagtgtataggtttcttgttgtatgttttgcttccttaaagcgcaaggcatatgaggagatcctcttaaatcatgtttgttttcttcagctatatattttcaaatccaacggttaactaaataacttcgttttgctaatgtctaaaccgaaaccctc

SEQ ID NO: 18989 - DNA, 1593 bp, Arabidopsis thaliana landsberg
gatcgattcttgtggttatctaatatcctttgccgattctctcttgattccattgttacttcacttaggcaggaaaggttataactttgctgatgctagctcacttccatcaactcttttaatctcatcaagacactgtgaaaatcagatgtccagtagtaattagagattatcctcgcgcttaccaggcaccaagaaacttccataacaaaaacaaatgcaaaaaaatgtatacctctcttctagggacgttatttgctctttgacaactgaaagaatgatcgcctcatctgacttcgcctgcgatgaagcttgctttttttcactcactgcaacacacaagggtaatttcagtaagaaaatgactcgggaaaatgaggcgatgtcttcaggatcatatagcttgtttaccaaagaaaaaaatgctttaaagttagaggtgcaaacttaggatgtctcaattagttcatgacttcatgtagacattaacacaggcaaaatgaatttgtacaagacaaaaaacgcttttatcctcaccttctactttttcttgaagcctggattcacctccaagatatgaacgttcatccgtttctaagtttagacgttgacggtctgcaaatttctctagcaagcggccgattaggttatgtgcaaccaagcttgtctcatcagaaatttcttggattgctaggtactggtttttatttcttcttcgtggcttctgctcaccatgatcatcagactttatgttttcaacagaaaacaatgaccgagagctaaactgattatctacttccatctcaatatccctctcaaccttgactcgggttttgctcatagctatgtcatgtctatcactgataactattgatttattggacgtgggagtgacatatagagatctaggatagactcttgtaatactctctggcaggtctcttacaaccaccctattgacagaagagctgaaatcatgctggtttgtttcatgtgtagaatcagtcgggtccaaaaccaagcattctgcaccactttcttcatgatccgaatcagaggactccattgcatcgtcttgagtgtctttgacttcaagctttatgtttcggcatctactctcttctttattacctaatttcttgttatcaaataaattacaattctcatcatcatcatcatcatcatcatcatcatcatcattatcatcactgtcttctagctcctccatataagcatcaccgaagtcctgatcgagttcataatttggaatacattggcaaaatatttgcttcacttgagcactcacatttaatatacactctgtctcctcctcaattgcttcccttggacataccttatgctctacattccccgtcctgctgttgaccaatgaaagagcttccattaaagactttggaatggtgtccagatcactgcactcaaacagatattcaatcaacgtttttctgaccgctgatcttaagctgtcattagaaacttcagcttctgggtctaaacaaagatgcaatcttttcagctcacgaaacctaaccttacgggagtaaccatactgccttcactatctcgttctgc

SEQ ID NO: 18990 - DNA, 456 bp, Arabidopsis thaliana landsberg
ctcttttgtactcttgggagcaaaaccgtgtgaagattcccttacagaagattcttttttactctattcttctcttgttttattcattgatttcttattcaatcatgttttgttcttctatgatcatgcttgagtagttttcttgttaggtttatagtttctcattaggaatttagattatttagtagattgccctgttgctaggttatctgttaggattcttcatctttaattgttcttaatgctaattcttgagtagctaactagaatttgaatcctgacaataggtatgcccaccataggtatctgtagttggatctattatttgatgagcctagtttataggtgtgtaataagaaacggcctatctactaaggtgaacaattgaactcgattagaatacatgtttaggttaaagatctctcggcttctccagttattcttagctataagcat

SEQ ID NO: 18991 - DNA, 377 bp, Arabidopsis thaliana landsberg
cagaatcaagcaatttaagaattaccttttcaaccacatctttcatattgggattcaatctactatgtggttcaatactagcatatgattcattttcaagatggatcctatgagtccataaactaggtgaaattcctttaatatgatctaaagaatacccaattgccctcctatactgtctaagttcattcaacaactggttcacttgttcatcacttagtccatcattaataatgacgggataaatatcatttggaccgaaaaatgcgtacctcagaccttttggaagaggcttaaggtcaacctttggagctttgagttctgaacagtcatctgaactttattctccccttcatggtcgagcatctcagtagagt

SEQ ID NO: 18992 - DNA, 734 bp, Arabidopsis thaliana landsberg
gatatacaaaggatgtatggttcgggttctgctcttccgaccacagtccattatcttgcctttgaagagtgacaaagtaaagccggtgaaagaacagctttccaatgttcatcctgaggttctgttgtttttgtcaaagatcaaacgtctctctatcagagaacattgcctagatcctaagctcagtactgtgaactcaatagggattgttagtgagactaactttgtgacgaggaggagcattgatgcggagtcatacacgatacatctctcagcttctgagaaagggaaaaactctgaacaagaatgctcctactatatgtggaggcaaaagtttccagtgaaacatgagaaccgtgtggacaggagaagcgaagttgaggagtgggtgatcactttagcgtttccattcgaagagcgtcttggccatggaaataactctcctggtatctatgcgtttcttcccacagaaatggtaacaaactttcccttcatcattcaagccgatttcattctagcatcgtctagagaaatgatccttttagatgatatatggaaccaagggattctcaactgtgtacctctagcatttttgaatgcattcacgtctttggtcaaaacgactgatgctccagtgtctagtttgctgcctgcttttaggttcttgccctgtaaagaatctaactatgcaaagctgaatgtggtccgagaatctatcagggcaagggtttgtg

SEQ ID NO: 18993 - DNA, 612 bp, Arabidopsis thaliana landsberg
tcgaaaagatgaaaagatataagacaaagaatatttcctttttcttttttaaaaagaatggcgaaagaatgtcgacataaaatgtacggacctatgtagcacacaagttgactcctctcttagctagagaaaaataatggtaatgaagcttaaacatatcaagtcaaacctttaaatatgtcgatactatgactcattttttacatcttcatatgcttacatctttttatttgattcttaatgttctattacatatattcatttcttgacgcagttatgtatacacatcatctttctggatacagattatcctgtcattttcgtttaatattgttaatttttttgtcaacaaattctataagtatttaatctaacttatttgtctttatactaataaaattaatgtacaaattatcaaattacataataccattttcatattattatgttatagaaaaaaataattaactattttgacttttctaactaaactttgtattgccattagatattaaaatgcaaaatacctatcctaatttagcatatattaaaagggggggtccaaataatttgacatcttacatgaaacctccaaataattttataatgtta

SEQ ID NO: 18994 - DNA, 2084 bp, Arabidopsis thaliana landsberg
  unsure (1)..(2084): unsure at all n locations
gaggtgaagagtaatggaatgaatgagtttgcttctacgagaatcggagaagtttgctacaggttgaccgttaaaaagtccggtaatggcgaaccgagagctggagcttttgcttcgattccttgcggggtttgtccgcatatagcgatttgttcacctgatggtgttatctctcccactacatgtgtttattttcagaaatggttagacttttagcactctctttttttttttttttttgggtttaaaacttaagattttagattatgatgatttgttttttcggttatacaatagagaataatgctattgatatctttaaattaagagtcaaggttgtgatttgaaagagtannnnnnnnnnnnnnnnnnnnnnnnnnnnnnnnnnnnnnnnnnnnnnnnnnnnnccataactgttcctctactcctaatttccttagctctaacaaacctcgttccactgtaaagagaacaagttggggtgttgttaaaactagaattaggacacaggggaaatcaattgaagaagtttattaccgtcaacggcatcttgtgaagtcggagattttccttcactacgactggtccaaaactggaaacgttcatctgcaatgtcttcttccacactatgcaacttggctgtaccccagaagtacataagccatgcctgcatttataaccaaataacgtcggttcatcaagattcatcgcgataaatttagttaccaaccacaatataccaataattaccatctcttgtaacaaaatgtcacagtataaccttatagttatgaaattataggcataaagaaactacctgcttaaaggcaacatcttcttgttccgcttcttttatctctgcatttgagaaatgtgataacatagtaaggatttcatcaagtttgactgctgatatgatatattgtgcatgtttggactctcttctcttaccgtatgattctacaaaactgagttctccatgccctttggaatctgtaagatatggagaaaacagactattgatctcgatgactagtaaaaacagactatatttgacactgtactaattgatgatatagcatacataccttgacgaaccaaactcggtgttctcttctgtgcgaatgcaagcataacagcatcctcaacctaaatttcgttgtgatatgagaacttaattatgtacttgaagataccttaaagtaaagaaacaatggtatattacctttaaggatgccagctctctcaaacccatctcaactgaaagcatactttcgatatttccttctccaggtagatcacttaaaaatctagcagttttgctctgatcactcccacctgatcaattccaaaggctggtaagtaaacagtatcaaggaaaccttggccatagcaaatattaagactagcctttgtcccgagataactccttggtcttttgtgctgcagatatgaccagctcaaatggaagaggagccagagccgaccatttttcatgcctggatggtgctatgtcagcacaaatgcctacataggtaagccacaggaaaaccaaatatctaagaattttaataaataaactacctcaccacaactacaagcctttgacaaaaattagagagctgagtaagtgtatcaatgagaacacgttcacaagatggatgcattacttaccatgctgcactgccaaaccccaataccgggcaagccagcatctcttcaaggctacttcctcctagatgatcattttttttttccatacaatcagaaatctttaaacgtgagtataatgagacttgagctttctaaacataccatttcgtcctgtgttaaaaccattctttgagtcattatacgaagagcctttgcttctgcctctgcttcttgaaggcattccgcagctgttgcagcctcatccttcaagatctgaacataacgaaatgattacataatgcagatcagaataacaaacatattctaataccagaataacagtggacctacctgaatatctgaacggagggaaacaacttcctactttatcccatcttttntctcgttagcagccttaagagcagcctgcc

SEQ ID NO: 18995 - DNA, 756 bp, Arabidopsis thaliana landsberg
aatagaagaaaaaaaaaatcgtgtcggtgaaaacaataatgctcaactaatctgtggaccaaaataaatggtgaaaatctaaatcaaattccaaaccttaaatgagaacaattggtggataaaatgtgggattcatgatagtattgaaagatggtgaaatcggagacaagatctagacataacagagaatttatgatgaataaaaattaggggacaaaatcaattaaaagttatatgtaaagaatatgtgcacgttgtaaggagaagtgagagagacaaaaacgtttcattttgtcttcggaaagatagttatgtgtggttaaagcgcacatatctcgagaaaggagagataaaatagagaagaaattgtgagggcaatatagacattttaagtggaaatgtggtatgatgtgtaagggaggaaaaattatggtagattgcataagaaattgagaaaatatggtaaattttataatttttccgaatatttatagtttttagtttgttgggcattgaagatatataattagcccattttaattgtgtatttaatgtagacacaaattatttaatgccaagaaaattgtaataaatacataagtcaataattttatggtcaaaatgttttcaaaaatctatatatacatttttacaacacttttatgaaataaatctttaaattggaacttatttacaaggaaatacccattgacaattaagttatttatcaaaattaattaaatccttttctaaatt

SEQ ID NO: 18996 - DNA, 3362 bp, Arabidopsis thaliana landsberg
agatggcgatctttggttctcttgtttcttttttttctttttttggtattacttttcttccctgccgttttatatgtgctgattgccttgcaaaaaaaacacgaattctttttaaaaaactcttttcgattatttaatagaaatggagttcgacgaaaaataaaataaaatactaattgtcaaatctggtcatgccataccggccattttagtggacttattggataatggataggactaacatagttttttgataaagataggactaacatagtcattatagccgcaggtgtttttggggtttctggatcgagaagcgcctcgctacacaagggattattaatcccgtttggaactaatgagtttttatttactagttacatttgtttaccaaagattgaagaaaataaataaatcaaaaccagatttttctaataatttttctaactaacgaaaatatcaacttaagaaaaaatgtataaaacctggatttttacaaaaaatattgtaacccatcaaaataacattacatgttttttacacatgactttcaaatactttgagatatctctcacgaacaacctttatttaaaccaatccattttcagttgagattattctcttccttgccttctcagcctgcaaataatagagtctagttacttcagagcattcaaaaaactagaatgtaacaaactctaacctgttccttccagttcatggaggctgtgacgatagccagtaaagtggcttgcaccgcggatccaaccataacaccgcaccagagtccttttccattccactcacgactgaaagctaagtaaactccaacaggagctcctacaagataataagctaccacgttgatcaaagctccaatgtgttgccacccacatcccctagccactccatttagaactgcggtaaatccgtcgaggatgaaggagagacagagcaaaggagatatgtcagcaacatagtcaacaacttctttgctgttgctgaatgtgtagcctatgatgtttcggcaggtgaagagaagtgtgctaaagaaagctgactctacaagccagagacaaagccctgccaatacggaaaccctagcaacttgaggatttccagctcccaatttgtttgacactcgtgtgcttcaagaaaccaaatgactaatgttgagaaaggaattgttgaacacttgttctggtttgagagttgagatcatacctcacagccgccgcgactccagatggaatcacatagtgtaaagttcctattgtaagactgataacatgaaagacataagattaatacattttggtaaagagaacacataggataaaaagaagtaatatgatacttaccaaatcgagagaacagatgtctcgagttttgggtttgggagaagacctgaacagagtatgagtagctcaaatagccaccattctaggctattaaaggaagaccaagaaaacgcaagcaagataaaaaaaagcattggttgttgtatgtaacttgaccaacaagaaacttaaaaacgacttaccaaaccattgccgctgatgggactccgaagtggaagaactgcttgatacaagacacgaaatcactggatacaaatacgcgagtcttgtcgcaggagctggagtacctcacataacatgagagaatcacaacatagaaccagaaaggcacactaatagccatggcagctccattgcttcccagaccaaacgcgtaaacaaaagcccagcaaacagggatgtggaacaaaagagtggtcagggtacagtagagcagtgcaagagccaacccttgtgctagcagaaaccgagtcagtgggatgaaaaacgcatgggcgaacaaagccggtatgagccacaaggcataggagccagcgactctagagatgtcagggtcttgaccgagagagattaagagcttttcgatgtaaatccagagaactgatatgaggacacatatagggatgttagaggcagttgcagagtatgtgtaggttccgattttttcgtattgtttggctccataagcttggccacaaagagtttctagtgcacccgctaacccaaactgcacaaagaattaatatagtgttatcaagatttgagaggcaacttgatcttgaacttaagaggagagagtagttatagcatatcattaccaaaacactgaacccggaaacgtttgtgaaggaggttgcaagagcgacgccggagagctggagctcaccattgtggccagcgaccatgactgaaatgacaggcaataagtactgagcaatggtcacggcggccataggagcggccaagctgctcactttcttcagctcgacggtaacctgaccacttttccatgtggctttacaggggacaaggtgctcatcttgcagaagaaagggctcttccattgttgtccttcctaatgttgaaagccgtgtgcgtataatctctgatgttattcttcttatcttttatagacagacaacgaaaaccaatgtttagacttttctttttggaaatgtgtgggactagaatattgaatttacacgactcttagctcaaccagtaaaaggtattctatattttccaccgaagatagtcaaaaaagtatattattatgtctacacgttaaagtataaaagtatagtagttttccgcaatgacgttgtatagtttcttctctttagtggacgttgtggtcaacagtcatccaataggataataaggaagtgcatgaacaagaaatatacttggggaccaagttcgtataatcaatgactaaacaacaaaacaactcgaaaaagattacttgggaatcaagttctaatattcagagattgacaatttatcaaaaaaaataattttgaacaaaaagaatttgttttaaatagcaactacacagtgcaaacacgtgactcacaacaacagcatccttaccgtgagccattaaagtatttgagagcaacttcatcgcgagtttttttaacaagggttctcacaatttcacaaaagcggcattctaaagagggcaaaaccgctgtttgtttggatccccatttcgaattgggctgggcagcctttggcccactaataaatttaccacggcctaaagctaatgctaatgggtaggcctatttaccaatttggtccaggtctctttttctttcttccttgtcaaacactagatatctgatggcagggttatggttttgagattggtcgtggactcctttctctcatcacgttgacacctatagatagtctacccaagcgcgcttttattaaccttggtggtagataaaagtgacttgaagtgcggctgggcctattcatagcagtctaaga

SEQ ID NO: 18997 - DNA, 722 bp, Arabidopsis thaliana landsberg
aggttgtttggttgctagtaccaatagaggttttaaagctatacacttgtctggtggtgcttttagtgttcttgtgaaagatgccatgactagagctccagttgttagattcccttctgcaagaagagctgctcttgtcatgttttatcttcaagatccttctaatttcgagagattgtctctcattttcaacaagtgagttttgaaagtttctccttttacttagtgatttgagtgttgttgctgacttgtttgttgttgtatatgttatagatcgagtagatttgctaggcttcagagtattacatgcacgattgctgggaggaatctgtatccgaggtttgcgtgtagtactggtgatgctatggggatgaacatggtctcaaaaggtgttcagaatgtcttggactttgtaaagagcgagtttcctgacatggatgttattggcatctctggtaaactcttctttccctctttggtgttgtctcgattttcgaaataaagttgaactctttttgattaatttggtgttatggtgttcagggaactactgttcggacaagaaggcttcggctgtaaactggatcgaaggacgtggtaagcatgttgtatgtgaagcttttattaaggctgagattgtggagaaagtgttgaagactagcgttgaggctcttgtagagcttaacacgctcaagaatcttgttggttcagccatggcgggt

SEQ ID NO: 18998 - DNA, 466 bp, Arabidopsis thaliana landsberg
ctaccttgaatatctcaaatatcatcgaaaccctgtacacattcatttcaacttttaaaatcttcaaattttcgaaacacacaaaaaaagttgtccgaggatgctaaatctttttacctgaacccaagtcttcagtatcatcaatgattggtgctacttggttcctatgaatagactcaagcgacttccagtccgcgcttccatttccttctacacaagcttggtctccagaaacccattctttcagaacatctatcctgttgtgtgacaacgggtctagtgtgtcatctccgcttccaggacccctagagaagacatagaaccattatttctatactttcttattccttggaaacaatgcagttggctgagatgggacaagatctatgacttacagttgtctgaggcgcatgttgtactgaacaaatacaagatcgctgagtcgttttagctcaatgagagttct

SEQ ID NO: 18999 - DNA, 707 bp, Arabidopsis thaliana landsberg
tccatatgtataatttccatatctttcgcacatatattctttcaggggtctctttcttgtaactctatgaataattacggaaaaaaaagcactctataaatacctttatatattatccataaaattcacattggtatatgaaaacttcatgcatcgatgaaaaacctaattcgtttttctcttttcctcgcttcgggctaccttgagcctcggcaacttcgtttcttttcatcggtgacgaggatcatacactatcattctatcaactcaggtaacgattgatggtgtctccccacacagtaaatccacttcttgcttcatggacacgacagtatcgtatgttgtgtactttttgcaaaagaaatatttccagtttggttgtgacttagagtttcttggtgacttggtaaaaaccaggttatggcattaggctcgacagaattggatacacatgatttagacagccactcgtgtagtcgtgtactgatggaacaaatgactccaaccgacttgagattaattgtgtcaaaaatcggttaaaccatccattaaagctatggaaatgatagcatcgtccaaaggtcgtggacgtggaaaccatggacttgggaaccgaggtggacattgctaactctaaattagtaccaaagaatctctagctttgtaaatcagaaaagaataatgtaacccaccaattatcaaaacca

SEQ ID NO: 19000 - DNA, 1046 bp, Arabidopsis thaliana landsberg
tactataatgttacctcctttgttcatcgaccatcaataatatgaactgcagattagggacggaggtcttagatggaaacgaaagaaggatatgaagaaagaaaaacgatcgagagctacatatgttcttgaagaggttatgatttacagtttctaaaccctcgatctcctcatgatttattagtatgacatatatatatatgacataaatatatatataacttaatacttcttctgtttcatattagttgtaatttaaggtttttacacacatattaagaaattataaaaatctcatttaatctacctttttatataaaaaatatcattaattataaccaattcaaccaataaaaaatatatgattaaatataattggttaaagaatactaaatatatttattatttgcatagaaaattgaaacaaacacttaaattaaaaataaaataaaaacccttaagctacatttatatagaaacatagggagtattaaactggaatgattctctagttcgggtgtagatatttttttcttgaaattattgcatttttcagcttatcaatatgtcaaacgcttacatttccatggtttcttagttttttttttgttgttacacaaaatatttgaaaactttgcataaaatcgactgaatagaaaaatactaaaagttattttaataaatacaatcaaaatctgtaaattctttttacccacaatatttttagttccatttactacagtaaaacctctttaaatttataatgtttaaaccaaaatttttaattaatttatagagttattaatttatagataaattatgaattatgaatttatagaggtattaatttatcaataaatattaagttagttatatatatatatatattgagaagtttataaaattattaatttatcaatttgatggccatatatttacttaagattttcaaaaaaataattatattttaaatatttaatcgatttatgtcattttcacattataccaactcaaaaccggaagaatttattaatttataaaagtta

SEQ ID NO: 19001 - DNA, 646 bp, Arabidopsis thaliana landsberg
acctttcaaacctttgaaatctgtctcgattctgctctccccactgtcctgctacttgtaaccttgaaagtgcatctgacttaaccatgtcaaaccgcatcccttactatcaaaaaggcaaaggcatcgagagagggtattcgcccccaccccgtaagcgaatccgagctccagacatagatacctcagatctcattgaagagaatgctctaacccttattggccgtcttaccaatccttctgggcaaatactctgggccctcttcttattccggtccaacagatggactcttaggggaaaagctactggttcagatctagggcagggagtctttcagctcaaatttgatttcatggaggatcttcaacaagtccttgacaatagaccctaccattttgaccaatggatggttatcctacaaaagtgggaaccagtcatctcaccttctttcccgtgcctgatccctttctggattgaactccaaggcctccccaaacacttctggaaacctgagatgctcaaaaccattggagaagagcttgggaaagtcttagaccaagaaatcacctcaacttctgtaaaggttaagattctgctggatggcttacaacctattataaaagaaacaattgttagttccagcgt

SEQ ID NO: 19002 - DNA, 633 bp, Arabidopsis thaliana landsberg
  unsure (1)..(633): unsure at all n locations
atactgttgttgatgatgattcattaattattatgatatgatatcattatttgatcaccctcacgannnnnnnnnnnnnnnnnntctggtcgctgcttttttaatcctctcaatcagtcaacggtcaacgagcgagaaagccgctttcgtaatgaaagccacattacaaaaagccaattatgcttgtttgtgtgtttttgaaaaagagcttcttttacattttctttactttgaaactcgggtacacaaaatctctactcaattatattgtcaactactaatctttagtatcttttaaagtagaaactcagcttttatctatatttagtaaaacctcacatgaatggatttgggtgaatgagtttatcatatgtataagaatctaatataatatttgaaaaacgctcataggttattttgtaattaagaatagtgacaacttacaatataccaaacggaaaatgatagagaaagaacaagagacttggacttttttttttcttataataaatcaattaaccatggttggaatgggatgtgaggtaaaagtaataactcctggttttaatttaaccatggttaagttaaaataaagagagaagggagcaggtttttatgcagtatatatcatca

SEQ ID NO: 19003 - DNA, 1473 bp, Arabidopsis thaliana landsberg
  unsure (1)..(1473): unsure at all n locations
actccttttagaggaaaaacaagacagaagactttcaccaatgttcttcaaaaagatctcaagttttcagctagcattcctgtaatggatcaatcactatatttctataaactaatctcatgcataaaaatcgaggatcatatttaattgttctgttattggtttgcaggcaagtcttcaagtgaaacagctgatttttaggctgttacaacgagatccgaagaaaagactaggttgttttgaaggagcaaatgaagtcaagcaacattctttcttcaaaggcataaattgggctctgattcgatgcacggtataacttcacacattctctttacttggtatataagaaacatttcggttttacttgtgaaagaagaaaacttatcatcttatgagattattttgatatgcagaaccctccagagctcgagactccgatatttnnnnnnnnnnnnnnnnnnggagagaaagttgttgatcctgagctagaagatctgcaaacaaatgttttttgagatttggactaaacgtttatcgttttcttttcaagaattgtttgaaactctttgttctccaaaaatctcgttttaaatattttcattccattatctttatttatttataataccaagtgtttctaataatttgtgtgagtttcttaagaatatgttttttatatatgtcaataaaattaatcaagttttgcatatgtttttgtttgtttcattaatcaagttattataatgcgaattcatgtgattaaattggtaaagttaaacaaagaattgatatttttcataatttagttgaaggctacaaaagacaatggaaaccataaaaaaaaaagttcaaatcagaattaaggcttgaattgggtacaaaccagaatgattatgatagagtagattagatccatgtttctttgaatcttttaagtgttcttgttctgtttgtgtttcagaaaactataactttgtggaggactaattactcacagcaacaccgtttctgctgcatcctatgtgtgtgttttagtagttattgtgttacttagtaagaaatgctcatttgattcattcacattgcgtcaagtgatctgctctgtgattgttcttgacattttcagtatgtatggctggccaaatctgagagcttttcatgtctaaattagtttctcgagctctttttcttttgtgatggtttcagtcttttcttttataggtttcttcagctataatgcttgaggagggaataaagtatcatctactatgggcgggtcagaaggagctagcaatctctattccaagattccagcgatgtacagatacaaaacatgcaagctgtcagagggaagggtgtgaaaactggtcagttaataggtgaattttgatgtagaattgaaacagtgactacttataggagctgtatatgctaatcttgtgataaatattcagtgacaactntatgacccaa

SEQ ID NO: 19004 - DNA, 468 bp, Arabidopsis thaliana landsberg
cgacatttcggaagctatagtaggatttaggttttaaagtttggggtctatggtttagggtttagtgtttacttttaagggtttacggttaagagtttaaggttttggatttagggtttagggtttaggtttagggtttcggggttagattttagtttttgcgatttatggagtagagtttacgtttactgttttagagcccatatactcttgtactatcacaaccaaaacgaattttggctagcgtttcacatgtgccctatgactagcatgttctatgtcctgcttgaatataaatatcatgcccacaaagaaggaggtcccgctcccaaaagatctcacacctactcgcctcctggtcctatcaactcatccgatgcgctcacgcccctgttatccgggatgctatccaccgcggccctcaccccccaaaccatcgcccaaatccctccgtgacccccaccccat

SEQ ID NO: 19005 - DNA, 791 bp, Arabidopsis thaliana landsberg
  unsure (1)..(791): unsure at all n locations
gatggaagttctcggtcagttgcaggtattttgtaggtctttgatcagcttgcaacaaattcgggggttaaaaatagatttgaagaaatctaccttgttcatggcagggactacttctcaacatcgaaaaaatatacttggatagtttcccttggtcttctactactcactaattgtatgacatggacagattctcttccttcgccagagagaatcagaacgcatataagctcttgaactggtgggtttttatcttttgtgggtcgcctccaattgataaaatgaatactttcaagtcttataaatttttggctctccgctttccgcttgccaagtaagtgcattaaagaaattaaaagtctatatccagtttttatatggtcaagatctgagttaaacccaaaaaatgcgagattgtatggaaaaatatttgtaagccaaaacaaaaagggtggtctgagataagattgctatccgaggctaatagggttagtgtcttgaagcttatatggagattagtctctgcaggggattcaatgtgggtcgattgggtccataaactttgtttcataatgcttcgctatggtccgtatgtgggaactcctcccggttgtggctataaataattctgaagtatagaccaataacgaaacctctttataggtggaagttatatcttgtgagggtacctttttcagcatgatgtttggtgcacacttgggaacttgttcgatattctaggcccacgaggaagtattgatctggaaattgcctctcgnagctncgtggct

SEQ ID NO: 19006 - DNA, 538 bp, Arabidopsis thaliana landsberg
atgtgatcttgttcgcaagagagctattagtaaagaggaaggaggagagtttgccaaacaacattgccttccggcgtctgcaagaacatctcaaagcatagaggaggtcatcattacttgggttttgttcaaaaaaaaacttcaaagtcgtccatttttgcaattttaccattcacgtctataagatgcaaaataatcgtatgaaatccaaaacaatacaaaatatagctttttccgctattgtcaaattttaaaattttgataaataatatatcatttcgaagccctggagatgaggagttcatctaaatcttcagaattttcaaaaacaaatttatgtgatcatgaaaacatatataatatatctaaagtttcaaaaatatcctatattgcgtattatcttggattttacatgattattttgtattttttggacgtgtagggtaaagttgcaaaaatgatcgacttcgaaagttttttttgcacaaaacaaattatttttacaaaagtattttataaatatcttgaccaaatattc

SEQ ID NO: 19007 - DNA, 290 bp, Arabidopsis thaliana landsberg
cgcttaccggcccacgagaacatgcgaccacgaaaaaggcaaaattattcaacattcaatcccaacccacgacgcgaaaaggaagaaaagaggacgcaaaccgagctggaccaccaaacatcacagaagagacccacaacacatgcaagtcacctactacaaaccatggctcattcaaagcaaaaccaatagcaatcaaaaaatcccccactacaagactggaaaaccaaaccggggctccacaaacaaaacaacgcaaaaaaccaaaaggacccgagctggagaaaggc

SEQ ID NO: 19008 - DNA, 2062 bp, Arabidopsis thaliana landsberg
gaatcttccaagttaatatttttaaattttgatttttttctttcgttcacgtgattcaagattgttattgggactctagactttacagagtttatgagtctatgaactctgtgtgagagactagtttgtgtcaaaaacattgttctgcttctttaagatttagctgtcctgagttgaagattggttctcgttcctacttccttgtagagttgtagggatcgtatctttatttgtcctagaactgacactgcaatggtttgatgaataatgatttacctaaatattgctaattgtgtcttgaatctatacagaatttgctgatttgacatggcaagagtttcaaaggaccaagcttggtgctgctcagaactgctctgccactttaaagggcagccacaaggtcacagaagcagctcttcctgaaacagtaagtccaggactcaatcttgctgcactgaactatgtcaaccaccatcccgttctgtttttcagctctaagagaacgtgtttagctgcagacctttttaaaaatttggttctgagttctcaaattgtgtaactgcagaaagactggagagaagatggtatcgttagtccggtcaaagatcagggaggttgtggatcttgctggacattcaggtaaaagtaaaaccaatgattaagatactctctttaatttttggtgggatcttttgatgtcaaattgaaggtcgagattgtatgtcatatgattgttttttgtactgcagcacaactggagctcttgaggcagcttaccatcaggcatttggaaaaggaatatctctctctgagcaacagcttgtggattgtgctggagctttcaataactatggttgcaatggtggccttccttctcaagcctttgaatacataaaatccaacggtggcctcgacacagagaaagcttatccttataccggtaaagatgaaacctgcaaattttcagctgaaaacgttggtgtacaagtcctcaactcagtcaacattactctggtaagcatcttttatggattttgtatttcacttgcatgagaatatacattctgtaatgatgattgaaacaacaacaacagggtgctgaagatgaactgaagcatgcggttggattggtacggccagtaagcatagcatttgaggttatacactcgttccggctttacaagagtggagtttacactgatagtcactgtggaagtactccaatggtgagactttcttctttaaactgttaaaaagactttcattggttcacataaaatcttcttaggaacttagcttagtgttcggtttccttaatgtggcaatataggatgtgaaccacgcggttttggccgttggttatggagttgaagacggtgtaccatattggcttattaagaactcatggggagcggattggggcgacaaaggttacttcaagatggagatggggaagaacatgtgtggtaagttctttaataattatgaaaccatcacaacattctcaaattctcacatttagtctttctctatctattgttgattcgttcttgaattgcaggtattgctacatgtgcatcataccccgttgtggcttgagatgatcagcgaatgtggttggtcaattatcaaattacgaaatgttcacgtatttattggattaagacattacgtaaaagttgggacttgggaatgcatatggtttatgcttgttgtaacataaaaaggtctgttaatatgtacaaaataaagccaaaactatagacgacaaatttataatattttcatgttaaatttatgaacataaattgatttagatcaaagtagtttcgttcttgatcctaagtcaatttgtctaacatatagcttttactttgaatcttgatccttgagtcattttgtataacatacagcttacaagttatgactttattttgttttggtaattggtattctaaacgaaaatgaaatctaataacgtgattaatagtggtcacatggatatctcataaatctctatccaatggtgtgattaagaacatgcaaaactgcaaataaagta

SEQ ID NO: 19009 - DNA, 1207 bp, Arabidopsis thaliana landsberg
tcccctttttgaaactcttttggaaccttttcaaccctttggctcctggtaagatcttcaatgaacaatcaaggggaaagttggtttccggcgttttcctactcatcctcaacctgcttcacctctttgggaatcaattatgatagaaccactaaattatcaatttgagaccttgtttacccgatcagaaacctcccaccatgctaaggcatatggcaagcttctttttagggacacaacttctcttaccggaatggcaatctccctctggttctcctccacttctcgaccaagatcaacaaacgttaaccctaccatcactagagttgcatgcccaccgcaaaatttctcctcctctccgtacagctgccgccgccctctagtttctcatttgctcaaaagaaaactaggtcaactggtggattttttcatgtctggcccattaaggtgccaaaggcccaattttaaaagaggttatccaaacccttttctgcaaaagcccaagtctgccctaatttattcttgatccatctttaatcaatttctgtttcatctatcggcaccacttgatcatggacgtcaaatgaacaacaatgtctcagttttgttatggatgattaagaactatctacggaccctccctttagattcacctagatcgttcgatcatgattttaattgtttgaagaagaatggtatattaccaacttcaattgtttatctccgactaatttaattaccaacttcaagcaatcatccatcatcaacaacgttaagactcagagctctcgggacttcaaggaaattttaagatttttttagaaatatcttgagcctttatgtcacgttcttgaaagcaaaagatggaagaagaacaacattatggtcccgtctccgaggagcggtgattaccgacacttcttccatcttgtctcctcttttcctctgtttactgaaatcagacaatctcgactcaacaactgtaaggttagtattcatgaaactgaaagtttaaggaaaaacggcattatgaccttgtttccatggagtggtggttacctaatcttcctcaacttgtcatctccaatcccacccgattataaaaccaatgtcaaccatctccttattgatgagcaacttcagtttgcctttctcgtgccggcgacaacctcgattagggaaccctcttcaacgtcagctcgtcttt

SEQ ID NO: 19010 - DNA, 710 bp, Arabidopsis thaliana landsberg
tggaattgaatcaattgaaggttgtcattgtccatgtggaggtacccttagtaccaaattccatggacagtagtttggttgaccatgcaatttgtgacatcgatttgacattgttggtcgatgcaatactagggagctaggaggtggatattaagaagggaatggtatttgatactgagagcacctagagggggggtgaataggtgatcctgtaaaacttaaaacttaagccacaaaacttggttaagtgttagcacaatattcaccaagtggatagagaggagtcttaacaaaacacaataaccacaaagatatcaatcacagagatggcacggtggttattgtgacaccccaggtgtcagtttcgtgttatgtcgggagatttgtccctaacttgactgctcagtgaaaatttcctatttctcgatcgtgtctatctctgtctattaggctttctcatggaagttcaccgaattcggagttattcgatcgcaagaaacagccaattttggagcgtgttaaaacttttaattctcggaacgaatacagactcgaagatcattctcgaattataaatctcatctgaagctctttaaatcaaactctcgacgactgttatttgatctgagcccgagtctaattcctcgaacctcgatcgatgtccgactattttactccgagtccgtactctcagacggaatactcgagta

SEQ ID NO: 19011 - DNA, 1414 bp, Arabidopsis thaliana landsberg
ttctcgggtgttgcaggttctcttgattctacaaggaactttggtgttcaaaaagatcctaatgtgctcgtgatgcaaaggctgttacacaactccggaagtctaattggtgttgacatggaacaagatggcatagatttagctacattgttcgctgattctactgaagattcgaagcttccttatgttatctatgagggtttagaaatgcagggtaagtaaaagtcttcccttgtcagattttgacttccttgtgagtttattatatgtttgtttatcggtttaggtgaaggatatggcacaaacactcgtggccctttcgaaaacaagattgatattggttcttttggaaagagtgggtcggtgatgaacgtagaaagagagaaagaaaagattgtgatgatccctaccccaagatttggcaacgcaacaccacaatggaccataaagaagaaactgagctcgtacgatattaggcctcgttgtggcagacttattctgcaaagtagctcctttaatgagcacattggaagacatttacctaaagaccaaatgataaaaattaatgtcggagtcaattgtaacgtatatgactacgacacgggcacattgcatgagctgcgtctggaatatcagaggcaatatggtctagcgcatggctggcaagaagattttgtccgcaggagacacttgaagcaaaaagacgagattggactcttatgggatttttcttcttctaggcttcaatttggcgtcatttctaggaacacgggacccggactctgggagaccaaaaactaagagttccaattaaaaacgcatatgtacttttttcttcttttctcaaacaattattggcatttttgcttatgaaaggtttttgtgtagccaaattgagattttgatggttttgacacaatcaatgtatgatatcaaatcattaaaaccactttattatctctcttatgtgtttcttacagccacttttatcattctctcttttatcaaaagataaaatgttctcaacccctaaaccctatgcatttcaagagttacaagacaaaatcttaagagtaattacacagaagactgagccaaaaattttgacaaaagttttttatttaacaaaatttttacaaaaatgagactcattagatcatgtacatgggtgatatttctagagtatcacaagtctaaaaattattttaacaaaataattagaatgaggttgattagtattagtccagtgatatttgtgataccagtatcatctgaggtggcttctcctaattggtcacatttaccaaaatcaaaaaataatatatataattattaaacaaatattataaataatattcaaaaacattttaatgatactttgtgagtacacctatgaacatgctcttaaagtcac

SEQ ID NO: 19012 - DNA, 525 bp, Arabidopsis thaliana landsberg
  unsure (1)..(525): unsure at all n locations
taaagagctccatcatcaaatttttaggtttctagaatacagcattaccctctgttaaattggtttaaaacaaacgttgtttataaattatatgtatgattcattgtcgagaatgttgttagaaaaaatatttttaatactaaatttaattacttattgcatgagtgaatgattaaataaataaaaattatatttaaattaaacaatacaaaaaaatccgaaaaaatcgcggtgtagagcgggtgatcacctacttgattgtgatttttgctgaataggtctagagggacaacgaggacaacaaaagtacaacactctagacctatgaatatgatcctagctgattttttttttcctacttgctttcttttttaatttcattacttttttttaacacggtttaatttcattacttaattgcttggttgtcttgcccgtcttgcttaagttccttacgtgtaaaagaaccanaaacaaccaaactcattttttttaaaacaaccaaactcttatggtctttagtta

SEQ ID NO: 19013 - DNA, 493 bp, Arabidopsis thaliana landsberg
aacaattgcacttcctcttcctcaccaataccaatgtacctttagtcaaaagaatgactaattacaaactccaaactcaaaacacattgttgcaaaagagagaactaacaaacccggtttcaagttcgaaaggaagagggccttcaaaaccgggaagaaacttgacgatagagccagaaccaacatgatgatttaagataaacagaagcagaaccagcaattttagtgttaattccattctctcttagtttctaaagattgagtcatcttaggatacaaggatctttatatctttaatccaaaaaaaaaagataattatcacatgtagagttcaattagttaattaattaccaataattgaggcttgctggcgttttattgaatagtcatatgtaggaccatatattatcaataatagaggtttccagacgttttgttgaatagtcacatgtaggagtaggttaattgaggatctttgaaatcatattggatg

SEQ ID NO: 19014 - DNA, 469 bp, Arabidopsis thaliana landsberg
caatccgcctaacccccgcaaaagcccaatccctaggataagaactcccaccacaaataagaatcttaggacggtaatcaagcgccttatcttcaagcttatcataatcaatatacccagtttgaggattcactttataaggaaaactctcaaagaagatggaagcagccgaaatctttttcccaccaggagtacaataaccatgacttcatatgaccaccagaaggcgaatcaagccccataatccgttcaccgggcaataaaagtccggtattcaccgcgaagttagcagaagtacaagaataaggctgaacattaacaccccatttatcagaattcaagaccaaacgcagttagagcccgctcaatacagaaattctcaatctgatcaatatattgattcccagtatagtatttaacttccaggataccttcagagtatttattccgtaaatgactacctaaagct

SEQ ID NO: 19015 - DNA, 1381 bp, Arabidopsis thaliana landsberg
gaaaggtctcttactgaattaactggttcaccacattttagatttgcggataatgcttctcgggcccctggtcatgcggattatgtgatttcaccaagctttggtaggaggtctggattcaatactcctaggtcacagcctggatttgagtctcatcctatggttggtgaggcctgggatgctttgaggcgctcaatggtttactttcgtggacaacctgttggcactattgctgctgtggataattctgaagaaaaactcaactatgatcaggtgaagaatctttatatcttctgaaaacttctgaataaccacattttactgtcattgaccttgtatctctgcattgactttatccttaaggtgttcgtgagagattttgtaccaagtgctttagcattcttgatgaatggagagccagatatagttaaaaacttccttttgaagactcttcgtcttcaatcttgggagaaaaagattgatagattccagcttggtgagggtgttatgcctgctagcttcaaagttttccatgatcctgttagaaaccatgaaacgctgatagctgattttggcgagagtgctattggaagagtagcgccggttgattcagggttttggtggattatattgctcagagcctacacaaaatctacaggagactcttctcttgctgacatgcctgaatgccagaagggtattcggctgatacttagcctctgtctgtctgagggatttgataccttccccactctcttatgtgctgatggttgctgtatgattgatcgtaggatggtaagcagcaaatttactttattagttatttctagtgattctttctacaaggagagtttgagctaggtgcttcatcagttttccatcttttaattttgtgctttttgtgttgtagggagtttatggttacccgatagagattcaagcccttttctttatggccttaaggtgtgccttgctcctgcttaaacatgacggagaaggtaaagaaatggtggaacagatagtgaagcgacttcatgcattgagctaccacatgaggagctacttttggctagacttgaagcagcttaatgacatttaccgatataagacagaggaatactctcacactgctgtcaacaagttcaacgtaatccctgattctcttccagaatgggttttcgactttatgccgcctcacggagggttctttattggcaacgttagccctgcaagaatggatttccgttggtttgctttgggtaattgtatagcaatattgtcttccttggctacacctgaacagtcgacagcaattatggatctgatagaatctcgctgggaagagttggttggagaaatgccactgaaagtttgccatccc

SEQ ID NO: 19016 - DNA, 2326 bp, Arabidopsis thaliana landsberg
  unsure (1)..(2326): unsure at all n locations
gcacaaaacacatcaagaattaattgaacatttatttgcttccatataaaccaaaacaaataaagaancgaaactactactttagtcaattgccaagtttttttagaattttcttaaataacctatataccgtaacctatataccgtttaagggtgtgaaccatgggtcgggaacagatgttattatgctccacaacatgtgacagtcgagacgttatgatcatacatgtatacggagctatcaaatcatcaagtacatcaatttttttttttatcaacagatattagttaggactcaaacgagtcaatcttgaggaaagttgtttacatacgtgatatgaagcggttcagcacaaactttttgtgccaaattgtccgccttaacatttacattacgagaaattaaagataaagaaaaagaagtgaactcttctttgtcgctctgaaactcctccaaatacgctgaaaatgctggccattcggttggggaagacaccatcttcaccaggtctgaacactttgttaaaaaagctacttcttggttgccggcaccaatcatacacttcattgcccagagtagagcttcgactttggtattgagaggagaaagacttctacgtagcttagcagctcccattgttgacgtacctccattaaatgaagtacaaaaccaacctagacctgaaaacttgtcgttttctttctatgaaccgtccacaaaacaacgaaagccacagtacacaatgtcttgtgagatatccctcacccggagttggttttccgatcgataggtgacttggttttcagtattgagctctacttgagctaactgccataaatgagcctcttttctgctagacataacacgcctagctttttcttatccacattttcaaacactttttcatttcgtgctttccaaatataccaaattatccatggatatgcggatgaatcaacttctgaagggattcttgagaataaatgatctaaatttgcataaattgaataagtgggaaaacccctgggaccgtaggaatctttgaaagagcccatatttgtcgtgccggatgacactgaaaaagagtatggtttattgtttcctctatagtgccacatctgacacatcctgaatcacaatttattcatcttttctgtaaattttctgttactggcacgcatcctgctaatatttgctataaaaaatggtggaacataggcgggcattgcactttccacacttgggttttcagagctttgatctttgggccaatgaaagaggagttatttcccaagatttccatctgtgttgtatggtagccggatttaactgtatagattccagtttttgtgaaatgccaacccggggaatcctcccttgtcgacgcacccaagtgcaatgcacttattatctggacatcttccgggtcaaagagctctttcaagagatcaatgttccaaaaatttgaccggctatctatcagattttgaacttttaaagatgggtcaatagttaaaccattactatttgctggtctcgggtattgagccaggatctacagatcctcccaaacggagatggaagcctctgaaccgacacttttaataagtccttcccaacccagagatctagctcagcaaatagttctccagccataagacggagagtatgattttatatttttcaaagattagatttctgaaaatatctctctttaaagactttggcaaaaagagaatctcgaaacgttatcaaacgccataactgtttcgacggtagagctgaattaaaatcatttgtactccaaaaatctaaactacattccaatttgctacaacataatttgttcaaagctatccagtgtgtagctctagactcaccattcgaattccacaaaaattattgcgaccgcacttgttaatttggaagtgactgttttcggaagtctaaaacaagacattacataagttggcaatatcgtagctaccgatttaatcatcacttctttccctcatttagataagaattttaccgaccaccatttattctactctgtaatctatctcgaacaaaggagaatattttttatcttagaacttcctagactttccggtagcccgagataataacccataccgtcgatattatgtatacccaaggtgaatttaatttattcctttgaagagtcatctactttatgaccgaaccagatcgatgattttgaaaaatttatcatttacctcgaaaccgcttcatattgttttaagaaacccgaatattacttcgcattgttctttatcagccttacaaaagaaaatactagca

SEQ ID NO: 19017 - DNA, 2436 bp, Arabidopsis thaliana landsberg
caataacccctgttccctctaatagcattttttttcaagaattgggttaaaattaaagaagttctgagttagttatcatgcaggagagctgtttggagagcaaaagtctgagaggatatgccaaacccattgcagaaatcgctgcatggttacctgtcaaagatcaaaaaagagacagggaagctgcaactgtcttcctcacattcattctcatcctcaaagaattgggtgcttggtaagcatcccaagaagctctccttctccttcaagcacagacgactcagcagcaagaccagattcagcaaagaagaacccgtttaccaccaggactctgctcacgccgccaccttgtccgacattgatcgttttcttgaggaaaacttcaaatccctctgcatcagagacgaccaggaggatgatcagcatcaagcccgggtgaccaaaaacaaggagaaaagggagtcatcatcagacgacagtgatgatgatgatgatgacgacgactatcgtcacagattcgagaggacatggggacatgccgtctacgactccccgaaacagcccccggatttgctgagaacagagaggctatctcctccgcctggatcttcggagggcaggcctagcatggaaacaacgtcaacatcgtcggagaggcaatcgagatccaccttggtgctgccggagaactgcatcgcggtgttaagatacacggatgagccgcaagaggatttcaggcagtccatggtggagatgatggagtccaagttagggatgcgggaaagcgaagtggattgggacttgatggaagagctactcttctgctatctggatctcaacgacaagaagtcacacaagttcatactaagcgctttcgtcgatctcatcattgctcttcgtgagaaggagaagagaatcaccaggaaaggtcatgtgaggtcgctcagtactcgcgccgccagggacaggcttaggaagaggatgatcatgagtgacaactaactctcaagcaatttcgttttctttttgtcacaaaaaagttttactttccttcctttctctcagcagccttaaggctgttgttgacttgttgttacttacaaaaagaatgaagagcgagtaacaatgttcatttgagttaccaaagatgatcgattgtctttttctcgttttaatgcattcctcgtaggcagaacgatactttactggcacaaagtctttgtatcccattagaagatgatccctctcacttccccagaacagttgcacaatggactgcatcacgtttgctaacttaatctccttcttcttcaatgcttgcatgtatccaatgaacttcttatattcttctgtgttgagtttctctttgacctagtaagatcatcaccgcatgtcttccaatgtaagcaaataactggatatacaaaagagaaacatggaaatagagggtttaggatctaacttgactcaaaaacgcagatgcacttgcttcctttttatcaccacctccattccctttcgctgtcaacactgacgacgatgcacttccctgactctctggaacctttcgctttttttttagtcccattgtgttgaaacatgtgcttgatgcaagcacttcagttacacaggtctgcatctcacagttgtcgctttctagatccactacttcacatctcctctctaccggagtctcctcatcatcacttagttccaccaacttagccttccgtgaagaacaaccctgcataacatctccctttacaatgcgaggtatcttgcctgtatgtttaagaatggtcaaaccattccgtttaacattatttccgtcacgctccaagggtgaagcccgatttgcaggaggaaacgcttccagtctactcaactcattttgtgcaaccccaacgtttttcaaattactattacctgcaaatgatcaataaccaaagcaaaatcacaacatagagagttgaagttagatccatattctaaccatgtactaaagggaaaacatctttcctcagacctgagaataaaggaaaaaatgaatcactgaccaaaggctggtgtaggattatcctcgattgattccactggtaacaatgttgaaactgtatcgaaaaaagatttggcttaccagtggatgtccaacatataattgaaaatagggcttgaagaatacgagcattttgctatgaaaaactattgcatatatgcttactactattcatttactctttttttggttttgttccaacctattaagcaaaaatcttgtggatacaagataagcaattatatcattccccgacacccaaacgcaacccatagattatcacaaggaaaaaaacaggatgggagataatagggcaggcagactaagatatggtaacgtccaataaagttatcttttggctgcagatgcatacctatatt

SEQ ID NO: 19018 - DNA, 974 bp, Arabidopsis thaliana landsberg
ctgtgcgcgccgacttccaaggcgccgcagaatgtttccgggtggccatccaagcagccctaaccaccaagccgtcgacggttccctctacactggcgaactctaagcctgaggaggacctggcagtaccggcaaacgaagctctggcagcgacctctatgcggccgactgaaagaaacgaagaggatcaacctggggtttgctgatgagcacaaaactgccatcatcagctccagtttgaacgacaaataggaaagcgcgctcgtccagttcctgtaagataaccgagacgtattcgcatggcaacctgcggatatgccgggagtcccaagagaactggccgagcacaaattgatggtctatccccaggcgaggccgatccggcaaaagctacgtcgtttcacgcccgacaagagagaggccattcgtgccgagttagctcgcttggtcgcggctggatttattagagaagtgtacaccccgagtggtagccaaccctgttcttgtactcaaaaagaataaagtggattggcgcatgtgcgtcgactataccgatctcaacaaacactgtccgaaggatcccttcaggctccctaggatagatcaggtgtggactccaccgctggatgttctgtgctgtctttcttggattgctattccggataccaccagattagtttggcgaaggaagacgaggaaaaaacggcgttcatcactccgtttggtgctttctgttatacctccatgccgttcgccctcaaaaacgctggagcgacttatcagagagccatccaaacgtgcttagccgaccactggggcaagcgtgtggaggcctacgtagatgatgtggtaatcaaaacagagaattcggaaaacttcatcgaagacttatagctggttttcaacagtctgagacggtatagatggaagtttaatcctgaaaaatgtgttttcggggtaccggcgggaaaatt

SEQ ID NO: 19019 - DNA, 1839 bp, Arabidopsis thaliana landsberg
attgtttaattttaattaaaaaatcgttagttttactaaatttggtttaattttgcaaaacactgtataatgataacaaatataactaaatttttttggatatcaagattatttcagatatttttgttatttagtattttttgggtataaattataactaatatttaaaatatttaattttatttcgaattagcggatatccgtcgttgttttactccgatcagcagactaagtggcacttattctatatgtttgaatttgcacgtaccaatgcgaacctatgggcatggaacataattaggatttaaagattgaaagacttaacacaaacaattgtgcacgtctataccaacaaaaaaaaaaccattttgcacacatcaaatggcaaaacataactcaattttaccgagaattagattgagtttcggcccaagatcaccaagttatattaaaagaccatattttgaatttattcaattttatttatttataccaatggtttagagatttctgtaattttaacttaaaaactagaaaatggaaatacgtattgagaattattttaaattaaaaatgggggtaggaagtaagaatataggagaaagaaagtaagaattaggtatttcatgattgattataggaaagcaaaaaaaagtaggcaaaaaaaaaagtggaaaaaaagtctaaaaagcttaacttatatgctacaaatacatatacaaaaataaaaccttcattctacaataataaaatcttcattctatatacacgaacaaaacttgttctacatctcatagatttaacactatacaaaggtaagatcgagaagaaaattaatcgtattgtagagataagaaagaaagaagaaaaacacaaaactatactataagtatgtttattacattaaaatggcgtatctcatactatcactaaccataagatggttaacctccgagacgctaccataatctccggacacccatagtccatctgtcccgctaacacggggcaccgcaaagcaagagatgatcgagaacgggaaccgcatgatcacggagttaaacccgtctcgtcttccattagctacaactcccggcccggtgccactagtcgatgaaggtaactcggtatcgtcagctacgcgagggctcttacgaaggttttgaaggttgcggcggagtacggaaagcatctgcgtcatctctttgtctttgatcttgagttttaggagtttagtttagtctcttttgggtgtttcttgtgttgatgatataggcactttgaagagaggaacaacattatgggctttggttttatttgtgtgaaagattgatttgcaagtgggcaacttggaatttgcttttcattattagtgctactctctgtatcaatatctagctatatattattgtctttacatataattttataatatttttgtgtaataacaaatggtggtagggataaattccattgttcgccttcaattatttactctcacgcttaggtgtaacagcctattatattaaaaagtgtgagtatgcacttaaacccatccactttatctcacaaccgaacaatagtgcaaaactcatattatagagtaaaaatatcgtaacattattattgggattatgagacagagagagtcagtgaggaaagtgaggatgaatgtaagagtagtgtacatatgcttctaatagtaaccgaaccgcaccgtggggtgtgattctaatagtaacaaaattgtatatatatatatatatatatatatatatatatatatatttttgttactattagaaccgcaccgcacttgatggagttgaattgtacgtt

SEQ ID NO: 19020 - DNA, 1046 bp, Arabidopsis thaliana landsberg
tttgcttggttactatgttacttttgaatgtttcgcattgcaaaaacctaatttagataaacatgatctcactttcatgtgttaatctaacttttgtgtatatatatgctagctaaaaccatttttattgtctagagtctttgatagaaactagtttgatttgggttaaaaacaaacatttattctttaacttttatagttggggaaaacaaaagcggaagcagtacaaaggttttgtcaaagaaagagtgccaagagaaatgcatgcaatggattcaataaatataaattactgaaaagtttttccttttaggtgatatgtctactctttatgatgactgatagactttggtatatgggcataatgtcaaggaaagaaccaaattttaaacagaaaggactaacaataatagaatagaattatgtaaatacatttggttgagtttttcatcacaagggtgccgccatttttgttccttgtctttattagagctatctttgaaaattttttttttcaccttctatggggaccccaatgctgatgcctgtatgatgcaatctctgtttcttgattgacatgtttttggacccacttttgaccctttattccaatgctgttatatgacaataatgacatgcatgcatatattaataaatacatgtggtgtaagactaaacactatgcatatattcttttgctagctttgtgtttttagcgttttggtttgaaattgaatgtttgaaatctttctggttagatattagtgagattttgtagggttctctgtctataatgtgtcagattgatttgtgtcttctgttcacatacaccaaaagcaaactgtgatgtgaagttgtgaacacaagagaggaatctagccttgaccctaatcaaatccttctcacccattttttttttgtggtactatgaaatgttattatgtttttgtttgtaagtcatttagtaaaagattcaagaacatgatgatttgtgagcatttgtgaatgaatttcgtaatggctaaacctgtctttctttgtttaca

SEQ ID NO: 19021 - DNA, 498 bp, Arabidopsis thaliana landsberg
ggggacgatccgttctcatccaaagcatcccgccttctccacttctccgtttacttctcttcgatcatctttggctttctcatcaggccaaattcactctatcttaaatcaagttctctttctctgattgtgtttaatctctctctctctcatctctcgatgaagacaacacgtcaacatgacacaacagtgtcacaattagtctcggcttcctccaccaccacccatgagctctttcccttttctttgatccaataaataaaactcaccacgacgtcgtctgtttggttactcggaggcggcggctgcgatcccactattatgccttagggtttctcaaggttttctttatttttcattcgcgcccaacaacgatggtatatatatatgcctttggactctaaatgggctgtctcatatttccaaaacaaaatagcccatcgaatgagggagtggggtgttacatgtaatgccatcttaaccagagatggagatgat

SEQ ID NO: 19022 - DNA, 2233 bp, Arabidopsis thaliana landsberg
  unsure (1)..(2233): unsure at all n locations
atgctagtattctagcatttacatttctctcttttcttgtaaattttttattaattattgaggtagcaactcaatacaaagactaatgattgatagttgacaaaggatctatgtattggatttttttgtaattaataatagatataagtcattttcgcttaaaataaaaatgttattgtttgtagggtgaattgcaaaagtaactacttttcataaattatttaaggatatagcactataaaatctaaaactaagtaagtaacatgtagatgacatgaaatgtcgacaaactcctcatttgcaaggctttggacgagctgacgtggtgaacatacaagagaaaagattaattttatgtttttggataatattattttgcacaccccattacattttcttgttaaaaatctctctaaaataaactgatttagacttctagctatattaaaaaaacattagatttttttctgattatgtcgtggtttgaattttttaaaatgaaccaatatttacaaaatagaaaaatagttgtaagtaaaaaaaattggtgttctaaaaactgaaatagtatagacaagaaagcatagatgcaatatcaaatagtatttcaatttcaaacattgtggtttggccaataaaaacactctatcatgacaatgaatatcaatcaaaacaaacaattcagttttaacgcacctagtataacataaacgtaaacagtatattcacaaagaacaatatttgggttcttatattcaccattctttattctagccaatcaaaatatttcaactaataaatacttaaaattatttaattataaaatcaaaactttaacaattcttgtataaatccaaaccgatatataatcttgtttaattacaaaatttaaaccctaattctcgtttgtaaacccaaaccaacatttttactcgtttaattataaaatctaaaccctaattgtactttctaaacccaaaccgacatttgacttcgtttagttgtaaaatttaaacttgtttataaactcaaaccaatatttaacattgtttaatcataaaatctaaaaccctaatattttttttgtaaacccaaatagatatatcctttcattttaattgtatattaaattttataattaaatatgtttttattaggtaacagattggttaaaataaataaatgaatagaaaattattttttatttacaaaatagaatagtatcttgcaaaattttcctaaaataaaaaatgatttgtttgacttaatctcactagaatttcctgtgagatttatagtcctatttattataagcaattttaaaaactaattagctaatccatgtttttaaaattcacttttgtaaacatttactcatcgtcatcgaaattgaaaactttttgtgtgaggctgatgtgagatcctcctttgctatatctccattgtcgtagatgaaattgttttggcgatgacaaagagagaaaatgactgttgtgaaaagagttacaaaagaattttgctttaaaaaaaaactgttggagaagaaagagatgatgatatatgcatcatgttggagagaggagagaagcacgtgtataaacaagggcaaatgtgtatatactacacaatatatgctgaatatcatatccaactttttgaatggttacttattaaattattaaattttttatggttatacacccaaatttccctaaaaaataaacaaactcaacaataaagtagaaaataatcttccttaaaagttctccaatttcctattataaaagagatagatagatatacctagtagagtaactagatcatgagtatccaatcctttatcttgaaacttttgcttttgaacagcaacagagtcaagtggagaaggtagattcgatgcttcagttgccaacgagattctcccgtctttacgacccgttggtactcgccagcttggcccatcactcttgttttcatacatacatatacatagctcagctgatatcagtaattttaacactagcaaaggaattaagtaccctaactaggtttagtaatcttgcgtaccaagtcaacagagtcacgagcagcacgtgcaagtatatctgcacatgacacaactcctggacacaccgnctcaagccgggctttagcatcatcgatcacttctaaacctcttagaccaagattggtagagcagcttgctncgcagatttcctttgattaaaccgac

SEQ ID NO: 19023 - DNA, 1125 bp, Arabidopsis thaliana landsberg
aaaagcaagcgttcgtctagtaaagggtttggaattcaaagaaagttaggtctttgttattcaaagaaaagggtaaaacaccctgggtgctgagattagaagaaatgccttaaccttgtcaaagtttaaaaccaaatccgctagactcttgaatcgttttaaagaagcaccccttagaacttaaaccaaaaaagagaaagaatgggaaaaagggtagagttaggacacctaagggagtgggatcatcttctaagctatcacactatgtgtccgttggcttttatctttagcattctgctaaagctcaagctgctaagtgcacaaccataatggagaagatcctccattctcttcctaaggatgcatttgagacatcttcaaaacctcttaagaggtatgtcaagctactttttgacaatggaattaactcagatgaagcaaagctgctgtccatggacatcagtgcaatcatgctgcctaaggtcaagaaggagaaggcacaaagagtggacattgttgtgtacatccgcaccatcactcctggtgagactactgagaagcttcgagatccatgtagctttgtcttgattgctctatctccaaaagcaggttcaaccactctttgtgttatatgggatcaagcatcaacctcatgcctaagtcggtttctgagagactaggcatgactcactacaggtcgactcactacaggccaactcgcatcactctcctcttcgcggatcgttccaaacgattccccgaaggaatccttgaagatattcctgttaaggttggtaactctgtaatccctgagatttcatggtcctaaactatgagaaggaacccaaggatcctcttatccttggaagagcattcctagctacagctggtgctaggtttgatgtgaagagaggtagaatctgtttaaaggtttgtgatttggagatggagtttggcatcgatggttcagagcttactaagcctactagtagcattgcttccagcacagacacacctcctcaaaatgctcagaatcaaacaacagagccatacacagcgctcccatctgttcagctcgccaatgagagttgcagagcaacaatgtcgatcgacaccactaccctt

SEQ ID NO: 19024 - DNA, 3017 bp, Arabidopsis thaliana landsberg
tccacaaacccaaaatactcaaaccaacaatttggtcttctctctttgagtttctgttgaaaagttttttttttctgatacaactgaaaatacaaaaggccaaatcctataagtgcaatatttgcaggtatcatgaaagcagaagatgaatgaataagacaagtctcaagaaagtggaacaagtgatgatcatacaatgtagcaaaaataacccattttaacaagcaggaagatttaagaggaaacaagaaataaaaataatggaaatcaaaacaggaacaatcttacatctttgagtttcctttttccttcaaaccaagagaccaatatgaaacttttctcttctcaagtatgtatctgaagaacaacatgtcaatagaagatacagaagctctttttctctctctttcttctctacaactctaactttatgaagcctttcgcactccgagttcttccaaacgtttccaagtggcttcacgttttgcttcggtttcagctgcttttgattcatcttccttgaactttgcgaggcattctttaaataactcagggtcaaggtcatgaaatatctttcgcacgtttagtgtcaagctatgaacagcttggttccaatgtttctgtgcgtttctctccaacgctgggaatataattggaagaatgactttacggttttgcattatcagattctcaatgtgattggtgttccataagaataaagctctctctgcaacctgcgaaaaccagacagagcatgaatagactgaaacaaagatcctgaacctactagactgatcttttcccgtgaaagatcgtatgcagtcactgtttagtcaaaacagatacccttcaacgcaatactttttcttcttttgtaactttctacttaacaatagccttaatatatcaatttaacttagaaattgccttgagtaacatctagagctgaatacaacagtcctaaacttgatactttccataccgcaaaatcaactcttccatttgctcatttgatataactggtaggctataacgacttctcataagctggtaaggtaacacagatatactggcgaaacactaacacaattaaagtatgtaaccataagccttatttagctaagaaactgcatcaggtattatccagaacagaatacaagtcctatacatagatactttcattaccacaaacccaactcttccatttgatctttttatataacaatctaataggctaacatacacaggtgaaacactaatgcagttaaagtatgtcgaaacgatatggcctgcaaatgtcaaccccaacactaacagcaacagagcatttttcaggaaatgtcaaagcacggggacattcgccagtttaaaaacaaatgtgaggtgctattatttcagaaagaatggagaatgacaggtacctgaaaatgcagactgttcaaacatcgagctatttggcgaaacagtggtaccatgcaccgttgaaattctggtggctgagttgcttcgagtacttcctccaactcgttcagaaacatgacttctttggaactgtttgtcacgggccaatatttcaacaatcctcttataaccgtatcagcaagtttgcaatccttttccacaaactgtgtgatacaataagacaattgttgatgatacatttgcaagcattttggtttgtggagaggtatcaaaactcgaacaagaaacactttgtgctcgtctttcaagggaagagcaaatccattgatgatacttcccaagatttctagaaactcagcaatcccattatgtttctctgtttcgaaaacaaacctatagaagatgttgttaatggatttcctgatgaaaggtcggtgtaccataaatttaccatagatccgatggagaatggttttcaggcaatctctttctctaggatcctcggaatcaaataaatccagtaaccgcaagacaaaagattgatctatatatctcttagccagcttggtgtcagtttcaggcgaagcaacaaacctcaagaaaagctcatagacaagctgcaagtgaggccacgcaagatccatggaaggttcttcctcctccaggtctaaggcatcgataactttattttcccgtggttgaggatttagcgttctaaatatgttagcagagaccatccgaacgacttcttggatacccacttcgctaaactttccattaggagaattcacataatccacaagctccagcaatgtctgcctcttaatatctttttccttgatgttctttgtaggatccgtgaaatcaaacactacacggcacaagttcaactttttaatgaacaagttttgcttttccgtgtttggaacatctttaaaactcggcaatgcttcataaggagtaaagactccgttgttgttgttgttgttgttgttcccactagtctttagattcccatctttaaaacccgagtcagaagcagcggatttgccggctggagaagcgttcttagcatgcgatttcgcggcgccattattatcagtgcttttggaagtagaggcacctgaagtatgagaagatgaagaagaatggccaccgtgttcacgtccacgatgttcgtgctttgaagactttttgttgggaagcttacttagaatctgtttccacatagtttcttattctcaacaccagaacaattcagcttctttaatcatatccccaaaacaataacacttcttcgtcttttcaccatctgagaaaaaaaacaaagtccatataaaaaaaaaaactcaaatcctagatcagcctaataaattttagaaaaagaatcaaatcacaaaccagagatagatacaaaatcccaaactttcccagattacaacaacagccaaaaaaaacccctttttatcttcttcttcttcttcttccttaatcacaacgcccttttgtacaatctaacaaaaaaattcgaactttacggcgattccagttcttctgaaacaatcggaaaatgaaacattcaaaagctgcacatt

SEQ ID NO: 19025 - DNA, 2958 bp, Arabidopsis thaliana landsberg
tgatggggatggctgcgatcttctccgggttggcttcgatgccccacttggagacgatgaatcccaagagcatgccccggggtaccccgaagacgcacttttcgggattgagcttcacgcctttcgccttgagacatcggaatgtcacttcaaggtcggaaaggaggtcagaggctttcctcgtcttgactacgatgtcatcgacgtaggcctcgaccgtccggctaatgtgttcgccgaacacatggttcatgcaccgctggtacgtcgcaccggcattcctcaagccgaacggcatggtgacatagcagtacatgctgaagggcgtgatgaaagaagtcgcgagctggtcggactctttcatcctgatctggtgataccctgagtaggcatcgaggaaggacagggtttcgcacccagcggtggaatccacgatttggtcgatgcgaggcagagggtagggaaccttcggacatgctttgttgagaccagtgtagtctacacacatccgccatttcccccctttctttctcacaagcacagggttggcaagccattcgggatggaatacctctttgatgaaccctgctgccattagcttgtggatctcttcgccaatcactctgcgcttctcctcgtcgaatcggcgcagagactgcctgacgggtcgggctccggcccgaatatccagcgagtgctcggcgacatccctcggtatgccgggcatgtccgagggactccacgcaaagacgtcggcgtttgcgtggagaaagtcgacgagcactgcttcctatttggggtcgagcccggaaccgatccggatctgcttggtggtgtcgccactggggtcaaaagggacagacttaaccgtctctgctggctcaaagttgccgtcatggcgcttcacgtctggcacctccttggagaggttctccaggtcggcgatgagggcctcggactcggcgagggcctcggcgtactccacgcactccacgtcgcattcgaacgcgtgtttgtacgtggggccgacggtgatgaccccgttggggcccggcatcttgagcttcaggtaggtgtagttggggacggccatgaacttcgcgtagcatggcctccctagcacggcgtggtaggttcctcggaacccgaccacctcgaacgtcagggtctcccttcggaagttggagggcgtcccgaagcagacgggaaggtcgagtcgtccgaggggctggacgcgcttcccaggtatgatcccgtggaagggcgcaacgcctgttcggacggaggacagatcgtcagcgcaggagcctgagggtctcggcgtagatgatgttgaggctgctgcccccgtccataaggaccttggtgagcctgacgtcgccgacgacggggtcaacgacgagcgggtatttccccgggctcggcacgtggtcggggtggtcagcttggtcgaaggtgatgggctcgtcggaccagtctaggtagactggcgccgccaccttcaccgagcagacctcccggcgctcttgcttgcgatgccgagccgaggcattcgccgcatgcccaccgtagatcatgaagcagtcgcgaacctcggggaactctcctgcttggtgatcttccttcttgtcgtcgtcgcgggccctgccaccctccacgggtggcccggccctgtggaagtggtgccgaagcatgacgcactcctcaagggtgtgcttgacggagcccctgatgataggggcacggctccttgagcatctctgtcgaagaggttggcacctccggtgggtttccgagggttcttgtactcggcggcggcgacaaggtccgcgtcggcggcgtcgcgtttcgcttgcgacttcttcttgcctttcttcttggcgccgcgctgagttgacgcctcgggggcgtcttccggtgggcggccctggggctgcttgtccttccggaagatagcctcaaccgcctcctggccagaggcgaacttggtggcgatgtccatcagctcgctcgccctggtgggggttttgcgacccagcttgctgaccaggtcacagcaagtggtgccggcgaggaacgcgccgatgacatctgaatcggtgatgttgggcagctcagtcccctgcttcgagaatcgtcggatgtagtcccaaagagactctcccggctgctagcggcagcttcggagatcccaggagttcccagtgcaaacgtacgtgccctggaagttgtcggtgaaggcttggaccaggtcgtcccagttggagatctgccccggaggcaggtgctctagccaggctcgagcggtgtcggagaggaacagggggaggttgcggatgatgaggttgtcatcgtccgttccacccagttggcaagctagccggtagtccgcgagccacagttcccgtctcgtctcccccgagtactttgtgatagtagtcggggttcggaaccgggtcgggaacggcgcccgtcgtatcgctcgactgaaagcctgcggaccgtgtggttcgggcgagggactccgatccttcccgctgtcgcagcgtcccccacgcctggggtggtagcctcggcgcaccttctcgtcgaggtgggctcgacggttgcggtgatggtgctcgttgccgaggcaacccggggccgcaggcgctgtgttgcgcgtgcgctcggtgtggaccgaggcttcccgcatgaattgggaagtcgcggcgcgatgttcagaggggtacccctgccttcgggaggcagagctttcggcccgtcggaccgcagcatcctccaggagatttctgagctctctctggatacgccgcccctcggtggtagatggctccgacatcgcgcgaagaagtattgccgctgcagccaggttttggccgaccccactagaaaccggtggcggccttaccctgacgtcttcggcgatgcggtgctggatgccctgcggtaaatgac

SEQ ID NO: 19026 - DNA, 1166 bp, Arabidopsis thaliana landsberg
tcagtgaatcctgtagcctgtttaggatctttcataactttaaagcccgaccacttcacccttctgctagtcacagctcccggacccctattttgatattcgcggtagtggagagttgacagaccagtttctccttcccaaggagtccagcctgcgggatcaactaaatcaccgatgaaagactgcagaaccgcgactgttgaaaatatcctccaaggccttccaagatacgtttttacggttgttgtatctagatccgaacttgctgtgatgttgcagttttgaattgagaagcccgatttgtcgtccttagtctcgcgtgattgagcggttatgacattgctttgccccatcttaggctgtcttgctacaatctggcagaattgaaataccgccgctgcgtttccacaaatgaaatctacagtaccggtaataaagcactccctataaaactggcggtctatgtgaggatacaaggcatcctgatacccctcgacacgatatctgtaaatgacggacatatcaccactcacacggagggcaacagctggtccttttgccggcccggccgtgtttcggaagcacatgtctactccgatgaatcccttaccattagaagcttcaaacatatttttagtataattagaattgtctttaagaatgttatagtttggtataaagaagataaaactataaattattcaagaatagaacacaaactcttaccaaaagttgcagtgtagaacgttcttctaacattgctagcgcttaaattgcccgtgatgatggttgaatcttgaccatcacctataagagttaaattgggtttcgtattctcaatggcgacgatttcatcataaatgcctgtctttatatagatgatgaatttcttttggctgtgttgaggtgccgctgcaatggccgcattcactgtgctgtactttccggtcccatccttcgcgaccacaacatcagcaatcttctttagagcctgctttataagaaacggaaaaaattctataagcagtagaaagaaagaaaaaaaaggataaaaggtttgtcaagagttgcaaacatatcgatcgaattgtgttcttcattacgtgaccttaaggtctttttttatacaagggctgatctctaaggaaaaggacttatctccctaa

SEQ ID NO: 19027 - DNA, 952 bp, Arabidopsis thaliana landsberg
tttgcattcaaaacattgcacattctttaaagaacttctcaaaatcttcatcaattttatccttcttctcttttctcttttgcttcagatatttagtgaaatgtcttgacaacatagccattgaatcttcaattgattatccattaagagcaaatccaatgttaactttcttcttcactcatcctccttcttcatcttccctttagtttcatatcctttacttaattcaaaagtcagaagaatcccaacaaactcatgaaaagcaatctcatctagattatgagcttcttcaacttcaaaatatttgacacaaattttacatgtaatgatctcttcaacttcttcaccaactttttgttcttgtaaagctttccaagagcaaaggactcattaaatatgtcacataactttgcactgaaatcagccacgggttcctcttttccatccttaaattctcaaattgcgatcccaacatatccacttttgttcttttaacgcttgtagttccctcaaacatattctccaaaaaaattcatgctttttgagctgatgcacattgataaatcaacttgaagtggcttgaatcaatatcattgtaaatatcgcagtcttaattagccttaaattcaacttgatctatatcgagaacctgctctgataccacttataagtgcgtatgtggtaaaataaattgccggaataaagaagataagaaatttgttaatgaagttcggttttctgtactccacgggaccaagtcatgatttgatttcattaaaacaagaaagcaaattacaaccaattcacaaacgcgaaaacaagcacaaccctcttgatttatcgaccctttctattaacgtgaaactttaaggataatctttacccttaaataaaatctcgtgagtatagatttaatcaggataacctaactctaagctaaactccctttagc

SEQ ID NO: 19028 - DNA, 529 bp, Arabidopsis thaliana landsberg
tatattcaggattcaaccagtaaatgacagagtctatttccctaaatggtatctcaagggcttattatgttgttctatacaaactggtggctttggtagcaaattcatcaatttggacttcaggtcctatattcgtttcctcaattggatgcctgaagcacttaaaatgccagaaccggaactcgtcgatcacgctggactcgattctgttgtctacttgaggatctacttactcgggtatatatatatatatactgatctatcccccaagccctcttgttttttttttctggattaagagatttgagttcttaatggataatttgcaggctcaagatctttttccctatagcttgtgttgcttttacaacaatggttcctgttaattggacaaacaaaggattggatcggttaaggcattccaatataagtttcagtgattttgataaactctctttatcaaatataccaaatgggtcacctaagtaagaaatacttctccgagtttggtggctttttctttgtttca

SEQ ID NO: 19029 - DNA, 1101 bp, Arabidopsis thaliana landsberg
cacaaaacgattactattttttcaacagatacataatactttttaaaaagataggttaattaaaataccttgaccggcgccggaactatttgagattatggaagctagtgcaaacggaatactgaatgtaatctataaaaatacaaaaaaaaaaatagattattaatgttaacgaattataaaccattaatgacaatagtaacaaaaatttgataaaagacatgttgaacttacagcaagaggaattccaagaagagcaaagagagtcaatgctccagctctgatgccatcggtaggaagggccatcggaccagcgattctccggtgctcctccgcctttttagtaaccaaaaccgtcattgccaaacacacagcaaggatgatattcacagctccccaaagccttttagctccacctattttcttgctaataccttcaataccaagcgagacgattccaagaacgatagagttaagcatcaatcccaacgcaccaacgtgaatcccttggttgtatagtttcttcattttgtcatctccttttgagtctccaccgtacacttcacgacccatccaatcggtatcgtataaaagaaaagggaaccatgcgatccagttcaaggccgtgacgattaatagcatccacattggacgtttcatcaccttgaaagctccaaagatctcaccaaagaacggagttttctcgttgtccgagtctgctttaggcgaccattgcttgtcttccacgtaccaaagagctatgatggtgacgactaggaggagagtgatggaaaggaagaaacaactcttgagatttgcgcaatatatgtcacatgctttagtcattgggaaagggaagatcttgtagaggttagtgtatgatcctgccgcgtatcccagaacgttcccaacagccatgaagaaagagaaaaacgcgtttgctgttcgcgttttcttagcgtctccagcggctaaatcaccgaggaaagcgcgacaaggtccttggagagtgttgttagccacgtcaaggatccagataccgagagcgaagattacaacggctcgcatcttgacaggtttgtcgattttgtctcccatgct

SEQ ID NO: 19030 - DNA, 1002 bp, Arabidopsis thaliana landsberg
gagaagatgtagaaggtgtgatatggttcaaggaccgtttagtgtgttcccaatgtccagtccattccggagttgatcctcaaggaagctcatgagacagcctattcgattcaccctggcagtgagaagatgtatcaggatctgaagaagaaattctggtggtacggaatgaaaaagggaaatcgtagagcatgtggcaatgtgtgatagttgtcgacggatcaaggcagagcaccagagacccgctggattgttgcaaccgttacaaattcctcagtggaaatgggatgaaatcggtatggatttcatagtcggattgcctcgcactcgagccggctacgattctatttgggtagtagtggaccgtttgaccaagtcagcccacttcataccagtcaagaccaactacagcagtgcagtattggcagagttgtatatgtcttggatcgtttgtcttcatggtgtgccaaagaagatagtgtcagacagaggaacgcagttcacatctcatttttgcagcacttgcatgaagctttgggcacacatttgaacttcagctcagcttatcacccgcagacagacggtcagactgaaagaactaatcagatcctagaggatatgctgagagcctgtgcgttgcaagacaagtcaggatgggacaaaaggttaccttatgcagaattctcctacaacaatagttatcaggccagcttgaagatgtcactgtttcaggcactctatggacggagttgcaggactccgctgcattgggaccagcctggagagagacaggtgtttggccctgacatcttgcttgaagccgaagagaatatcaaaatggtttgggagaatctgaagacagcccaatcaagacaacgaagctatgcggacagaaggagaagggaactgagttttgaagtgggagactacgtctatctgaaggtgtcacctatccgaggagtcagaaggttcggagttaaaggcaagctagcaccccggtac

SEQ ID NO: 19031 - DNA, 171 bp, Arabidopsis thaliana landsberg
gacctacagcacatacgatggaggtggagacttgtattaaaggtttggtaagttgagtagtacggtggtggtggtggggagctgtatatgtatagtggtggtcggagacttgtactcaaactttggagaaagagagtagtatggtggatgtggggagttgtagatgtatag

SEQ ID NO: 19032 - DNA, 581 bp, Arabidopsis thaliana landsberg
atattcctaagttagaggaggcgcatattgattcgacataccctgatatcggaaagtttgttagatcaatcacatctgtcaagcggctttcattatgcgtaaaagttaacgccgaagaggtaatttatttcagtccatctatcaatctcattttacaacactaattactaaaccatgaggatgaatttttcgttatcggttgcaggctttatatcgtgagggcatttgtttcaaacaacttgaacatttgaagctatgtccatgtgattcaaactggtcaaagttacttgctcggttactcaaggattctcctaatttacgtgagctcgagatcaaactaaataaggtatatttttcgatagagtccttttcttttggttgattttactgtagttagcactcatgcctaactctcatgtttgatctcaggatcataaggctagttttgacgatccagcttgcttggagaatcaactatattatgttgttcaatcttcaataccgagtcttgaaaggttcacatggacatggatatatggatcgcaaaacgagatagattatcttgaaaaacttaagaaacg

SEQ ID NO: 19033 - DNA, 501 bp, Arabidopsis thaliana landsberg
cgtgattttgtactccatgttctatgtaagaaagggtctttcaaatttcctacaagcttgtataactgtgaaacattagagagcttgacactcgggacttgggtactcgttgatgtcccgtctcaggtttgtctcaagtctcttagaactctgcgtcttgagaatgtgaattacaaatacgatgattcggtttataaccttttatctggttgccctaagcttgaaaatttggtactgtatcacgaactatcggatatggagactttcactattgcagtgccatccttacagagactgacaattattgatgcaaatgatgcacaaggttatggtggctatgtgataaatgctccttctttgaaatacttgaagattgacgggtttaacactcctaagtcttgtattattgagaacgcaccggagttggtggaagcaactataatgaatgtctctaagacaatcaatgagaagcttctggaatctctcacttagtcaaacgtc

SEQ ID NO: 19034 - DNA, 1184 bp, Arabidopsis thaliana landsberg
atgtttatggtttgcaccaattaaacccaacaatctttgcatgtacaatatgacttttatctctaagatcggaaattgtaactttgcaaacatcaaaatctttagccttagcaattaaattttcattttctaatctaagactagcgagagaaatgttcaattcttcaatcctagcaagcaaatcatcattattatctctaggattggaaattgaaacattacaaacatgtgaatcaaccttagcatttaaactagcattttcatttctaaggttgtcaatcatctcatggcaagtgcttagctcactagatagtttttgacatttttctacttctagagcataagcatttttaaccttaacatgtttcttgttatctttaattagaaaatcctcttgggaatccaaaacgtcatctttttcatgaatagcactcatcaattcatttaatttttctttttgctctatgttaagattggcaaagaggatgcgcacattattctcctcatcactagcattatcatcactagaagactcatatttagtggatgatttggatttaaccttcttctttttgtcgtccttcgccatgaatcatttgtggccgacgttggggatgaggaggcccttgttgatggcgatgttggcggcgtcctcgttggaggaggagtcggtggagctctcgtcggagtcccattcccgacacacgtgggcaccgccgcccttcttcttgtagtgcctcctcttttccttcttcttccccttcttgtctttgcccctgtcactatcactagacattggacatttagcaataaaatgaccgggcttaccacacttgtagcacaccctcttggagcggggtttgtagtccttccccctcctttgcttaagatcctgatggaagcttttgatgatgagcgccatctcctcgttgtcgagcttggaggcgtcgatggggagcctatttgatgtagactcttctttcttctcctccgtcgctttgaatgcgacgggtttcaccgcgagtgtggaggtgccgccttgctccaagttgacgatttgtttggagcctttgatcatcaattcaaagctcacaaactttcctataacctcctcgggagacattagcttatatgtaggatcaccacgtattaattgaacttgcccaggattgcgaaaaaatccc

SEQ ID NO: 19035 - DNA, 3066 bp, Arabidopsis thaliana landsberg
  unsure (1)..(3066): unsure at all n locations
tgtctatcatagccatctcaagcaaataaacatcttactataatcaagtttatccccgcaaaactttcagtaattacatgattaaagtggaaagatgcaaaaagcgttacctttatccgtcgaagttgtcttgtagcaatctggtgagatatagcacattagtgaattacaagaaacaaaaaaatctcagggcctaagttctttacgatacctcattttcttcactagttcctgaagctaaggtttcaagaactttgatccttgactggtacttctcctcacgagctttaaacacactgttttgctgcaaaaaagagaactcagaatataaaacatttgaacacaatttactatttctccgaagaaacaagaaataccgttcttagatgttcagattgagttgaaattcgtcgctcgatttcctgcacgacttttctcagcagacatgctacacgctgatcattacagattagatcaaaagatgtcccaagcagcatttgaaaaatgtgtgcatgcatatttgcttttacaagcacgtagcatccataaaaatcatggtcaggattgttagagactcaagtacctgagggagttcaccattctttctctcaatagtttcatcaagaattccattaacgatacttagaagtgactgtgtgggagcattctgcattcaacagaagcatatatagggtattattataaacaactttgaaaaataaactagtatgacaaagaagagaaccagagcctaggaaaagcatataaaaattcattgataaggtacacttaagcttaagcagcaatacatctaaattgtttgatttcatcagttctgaaatcttagcggcttggagatcaaatcgcccctgtttcatttggaaagcctcgtgggacttgtgtcctccatggagcattgatccaggggatgatggatctgtggtagaaataactcattacgtcatattataaagagaccttttctaataacataatgcagacaaatacataaaaatgtacctagagctgaagaattgggcaggggacgttgaaatctggaatccgccagacctttattatgcctttcacgtggagatgatggagagaagggactacggggagttgaacctccatgagagctgcctgattgatcagtgagagaattcatcatcaattcaccaaaggcaaacttatggaaacacttgataaagccacaagtccttcattctctatcaacaaggcctgaaaacacgattgttatataaatcatcaaaccaaatcacatacaaagaagctacaaaacataaagcctagaggaaactaattgaaaccagggaatgcaacaacatgatcaagtaaaaccatgctaatgaaatgcaaggatcattcggatctacctagtagcattctcaaaatgcgaataaagaagaaaatagcagaagagacgaacctacctggagaggaacagaagattgctcttttggtgcaacaagagaagaacggcattgggttcaactaagtcaaaaaaaaaaaacacagtacaattcaccattcagaatatccgatcatgaaaaataaccacaggggaaagcaagatcatctctccaaacctgggaaaatcgcaaggagaagaccaagtcctaacctgccagaagaaaacacagagacgtggatttgtcacgtcaatcagactttttcagactttttttttttaattgataccaaattttccttcttttttttcttcgtctctgtagcgcgaatgtaggaagaagcgcgagtatctctgcttctccagtcgtttatacgggtcgggtcgggtcgggtacgaccaggccgggttttaattttggagttttcacttttagcccctgtaatttttgtgtattatgtattgttcgtagtgttttttgtttattgcagatgtagtacctaactttgtttcgaatttatactttcttttttttttggttaataagtaatatatgaaaatcaaatggatttctcattatggtagtatatcaaaatcgaatggattttctttggtcttcttctgtgctttgtatggtagtacacagcaattcctctgtaaaagctcagagcaactatagaatgtatcgccaagttccacgtcctctgaatcttcatctgatgcaactaaatcttgtcccgaggaacttgagggaagagctttaatttgaatttcctcagactcacagctctcagcaggattggtattcaaggtcaaattatctaacatctgaacagagacatcgtcagcctcaactgactcatgaaggttatcggaaatgggacaggttgattcttgttctgtagcactttcaaaagcatgttcacgctgaaattcagattccaacattgcttctgataaccctgtaaaacaaactcaaatatctcatgacatgctgcaccaagttaaatgattgactgattcattactaaagattaaacttaaccaagatcagatatctcttgcttgagcttgcgaatggctaggcctgcttgctcctgtcctcttttatcacgcttcttctttgcttttatagcatctgatcttgccgaatagtattctttggcaatcacatcgaatggccttggaccagagacctagtatgatttttgaaatcaagatatcacagcagagagagacataaaaccaggaaaacaagaccaatatggtattgtacaactaatttgactgaagtttgcaatttcacataatcatcataaacaaatgaagaaaagttccacttctaccaaatgggaaagaaaatatattgatagcaggtagccacaaagactccaaaaattgaaccaaatatcttactaaacctctgccataannnnnnnnnnnnnnnnnnnnnntttttcagaaaaaacaacaattcattaaacaaattcaagagcttccagatattcatagttctgtaaaggtctaaaaaacatgaggaatatttacccttgagcaacatgcatgaaagctaatatacaaggacattgcaaaagtgtaaccacataaacatccatctcggaactggtctcact

SEQ ID NO: 19036 - DNA, 1765 bp, Arabidopsis thaliana landsberg
  unsure (1)..(1765): unsure at all n locations
tcagatctaaaaatgttagggtttagggtgtttaagctttttcaatgggctttgacccaaaaccttcaaaatccttcttttttttgcttcatgcattatttccagagacaaaacccttttgttctgtttttttttaaaaatttaaaaccatcggctattttatctcgttttcttttgatttcaatgtctctttctgatttgatttcccaattttatctacagattgcgaattacatttacagaatttcgttgattggtgtgataataagccattgatcaacaatcttcttttgtggcaatcacataatcgtgttatgcattctgagaaatggtgtcgcataagtgtgtagaagaatttggatacgaaagctacctcttaccttccaatgctagagcacccagatccgcccgggtaatggtctttaccactcacgtttttggtttaggtttaagtagtttatatggttacttacgtttggtttcatctttttgaccagaagaggcgcagtatcgagaagaggataagtaaagaagatgataatatgtgtgcaattgatttattggccaccgtagctggacacttgtcatttgagagtgggagttctctcatgtctatcgacaaactgattgaagatcatcgtgttaaggaggaattcccggaggaagaaaaacctctaatgccagtagctttatccggtgaaaatccttatcaaggatctttgagtccctgcggtttcagttctgtgataaatggcaaagtagagaatgaggtagatggttttagttactctggtggtagcgatgcttgtcaagtcgggaactttagtgatgatataaaacccgacgcagtagttctggatgcgagacctaatgttgtagttagtttaggtagtagtagtagaaccgaagtgccgtcaattgggaactgtgtttcccatggcgttcgggatgatgtaaatttgtttagtagagatgatgatgaaaacttttccgagtacattcgcccgcgtgttacaaaaaattcacctaggactgtgccgcgtattggtgacagaagaatcaggaagatattggcttctagacattggaaaggaggttcaagacatgcaggtagtagcccatctaaggggtttttctttgtttcacatcttaaatacattgattgtgtttgttttgaggacatgtatttggtgttgcagatacgaaaccatggagaaattattacttgcaccagcagaggagctatcctatcaagaaaaggaaaaactttgaccacatatctgattccattactgatgattaccgtatgcgtactaagatgcatagaggnnnnnnnnnnnnnnnnnnnnnnnnntctgttagatcttgtagctagctttctctttgttgttttaactagatcttgtaaatttaatttgcaggtagtagaaaaggtcaaggggcatcctttgtggcaagcgactcccatggtaacaatggagtctcatctgaattctttgtcggtgttatttacaaaagcggagaagctaacatgagaatgtttatttcagtgaaactacggatcaagtcgttcagggtgcctgagcttttcatagagattccagaaactgctactgttggctcactgaaggtaacattacacagctcttccttacgcctactaattagaaagtaagttctcatggacttttgcttttgcanagaatggtgatggaagcattgagcactttactgagtgatgacacccagtaggactgatggttca

SEQ ID NO: 19037 - DNA, 447 bp, Arabidopsis thaliana landsberg
agctttcatgtcaacttgtggtaaaatacataatttcgttgacataatacttggcataatagcggatctcattagttaatttttggaaagtatctggggataataatccaacaggacatttttcagtttgtaaagaatgtatatgggaaataggaaaatatggtgataacggccatatttgtcgtattgttcgggaagggggatatttgcctttttgttttaaatgggaagatggtccttaagaaagaaaaaaaaaagtttctgttttcactataatttatcaaatcaatgtaaccaagaggatgattgaataaatataataccatttataatgtttgaatgtttaaatgtttataagctttctttatttgaagtcgttatgtatacacataagcaaactaaaaaaaaaatattagatggattatactattcattatatgattgata

SEQ ID NO: 19038 - DNA, 467 bp, Arabidopsis thaliana landsberg
ttaactaatagagtagccggctcaatgctatccgactgtaaagatgccggtaataaggttgtttctgcggctgctgaactgactccctaggtgggtgttgttgctgattaaatacaagagtaaccccgaacggcgatcagcgttgatctagttaaaaaaggcgatgatgatgtgcccgtttcttctgcgatttcaagggatatggatgctttatgcgttggtcgacctatcactgtcatggtcatgtacttttgcgtgtgatcatcttgaccctaatgatgtcaagcatcttttactcggttgtgatacctgtgtgggtgctttttagtgcccctcatccggttatgactcatgtgttgcttacggtagcgttgtgcctgccgaggggtgtctgcactatagaggtgtcaaggaacggttctcttgattaagagctactcctatattctcacctatagaagctacag

SEQ ID NO: 19039 - DNA, 256 bp, Arabidopsis thaliana landsberg
attaaaaaaccacatcggcatttctataaatagttaacctaatcctttacaccacattttacattctgcaaaacttaatcctcaatctgtgattattggtgcatcgttacagcactgattaataccatgtacatatgattgctcactaattatgcacaggatacattcctagagcatgatgtgctgtaaaacgataaagcatggatttgtagctaagattgaaaagttacacaagcacgttaattccgtactatgc

SEQ ID NO: 19040 - DNA, 655 bp, Arabidopsis thaliana landsberg
gctttcaaattgatcaaaagaatcattgatctctgctttaattgtcacgcatcctaattgggatcacccttttgagaatcatgtgtgatgcttcggattacgctgtgggagcagttctaggacaaaggatcgataagaagttgcatgtcatctactacgctagtagaacgatggatgatacacaagtaaggtatgccactacgtagaaagaactataagttgtggcctttgcattcggaaagtttaggaactataagtgacagtctacactaatcatgctactctaaggcacatctatgcaaagaaagataccaagccgaggttgctaagatggattctgctgctccaagaattcgatatggagatagtggataaaaaggggatcgaaaatggtgtagctgatcacttatcacgaatgaaaattgaagatgcagtccctattgacgataccatccctgaggaacagcttatggtcatccaggaagtgaacaaaaaattcaaaagcagccagttttgggatgagatgcttgtagtagaggagaaacttccgtggtatgctgattatgtcaactatttatcatgtggtgaagagcctccaaatctttcaaggtacgaaagaaagaagttcttcaaagacataaatcgcttttactgg

SEQ ID NO: 19041 - DNA, 839 bp, Arabidopsis thaliana landsberg
tagaggatccccaacctctccttcaactgaagatattttgcttgctttgagggcaagcaagagataagtttgggggagttgataacactgtattttactcatttaggcatgtgtttatcatcatttagcttagtgatcactcattgtttcatatcattttgcatcacatttagcttattttgcacacttaggcatttaggatcatcttgcatacatattgcatgttttggtgtgttttcaggtgcagaaggagcttacaaggactctactcgaccctctaccctatccaaccaggagggaagcagcagaacaatctactcgaccagttcactcgatccaggcagccatagaggaggcatcaattcactcgacccacttactcgatccaagtagccacagaggaagtagcagatcggtctactcgcccctcttactcgatcctctactcgacccatttactcgaccaagggcgaccaaatctactagactttttgatctatcaaagcgtcttcggatcctcctcattctccactcaaccagacatctgagcatacagataggagaggaagaaacatctactcgaccaattgatcactcggagcatggacacaaaggcgcagactttgcagcaccctctttactcgatctccaagatcgagcactcgcccaaaccgcctcaagtctcttgtcttctagtgaatctagggttttcaacattttactataaatagatcactttgggatttgtccaaaggatctaagcttttatctttaggttttctttgggttcttgaatcttcaaaatttaattactcttaatctatttagtttttggattt

SEQ ID NO: 19042 - DNA, 1432 bp, Arabidopsis thaliana landsberg
aagaatttaatctagctctgttagctaaataacgttagcgttttatctgggtaccaaactctctcttgagtagggtcttgagggggagatactttcgatatagtgatccattacatataggagcctcaaatcgtccgtctgttggatggagaagcatcatggctgccaaacctcttcttgtctcgggacttcggaggaccataggttcgggaatgctgacccgtgtatgagaagatccatggattcccaccatccttgtgtggtccgcgacgagcattcttaacataagagatcccctactctatgtaaatgtttaatcgaccaaaacacaaatttgtggaaactagaccgtctccaagcattgatcgaccccgttgatatttcacctcatttcagagattcgcccaaacggtatctacttgagtgatggttatagttggtcttatactaaatccggtaattgtactgttaagtcaggatattgggccgcacgtgacatgtctcgtcctacttgtgaccccccttttcaggaccaggtgtttcagcacttcaagcacaagtatggaagcttaaaactacgcggaaacttatgcatttcgcgtggcaatgtatctctggttgtttagccacttgtcaaagattgacatatcgtcacaagggtacagataaaggttgcccccgatgcagattaaacagaagagactatcaaccatctccagtttcattgtccaccctcgagacagatttgagcattatcgcatattcctacctcacagaatatttttcctagaaagtcccttttctataatttcgatttcttttttggcgtggccgggaatttggaatcggagaagaagtgttggaactctttccatggatactttggtatatctgaaaaagtagaaatcgatttttgttcgagaattttaaagaacctcctttggagactttggccttggcgatcaaagatgcaattgcctgaaaacaagcaaaccaaaaagaagtagccatcacagagtctatttcacttccggttctggcacatctccctccccctaggacttctgagtgtcagtttgatgcttcttggcatttggaggatactctgagtggacatggatggattttagttgatcaagatattactcttcatcttggcctcaaaagtacgaaaagaagtctatcaccgcttcatgcggaagtggactccttgctttgggctatgaagtgcatgatatcaattggcgagacctctggagcctttgcatctgattgctccgatttgatatctcttctcgataaccaagaagaatggccaacttttgcagcggaattggcctcttttcgatctcttattgttttttttccttcttttcgtattagatttattcctcgtagttttaacacttgagcagaccttttagccaaaaaa

SEQ ID NO: 19043 - DNA, 495 bp, Arabidopsis thaliana landsberg
acaaaacagcccactccctgaataattgggaatcttttgttgtcgaatataagatatacacgaaccaacaactataatatcttcttataaatcagctcaaactttggacaattttgaataattcatatttttattttattaaaaccaacagctaaaatatgttcctataaatatactaatcccatcaagatttatctttacacaaaatattatgaactaaacacattttcttctttcaaaaacaatagttgttagtcaatcatgagtgaaagataatatttctctctacttatatgaagatgggaattatatgaagatcgtccgtgatcaaattgctgagcaaatgtggtccgcaagtcgaaatagttctcatcgacatcgttagattttattttaaataatatttttttatatttaactattcagctaaatggttactatttaacatactttttatttctctgcagctaatttatctcatttagcttatttttg

SEQ ID NO: 19044 - DNA, 1254 bp, Arabidopsis thaliana landsberg
caaaaactaattttaatgtaatttaccatgaaatttttccacttgaaaagacataatacaattatgtatctgatttttcttttaacgttgaatattatcttattattttaaaaaaacaatcaaattaaacaaactcaacaacagaaataaattaaacccaacaatataaacaaattaagcctaatacggtaaaccgttttggaagagataagcaaaacagcacaccagacgtgtcacctcttaagaaaagcaaagacacgactagaggagaaacgctagatccccgaaagagatagatcaccgacatcgttctccaatgtcatagagctccaaaccagtaaacccgaaaatcgtcatcaattaaagccacaacgttttacgtaagaactctagaatcttcatccttcaaacaacaaatctttatgtcaaagtgaaattcaaattggactagagcttccaccgttaaaccagagaaattaaaacaaaatccatctacccaaaaagcatcagtaaaattgatacaaaattaaatcggaggagaaaataaaaacgaaatatagataatatcggatctaaaaagtagcagattcgccgaagagatgaacgatgaaactactatagaaaagtcagtcatcgacaatgaagagatagctcatcggccatgcacgacaaagctgactcaaaccgaaaacaaggcgcacatccaggggcggatccaggacctaaattaacctaaggcacaatatttcttacatcaaaatattaatacttttttacaaatgtatcttacttttttctgtttgaaaccttttcactactatctcatttgtcattttgaacaattatgttataacaaaataaagcaaataacgtttaaattttgtttagcccaactatacctcatatatcataactaacgtttttagttgttggtatttatgtgggctgaaaacgtttgttttctttaattggctagctaataaggcattcttaatgttttctttgtattgttaacgtagggtattgtaatgtctataacaaaattacttgaaagaatgtaaaagagcataggacacgtgcccaccccacttatgccttggatccgccactgcgcacatcgccataaaaagaaacggctgatgatggcataaaccccggctataaccgctaggatagccagttaatgacggacaagagctaaccaccgctactgaaatagctatcgatgtcaggtggttccgaatataacagaac

SEQ ID NO: 19045 - DNA, 2695 bp, Arabidopsis thaliana landsberg
attaaaggttaaaattcctgggtggtcttactctctttatccgcttgactaaaaaaaattggcgtcgagtgatttagacgaagaataagaagaaaatgccgtgcctcaacctctccaccaacgttaaccttgacggcgtcgatacatcttccattctctcggaagcttcctccaccgtcgcgaaaatcatcggcaagcctgagaacgtaatccctttttctctctcgatttaacctctagttcgtttcgttctgttcgaattttgtttcgattcttcgttttctcctgagatttgccttgtgtgcgtctttatctcttaatcattttcttctccttattgaataacagcgattcgagtgttgttttcttcacatgcatgatatagaaaccctaagcaattttatctcgttgctccgttctattctagtggttcacatttccggagtcttctcttgacttatttgtacaatcttcgttggggttcttcttttttattttaccacgatttctaggccattcctggcccttgaatttctcattgctgaagtttgttttcaaaaacaatattggtctgctttgacgattgcttgtttatgttagtgatgtttaaatatttttgtcctgtaatgttgtttcttagatcattatctgattgcattgttcattgtggtaatttgcagtatgtgatgattgtcttgaaaggctcagtgcctatgtcatttggcgggaccgaggatcctgcagcttatggtgaattagtttctatcggtggccttaatgcggatgtgaacaagaagctaagcgctgctgtttccgccattcttgagactaagctatcggtgcccaagtctcgattcttcctcaagttttatgacaccaaggcaagcaattccctctctctgataacttttttgatgtagtgacataacatatgcaaatgtgttaatgatttcatatgcccgatatgcgtccatgtctcattttcattgttcgttgtctctctaggaccatcaaagtcaagaatatgcacaatgtttacacgctttacaccagcactactaggtcatgaatagggaacaaatacatcttatgtgtgtaagttcatcatcataagacggacctataacttttactcataaactaggcattataaacaattaaatcaaatgcataaaccgtttccactactcgaattcaatatttacacccacactgttgagttatttaggagattcgttcaacttctctaaatccgttgtctaactggcttagagggtcatccatcatctggagtgtttatgcctataaccacctgatatatcaattatacatttcttttctcgtgtggttcttcttgcagggatccttctttggttggaacggggcgactctttaattccgtggtaggtgattagtgtgattgtcttgaaatgtatgatctactctcatcgatcaagtaactttgaactacttcgtattgtaaacatatctaaggtttgatggagttgcattaagaaataacatttatgctatatatgatgctacaacttactatcagggtaaacaatggttatttagtctttgtctactcgttagatataattatgtttagaattcgaagatgaatgttatcaaagaaaaaaggatttgacattgtcaagtctactactccatatgacagatcaacattgtgttaaaaatattttctattagggaaacttcctgtgactggaacattaatggtcaaatgcactttgcctaagtaatcaagaattattgtataaactacgttaagcaaaaaaataacctgagttataatatcaggaggttatttttatttttattttagcaaatgaatatagattagctatcagatgaagcaaggtgtataatcaaagttgaaagacgcgtaattgtgatcctatatatacataacactaccgcaacttcagcaacctctaaatcattcgtctcctaaaattttccaatctcaaaatccctaaagaacaaaatcgaatggtgtcaacaaatccccctgttcttccaatttccaccaccgcaacagacaccaccaatcagcctccgattgtaaccgctgtggtggaatcgcaacctccagtcgtccgtgcatttgtcaacggtgtgaccgagacggtctgtggtggtctatctcgtagccgtccgtggtcagagctcctcgatcgatccgctttcacaaagcctgactctctttccgaggccgggacgcgattccggaaaaattcctcttatttcagggtgaattacgtttgcattgtcgctctgatccttggtttctctcttctcgcccacccattctctctcatcctcctcctatgtctcgccgcttcctggctcttcctctacctcttccgtccatcagatcgtcctcttatcctcttcggccgatctttctccgaatacgaaactctcggtggcctaatcctctccacgatcgcagtgatcttcttcacaagcgtcggatctgtattgatatccgctctcatgatcggaatagcaacaatctgtgtccatggcgcctttagagctcccgatgatctcttcctcgacgaacaagatcatgccgcctccggattcctctcattcatcggtgttcccgcgatcccctctgtagcaccctatgcctcctcagcggcttcccccgtgtaaattaccg

SEQ ID NO: 19046 - DNA, 748 bp, Arabidopsis thaliana landsberg
acaggcatagttatggagctctcggtaagcatttgaaagattgtcgacatctctggccgatctacaggttctctcttgaacacataaaagtccgatatggatacatcttatgacttcattattattgtagctttccttaatagcagggtcgataagatctaaaggtgaatcattgttccaaagcctccaaacctgccaagaaactcatattatcaaaattctcgatggtcacaatcaagacagagtaatattttggtttggtttttgctcacatgtgtcaccaaattgccaccagaatcatctatctgatagaagctgctgttcttcttgccacatacaatttccagaatcaatactccaaagctataaacatcagatttggtagagaattggccacgcgtcacatactctgaagacatgtaaccactgcaaataaagattcacattttagtctacaaacaaccaccaaacggagttttttttaattgaaagcgtacaatgttccggcgattcttcttgtgttggcttgcctttgatcaactccaaaaatcctcgccatgccaaaatctgcaatgttggggttcatatcagcatctaagagaatgttactcgctttgagatcacggtgtatgattgtaaaccgtgaatcttgatgaagatatagaattcctcgagcaatccccccaatgatattgtaccgtcttgtccaatctagttcaccgtgttttgcagggtctgtacatttgcg

SEQ ID NO: 19047 - DNA, 706 bp, Arabidopsis thaliana landsberg
ggtaaacttgcatttatcaactacatatacttttttggtaaggattttgagagattttgagacaaaaatcttaaaatagtatttagcttttattttctacaaaatctttttaagacaattattgttctagatttatatctttaagtaaattttatctttatttaactatattcaattaattgctaatttcctaaaatctttttatatacattatatataaatatatgatttttctttcacttttatttgttctgatctctaatttattttgatttttatataaaatacatatagttaataaaatattaaatttattgcggcatatgtaatttaaattttttaaaacaaacatatattacttaatcgatgaaaaagtgtataaggtctcatattgcttaaaacattgtgcaataaattatattcatactattaaaaagatcaaaataattttgaatacgaattagcaggaagcttgatttatcagaaatccaaaattaaaatgttattcggtttagtccggttctttattttaaaaaataaaatcattaaaaattcaaaagattacaaatatttaaattttattaaatattaaaaatttaagacttttaaaaagttagactttataaaacattttaaaaatttctaattttatgaagatttaaatattgaactttataagaagtttaaatattaaaaatacttaaaa

SEQ ID NO: 19048 - DNA, 626 bp, Arabidopsis thaliana landsberg
  unsure (1)..(626): unsure at all n locations
ctatgtnnnnnnnnnnnnnnnnnnnnnnnnnnnnnnnnnnnnnnnnnnnnnnnnnnnnnnnnnnnnnnnnnnnnnnnnnnnnnnnnnnnnnnnnnnnnnnnnnnnnnnnnnnnnnnnnnnnnnnnnnnnnnnnnnnnnnnnnnnnnnnnnnnnnnnnnnnnnnnnnnnnnnnnnnnnnnnnnnnnnnnnnnnnnnnnnnnnnnnnnnnnnnnnnnnnnnnnnnnnnnnnnnnnnnnnnnnnnnnnnnnnnnnnnnnnnnnnnnnnnnnnnnnnnnnnnnnnnnnnnnnnnnnnnnnnnnnnnnnnnnnnnnnnnnnnnnnnnnnnnnnnnnnnnnnnnnnnnnnnnnnnnnnnnnnnnnnnnnnnnnnnnnnnnnnnnnnnnnnnnnnnnnnnnnncccccccccccccatggtggggggggttttttttttttattataaaaaaaaaaaaaagggggggggggccgccccttttttttttttttttctcccccgccacacaaaaaaaaaatattttttttttttggggcggccccccccccccctctaataaaaaaaaaacacctcttcctcaataaactcccctccgaaaaaaaaaaaaccccccccccctttttttttttttt

SEQ ID NO: 19049 - DNA, 435 bp, Arabidopsis thaliana landsberg
  unsure (1)..(435): unsure at all n locations
caatgccattgattatgaaatctctctagagctttctaagatgatgaccatgcccacaagagtttttatcgtccacatgccctcttctcttgcctcaagagtctttactaaaattaagaagattggtttgatgaaaccaggatatgtttggatccttaccagtggagtaaccgatgagttaagtttggtagatgaggcgggtattgaggctatggaaggggtattgggtgttaaaacttatattcagaaatcaaatgacctcgaaaagtttagagcttgttggaggaagaagttcccagggatggacctgaatgtctatggattgtgggcnatgatgctaccatcgattggcaatagctattgaagaagctggaacagataacatgacttttagtaatgtggatttcggaaagaatgtgtctgaacttgaagctt

SEQ ID NO: 19050 - DNA, 516 bp, Arabidopsis thaliana landsberg
  unsure (1)..(516): unsure at all n locations
aaaaatgaaaataatgatgngtgaatnagaaanactttttnattcaaatcagngagnggaaaaacctaggtagcgcttcttcttcttttaatgagttatgctaacaaacgaaaatatacaaaacgaatcacaaagaggaaatacatttattcgctcaactattaaacacaaccaatgtataagaccatattttggctctggaccccttttattttatgtagagcactcactgtacagtcgttaatttctaagaaagggatataactcatacctaaagttacagctcgtacccaaaactctccctccttgctttccttcacagcactttgaaaacatcttgaaaatccattcgaaacacgcagcagaagttgtagtcactaagtctttcgtacattgcaccattgcatacacattcttcgttccaattctcttatcccctgccgcgtacagcacaaatttattgcctatcatgttacttttatcaggggctttatttgttagctcctccaagagagc

SEQ ID NO: 19051 - DNA, 1334 bp, Arabidopsis thaliana landsberg
aaacgaacgtctggaagctgcactagggagcagagaaagaacaagcaatgttgatctaaggagattagatcataaggggtgagagaaactgtaaagtataactgtatatgctttggggtagtttttcaagtagtacatgatggagagtgagtctttagctagagaaaagttttagacgttcactagtattatcctgtaatcaccctctttctccttcgttgtgaacaaatacttgtgtgctcctcttcttcctattctgctctgttatttcctctacttctttatatcttgcttactctgtttccgtgagttggtgtggatggcaaaggtttaagcttgatgtgtcgtagagtttaacaaaacctaagagtatctccatcaaggagaaacccaaaaagtttctcgaacaagaaaaatattagtattttattataattttattatatgattaaatttttattttagtgtaaaaattgaatcaattaaaagaagagaaatgtaatgatggcttgtagagagtatctcatagtttctcacttgagaaactttctacactctctcttctctttttattatttctgttattttaatagtgaaaaactctcttgagagattaccaatgtagatggtctaacaatacatagtctttgcaagccccagcgcaattgcaatcaaattcaccatcatgattgttcatggatgaaccatcaaaaagcttcatatcacaacatccaaaaaatcatccataaaataataaattatttagactaaaatatataattattttagacccaaacatacaacaatttttagtatttttacccattgtgatttagatcaaaactacacatcccaaaataaaaccatggtaggcccatcattgactatgtacaaatgtgcgttgacctttttctcgtatcacacaattctctccgaacccaccaaattaagaaacatggcaaaaactaggaataacctaaaaatagaatgaaagaggaagaaaagaacttaaaaatagaataacagatgtaaaagaagagttggataaaaaatagaatcaacccaaaaatacatttctcaaagctctttaaataaccaattttcaatttgtttgtaacaattaataaccacgagaagagaagttgagaaagaaaaaatagtaacgatgaaaatggccggaaggatctttttccttttcctctccgtctacgtcacgggggccatcgccggtaaagcttcaccgccaacattcaccgagaaaggcaaagccctagcggagatactctgcgagaaatccgaagacaaagcgttttggggtgaagcctaacgtcccg

SEQ ID NO: 19052 - DNA, 1672 bp, Arabidopsis thaliana landsberg
  unsure (1)..(1672): unsure at all n locations
agacaactaacaaaagggtattgaaaacaacaataaatttgttgtcagatggtagtgcatgtcaattgtgtgagcactgtgtttcagatttgcagacgtatggaattatatcctcattcctccctttcaaagatcaaaactttgaatcaaaattcacaaaactgaagaagaattaggatcagaaaatatggcaaatcaatcacgaagatcagaccccnnnccacaaaacattattgccatttcatcatatccatacacaaccattataacagaatcataataaacgatttgagagaatcagacaaaaatagtcaatcaccatgttacaaccatcgtaatggatgcagattaagcctggggcgacaatttcatatcatcactttcctcaaaaacattaaacgaattacgaaaataacaaaatctaagctatacgaagaagcatagacaccaacaacacctaattcactaaatctaccgaatgagagataaaaatcaaaactttatttggccgtcgataatttattggatgaagagaaggttagggtttaggctttatatagaagcagaagactccttaggtttttagggtttctctcttcccaccgctttatatatgggcctagtttattataggcccaatttatatccaaataaaatccaaaaggcccataattcgatcgtctctcttcctctgttgtacaaaaccatttgttgtacaaaaacaaaaactcagctgaccctctctcgtctcatttcatcgacgggagaaaatccgatatcatctgagatttccaacagtgtcaaattgagatgtctacaggtattattttctttctggggatagaaatgcagataacttgttccatgtatttactcaaagagcttaaatagagtnnnnnnnnnnnnnnnnnnnctgctatcaatcctgctttagtgatgatccacttttctattatattgttttgcttgtcaatgtcatcttcttgtactaataggaaacttggttgtcttgtaaaattcagagcttgtgttgttttcttaatagtaagctttattctaagatcagttgatgaaacaagctttcttcttttcctcaggaatatcctctgatctccacctccatcctagagctctgaatttctccaaaacctccaaatctggttacttttcttggcttttggttttattgagatttcactagaatttgtgtgtgtggttctctttgtttccggtatattgctgaatcttgccactgatctcttgtttcttactggatatgctcaggtttaagcaatcgaaaggtgtctttttcaagtgtcgggtatgctcagaacaggaaattgagctgcagtgtttccagcacagagaatgtagctcctaaggatgatgacagaggaaaggatagacctttggttaagatgtgtggcatcacatcagccagagatgcagctatggcagttgaggctggtgctgatttcattgggatgattatttggccacattcaaaacgatccatttctctttctgttgcaaaggatatttcccaagtggccagggaaggtggggccaaacctgttggtgtttttgttgaagatgatgagaacacgatactcagagcagctgattcctctgaccttgagcttgtgcaggttctctacattaatatcgattt

SEQ ID NO: 19053 - DNA, 1150 bp, Arabidopsis thaliana landsberg
gaaaaaagagaaaaaaaatttgattgacgttccgtttctctaaagtctctggaaaagatcgccagagatttttatgaggagatctttccgaacgaacgaattggtatctactcaaggatgttgccagatatagaaaacttgatctacaagcaacagtggggagtcagaagcatagggatttggggtatgccaggcataggcaagactaagcttgctaaagcagtctttgaccaattgtctggtgactatgaagttacttgcttcatacgaaactttcatgaaacctttcataagaagggacttaacggtttgctgcaggaacatttcaagaatattccaaatcaaacacttcaacaaagagttcttgttgttcttgatgatgtgaaaaatcatctagatgcagagtcttttctcggtgggcttgtcttgtttagtcctggaagcgtgatcatcataacctccagcgataagcaagtgctttctcagtgtgaagtcaatcaaatttacaaagttgaaggattaagcaagcatgaggctcagcaactattctcctggtgtgcctttggaaaagatgtgagagagaagaatcttcttacggagatttctttgaaggtgattgaatacgctaatggaaaccctttagctctaaaactatatggcgaagagatgtcatcacaagagcaaccgaatcaaaaggagactttgttcctcaagctcaagcaagatcctccacaacagattgtggaagtaatcaaaaagtagcttcaatgaagttagtgaccacgaaaagaacatacttgtgtatattgctttctttttcacaggtgaaaatgttgagtatgtctcgaaacgactacaagacctaggtctctttccagatattggaatcaaccggcttgtgaagaactctctggtgaccatttcagaaaacagattgaaaatgcatggcatgatacaggcggtagtcaggcaaatcgggaggtgccctaaactcaaaatcaatgaagaccccaaaacaagttttaaatgtttattggtgagtattctaccatcttccatctaaaacaaaatgtcttaatgttagcttattgatcatccatatgctaatctcttgtgtgttttcagggcactgatgatattgaagccatat

SEQ ID NO: 19054 - DNA, 506 bp, Arabidopsis thaliana landsberg
gttttgtgtggctctgtggtgggattctgatcagtctgaggaggtgtatctatgcttgaagcaatgcaactgataggcttagtaagctctgaaccatccatgccaaactccatctccaaatcacaaaccttgagagagattctctctttcttcacatcaaacctagcaccagttgtagctaggaatgctcttccaaggataagaggatccttgggttccttctcatagtccaggaccacgaaatcagcagggataacagagttaccaaccttaacatgaacatcttcaaggattccttcagggattcgcttggaacgatccgcgaagagaagagtgatgcgagtaggtctgtagtgagtcatgcctagtctctcagcaaacagacttaggcatgaggttgatgatggatcccatatcacacaaaaagcggctaaaactgcttctggagatagagcaatcaagaacaaagctacatggatctacaagctactcagtggtctgaccag

SEQ ID NO: 19055 - DNA, 2254 bp, Arabidopsis thaliana landsberg
ttcagcttccaatctaaaattcgggatccaatccttgagcagaggatacgcatttggtcgcaaactcatctcctacatattccataataacccataattgatgcaaaagatgtcgttttcacatatctaagagatataaatattgaagtctctacatacctcggcgagttcttggaccgaaatggctcggcttccttcactttcaaagtgttcaaaggctaccgttgcgatctgttcccattcttcaagagcctcaagttgataaacgctgactgaagccgcacaaaactcttcaaaatcaagtttcttatgtgccaatggttgcatcttcaatgaacaaaaaggaaacacacagaagaaaagagtattacagatgtattttagcaccgactagaaatgatgggacttaaaaagatgtgttagtacgtaccatgtttaatatgtcaggaagtctagattcgatcatagcatccgtagcatatcttgtcagagcctgcatttaccacaagattttgtttgatcatcaattgaagaacagtggcattagaagttattgttaaacaaggaacgatgaaatgtggtaatcatccactgaccgtggtgaaattgtgaagatgcaagcctccatcttctggctccaagagcataaactgtgctttaaggaacacgagttcctcttcgggtatagctttggatagagactgttgtacaagtgacagcaaaattaagatacatacaagacatatagatgatcaaatctatcaagaacaaaagctaggatcaaacaaacagaggaagtattttgtcatgtgtgtctattcttttaccttttgcatgaaaattgtgatcaaaatcctaagaaaatcttgacaagatgaaaagcagacaattaccttaagtgctgctcttcggaaaggcgatgcacgaatataagacttcaccaatttgtagatagagaaatccagaagtaaaccaggattttcatctcgaagccatggatgagctgcaaaattattaatcatactcatgttttcatttcaccaatcaatgtcactagttttaacaatagtggttataaacttacctaaagcttgagcagctgtcattcttttcctatggtctttattcaaaagccttttcacaaagtctttggcaataggagatattgaaggccacggcaaatcgtcgaaattcgggttcgctctaagcacacaacgaaaaattgcagactcggttcttccgtaaaaaggtctacttccacagagtaatatgtaagatatgacaccaatgctccatatatctgcttcggtgctataggatctgtgaagtacttcaggtgcaacatagtatgcacttcctaccacatcgttgagacgctgatctagttaaagcccaacataaaaaaaaaaaaaaacattccatccttagtcttctaagtaaaatactacaagcagagtcatgtataagaaagaggaacaaagaattaccaaatctagcgtaatcagacaagccaaaatctataaccttgagtactgcatcctcatttttgcttgtaaagagaaaattctggatacaacagtatggcatttgttcaagacagaagcaacaactacttatgatattcacattggtagaagaacaatgtgtgtacctccggtttcagatcacggtgcacaacaccttgaagatggaaaaaagcagttgcagataaaatctgtacaagaatacgcttagcttctgcttccggatatcgaccacctctacagtaagatatagacatcacagaatcatcctccatatatatgtaacacaaagttacctctttaacctaagtatgccaaaattcaaggtggaaaacagaaaaaggactagttttgattttacctcgccaaaatactgtccaatagctctccaccttcacataacctggaatcatattggagtcaatatcttaaggtcatctcaattcctaaactttctcctaccactggtactattagaactatacttttttttttcctataacagaggcaatggtccaaatctaaacacaaggagattataaataaaacaacttttgatatataagaagcatgaaagagacatacttactccataacaacaaagacattatccgaatcctcaaacacatcatagaacttaaccatgtgactatgcccagacaaagctttcaacaacttcaccttttgacgaacatttttaaatcgacaaagcttgtgtcatttgaaacaca

SEQ ID NO: 19056 - DNA, 511 bp, Arabidopsis thaliana landsberg
ttaattaatatatatgacttacgattttgttcaattccaatttcattgagattttcagtttttcgattttaaaagaaattctatagctttctcaacctaatctatgtagtacatataatatgtaacatattagttagtttggtacagttttcttttcgatactaataatttaagtttttgatcaaattggtttttattaaaagaattaatcatgtcttgtctcggttccgataatctttaccttttctgattcatatggatgagattctttaaggatctatttgcccacgggatcttgatcatgaaacaaatttttgtgatgtcgtcgctcttctaaaactcttggacaacctttgatctaaataaatgaaagacccgtttcaatttattttttaaaaacaattgtaaaacataaacaatactgtagtaatgaaccagacacgtacaacatttatggagcagaaaatgggtaatggtaaaatttatgataagtaactacaaaaaatctaaa

SEQ ID NO: 19057 - DNA, 1670 bp, Arabidopsis thaliana landsberg
atggtcgcagttgtggacgcggtccatcctctgctactcggagtctcttcctctccaccaaacttatttagcctctcccattgcaacgtctctgtgtccaatgcaaaagttccatcggtcaattgacctggacccacgtgagctagcgggtccatcgcaatttcacctccaaaaatcacaatgtgtttcccaagagccgcactagcgaatacacttctttcggaaggcctcacaccgaatgtttccacttgtgtccacttgtcttgaacaggatcgtagtaatgaacatcatctacttcacatccgttaaacccatacacaacccataccttcccttgcaccacttctagccctgctcctcctcttgcggtaagggaatctcctggagtcgaacaatgaaaccacttcttatcaacgatgttgtaagagtctagtgtattgagtcgtgccgtagcactcactccaccgaaaacgtaaacgttttcctcatcggctgccattgagtggaaactacgaggagtgggtccttcttcgaccggagttagcagtttccactcgtttgtggtcgtgtcaaacgagtagaaaccgttgtattgacgtgaagcgtctcggcctccaaagacatagagggtcgatcctattgacaccatccggacacctaggcaagagagggttggaatgtctccggtggctggagaaatggaccaagtccggctctcgatgtcaaagacgtaaaggtgtttgtcgatgggctgatttggtgtgaactcaccaccaaaagagtaaatcttgtttcctacctgtgctatgtcatgcgagcatcttagccctggaccatctccattttcatccaccttataattaattaataatacttgttagttaggattttttataatatagagtctgcttagtgaactagctcccatggtgatatataaaagattactacctttgtccactttccatgcaagtttggagtgggcgacaatgaaatataagccccgagggagtctagaacgtcggtcgaacgtccgtgaaacccaacaatttttccaccttgtagcacaaacttaataccaggtctttgttcgataggctgagaggttttgcctttataagtcttgaatgaaagaaaagtgatcatctctgaggtcataccattaactttctcacggtatccttccacgtatacgatgtagtcatccgcatcaatctcaaactgcaaagaaaccaaataattttgagtgaggttacccatataaatatatatatatatatatatccttttgacgaatcacaacatagaattatctatttttgtacctcttcaactcctagctctgtcttctttccatgttcatctccaacaaccacttgagaaccattgacatactcaaacttgacgaaggctataccatattgggcttgccctacatatacctttctaacattatcgtaaacaccatcatcccatatatctcccgtgtcaccaccctttgcttctagctttttggcattcaagggggttacattagtcaacggagcaaagtacgctccaagagaatggagattgtttccagcgaagccataaaatccaacgatcttcttgtcttgaacttggagagtgaacggtgtaccatcttcatatccaatgagatcagaagtct

SEQ ID NO: 19058 - DNA, 604 bp, Arabidopsis thaliana landsberg
tattttaagaaagtgacaggggaggtacaatatgctaagttggttaaaaaaattcgcatgaagagaaatgtagatgagacttcgttataagcttaaagtgagttactttcccttctcattccaaggacgtaagctaagaccaaattatattcgggataatgaagatctagagtggtattttgaggatgtgagtgaagaaggatttagaagtatattgcatgttgaatcaaatatgaggatgaatgagaatgaacgatttgataaaatattaagagaggatttggttagacaaaatgttgtaaataatgaagatacatctctaattgttggaacggatgagattggtggtgctgtccttgctatgtatgtaggagaaccatcagaggttgtggtggagaatgaggatatatatttagaagaaaatgtgcgtggaccaattttatgggatgataagcttgaaattacaataggccaagaatttggaagcaaagaagcaacccaaagtttagttgaaaaggatggacataacaatgtctttgagttttttgtaatgaaatatagccgttaagatatgtggtggcatgttcagaagcatataatggat

SEQ ID NO: 19059 - DNA, 568 bp, Arabidopsis thaliana landsberg
  unsure (1)..(568): unsure at all n locations
atctattgattgtttaaaatcatctgcagagacaagcaaaagtgtcctgcatcaaattgtagtccttacataccaatcggagtcgatctttttgcatgtcctagaaagataaaccacattgctcaacacattgagcttcctaatcttaaaccggcgtcatcacaagtctgcnnnnnnnnnnnnnnnnnnnnnnnnnncatccagcttccaacgtatccaacctctatgtttggtgactatgatggtgaaggacttagcttagtcttgtacttcaaacgcaatgagaactatcacaaagaaatctcatctcactttaaagaaaccatcaaggtatgatgatgatagatcctatagctcttttttaaaacacttgttatgtttctttacagagagatatggtttttgcagagattcatggaagatgaaatggagaaagtaaaaggattcacaagagaatcaacagttccattcagagggaggttaaagatcatggcaggtttggtaaatcctgaggatctccagctaagttctactgagagaaaacttattacagcttacaacgatagac

SEQ ID NO: 19060 - DNA, 5679 bp, Arabidopsis thaliana landsberg
gtctcagactctcagagtcatttctttagtagataaaaagacatgaaatttctgtaagctaaacaaggtaatgtacagagtaatttatgtaagctacacaggtaatgttcgaacttgatgaaaatgtttgaacaagttattgaattcgacatatgtgacaatgttggaggcttgctctatgaaaaagaaacaatctatacataaaagaggaatgacattgtccaatgcttaaaaggtcaattcctatgcaagtatctttacgctaatcgtgagagccacttattcccaatataaacttaataattagaaaaacatagtgtgaaagaaggagaagaaagcaaagatggaaatggtgaaattcgggaaagcagcacttggtgcggtgaagatactctgtcaccatgcttttgctgtggtcgtcatcgaattgggcttattcatcgatttcttctgcttctccctcttttcgaagctctttggtcatttctacatccacaaccatcgtttagttcccatcattttgttaaaaccgtttccgcgtttgaagagtgaagaaaaagaaaacagatttgttgcttccatttttgagtcctttacaaaagctatggcgcacattacaagattttataaatggtgtgtttatattatctatggatttttcaattatttggttggtttaaccttcaaattagatgtttgtgtgattcttgtatgtatgcttatttataaataggatagaagtttattttatcctttgcacgaacaaagcaaagaaaaacacttctatcttttcattaaagttatactagtttttgatctactcttattggactgaactcaatcagttataacgttaataagtcgaaacggacattttaagctttacgcaacggtcatattatcggctccacgtaacaaagaccaaactctgaaaagaccaaactctgaatcttgtctttttatagtctgtaacgcttctcgtttttcgcatgaccttctccacgtttctcttttgttgcctcatctctttcttcttcaatttcttattgtgtttgctacataagcagctttgttgtgaggaaaaaaataaagagataaacaaaacacaaaaatggtggtgaaaaactcgatcaaattcaactctcacagtgagcgcaagtctttggaagagaccaaggttcctcctatctttggccttcctccagatgccttagacgacaagaaacctacctcggattttgcagtacctatcatcgactttgcaggcgtccacaagtcgcgtgaagccgttgtggagaagatcaaagccgctgcagagaattggggaattttccaggtgatcaaccatggtgttcctttaagtgttcttgaagagattcaaaatggagttgttaggtttcatgaggaagatccggaggttaagaaatcttacttctcgcttgacctcaccaaaacatttatctaccacaataatttcgaactttacagttcgtctgctggtaactggagagactctttcgtttgttacatggatcccgatccttcaaaccctgaagatctccctgtggcttgcaggtaattttgttttcattgagaagtcttaggaaatattgaagatatattattgattctaacatcattggctcagagatgctatgatcggatactcgaagcatgtgatgagtttaggtggcttgctctttgaacttctctcagaagctcttggtttgaactctgatactcttaagagtatgggttgcatgaagggtttgcatatgatctgccattattaccctccctgtccacaacctgaccaaaccttaggcacaagtaagcattccgacaacacttttatcactattcttcttcaggacaacatcggtggtcttcaaattcttcatcaagactgttgggttgatgtctcgcctcttcccggggcacttatcatcaacatcggagatttcttgcaggtaagctcactgatccatagttggacctaaaagtataagataacataaaacagaggttttagtgcgtgatgcattgatttactttctcacttaaggttttcttattcgggttgtgctgcacaacttgtgcagctaatgacgaacgacaagttcataagcgttgatcatagggtgcttacaaacagagttggaccgaggatttcaatcgcatgctttttcagctcgagtatgaatccaaattccacagtttacggaccaatcaaagagcttctctctgaagaaaaccctccaaaatacagagacttcactataccagagtactcaaagggatacattgagaaaggtctcgatggaacatcgcatctgtcacattacaggatttgagatctttaaaaaaacaaaatatatcctgtttgaagcaagatattcagatatgtctatgttccgtcctttccttatccatgtaaaagctagtactctgttcttgaggctgcaactgcaataacaaaagcattgtaccaaagataagaaacaaatggtgtgtgcgtgtgtatttgttgaaacatgtgtggtttatattggatctttagattcaaactttgtttacttactcttctcgaggctccgtggattcaacaatctttatcaagaaatttgatcgaattgtaactagtcagagcatcagattagtacctgtctaaggctttaatatattcccctagggtttcgtaatgattcaagaacaagcaaaaacgcactcgtcgaaacaattacatacctcgacgagactcagggtcaacacggttctccgatttgacctatgacctatcggcggcggcgagaaggggtttcaggtgattagactagaaggtttgactgacggtggctaaccgccggtgggcccagaagctacgacaccattgaagcaatcaaagaaaagattagtggggacgaaaagggtttctgtgttataagccgagcccacattattttaagttaaaagttagtgcaactgaaccaaatttatttattcatgtttgtatgtaaactatgtttttttttactatatttttattaaattgtattttatcattttaattttaattaaaaacttctatataattttccaactaaaatgtttttttttgttatattaatatttttatcttgggacggaaaacaaaaattaatgcctttaaagtatatggttctagcttctatggtgatcctgattcctgatagaagcatggaattaacgccgaagtctctcatctcatcttcatggccgtgtggtgtgggtgattttctttctccacgtatttatattttgtctttaaaaactcatctatcaactcaatgaataattgtccccacaagttactaaactcatcagttgcttataaaaactattttcaaaatgtacatgtatatatgcgtctacatatgcctttccagtataattcatgaatggaagagcaataacaagcaatggtaagatgaattccatatttcaaacgtataacacaatgtacttgtaaatgctggtagttatattaattagagcgatgtaataggttatattgatatcttataaatttactttgatttattttaaaacgtttaagctcgtttagatgaatcacaagaaggtaacaaatatatcaaatcataattacacgtcacaaaacataaaagaatatgtttcacataatcattattttcattaatattttctcaaaactaattgcacaaagaaccgtttgaactttgaagttcaagaaactaagatgacccgcttaaagaatcttattcgttacagaaatcgattgacaattacacttcatgccaataattgaaacagctttgtacgcttgggattttattttatttgttataactgaaaatggtctttcacataactttcaattaataccgattgtattccctttattgcctcttgcccacgttgatattatgagtcttgttatagttctctccatattcaagaagttcatccaaaacgctatcgtccaagtactcaaactcaaaaacttgctgcgacgaggaagaagaattagccgcagtggatgaggatccggttcccatgttatactcgtgagggaagttgagaatggcagctttgcctctcattgaataggcggctcggtcataggctcgagccgcgtcttccgcagtgtcgaatgtccctagccacacacgctctccgtgcttcctcgaatctcttatttccgcggcgtatttaccccaaggtcgtctccttactccacggtacttcccttgctcggctcctcctcctccactaccactgctacgacctccttgatccatatatctgtgtatgtgtatatactgttgtgcgtcagaagagagaccaagtgacaaagaataataagaagaattggatgttctaagagttggaaacggacacaagatgtagcgtctgttttttttttttgtctttgtgtgtgttttaattttgcatggattaaatgagatttgatttgtggaatttataggcaaggaaacaagtgggtccatcaacctaatattcgaagttcgaaaaactccacttatgaaaattatgtagatgttctttagaccttttttctccttcaacatagatgtttctcataaaataaattttctttttctttttcttttttcatttttttataatagattttattttgagaattttgtattttacatatatgtacaattttttatggctataataatatacatgtatggggtttcggaaatgtacaacattaataatatggtaagaatcatgtgcaacaaaaatataaaacaattttttgttatatccttgaaattattatattttgcgtttatattttacattatatctaaattattaaatatttatatctaaatagagcttataaggtttaactcaagttgaacttttgcaaaaagtaggaaatttatgataaaattagacagtctcttgaactaattattatagaaaactatatttgtatggtattttttggcaacagcaatggaattttatgttaccaaaaatatgatgtgtactgaataaaagagttgattggaggacccataggaatatgtttgacttgggacttcgttagtgcccacgtgggttgactctcaaaaccgactcagaagctttcgttggaccataataaattttttgtttaatacagaatctacgtgtgggggtctaagttcttgacatgactttacattttggagaattttttccttctagagatattttcacatcaattaatttttattgaataatttgcagtagattagatcaattaacttttcttaacatcaggtttacgaacataccactaacgaagaagaacaaaaacgtttactaagtacattgaatcggccttgaattgttttcaaattatgcatatattctacataaagctggaaattcattacttattctaccttaaaagaaaatataagattttgtgtttcaaaatgtcgtataaaaaattgagctaaaaacagaaatattaatcgctaaaattttttatgacatttgaactactttctccatctttgccaacgtacggtacctgaaatctctagaaatttgatcgaatcaaatgttggttgcgtttgtaactttgtatatgcattgaacaaataaaagtttttatattagtaagaaatg

SEQ ID NO: 19061 - DNA, 1190 bp, Arabidopsis thaliana landsberg
gccttggtttacatttactactggctgctattaccacaaaagtagtttgactttcaatggaagacgcagagctggaatcatgaggtaggtctctgaaaagatatctaggggtcattggatcagtaaggcccaaccattgtacatcaaaagccagggcctctgcaaacgatatttgatctcctcccagataatttcatctgttatagatataagagtcggtaagtaaaccaaagtaatgatttctacttttccgtgtgaaattttgcaaagcacattgtgtggaatgatctctttggcttcctcaataggtgtacatttcaagaaatggtgtttgatgcaatcgaagattaaagcaggggcaattgacgaggttagtttggtgcccgtagttcaatcgataaactaaaaggccgtcatttttcggtctgatgcatttgtttttgacactttctttaaagaagtggaagtgatgctagaagtggcattgtcgtatcttaagtcacactcatcctccagtagccttggtgatatagacaagtctgctctatcatctccaacaccacaaaacatcagctaaaacctaatttaccaaaatcaaaaagcttctcaaagtttcattctccagccagctaattaagatcatccaccatcatttttcttcttcttttacatgttaaagtgtatatgtggtaacagtaattatgaatggatatttacagaggcttgtctgatttctggtacttgtgacaataacaaaggaaaagtttgggttctctcacaactctatttgtattggcaaatacaaagtaagtgacaattccagttctgagagcaaacaaagaatataaccttaaacccttgtgtaatcttattatagactcaaccagaaggacaagacaaaattcaaacattgcaaaaactgcaaaacatttgaagactacatctttgtcccaagtcacagacggtacaaacaacttggggttgcaatacagataaacgaccaatcctgatacttgcaacattcgatttaacagctagaagatgaaaacctgcaaacaatttagcaggaaagtctcagaatttgacagcagttgtccaggtgccttgaacactggggtgtttggtgacatgtctggtcctcagtttaaccactttccgtccaagcgagttcctcagcctcgttgcattcg

SEQ ID NO: 19062 - DNA, 584 bp, Arabidopsis thaliana landsberg
ttccctggattagtaggcgcaaactcatttataaatctgttttttagattactttcaccaccaattttctttagcttttttacttcgagaaaatcttcttttaagtacaccaagtgtatgccctgcaaaagtaagatccaaatattcattgaaatggtcatgaccatcttcttcgactttcttgcttcagtggtggctagtgttttgtcaaatacccttgaaatggtcaaaatggttaccacggtgataatgaatagcttcatgtttcttttttccgaataagataaaagaattatagttttgtatatgagaagtattgaatgttgtgtaagtaggtttgtccgaatgaaacggtatatatagagtttatacaatggtcaaacgctcacaaattgattaaatttggacagtttatatatcaatctaaggttgttaatgcatggcgatactacaaagatgttatataaataatactaaaattagcatctgacatgtatatagatggtatcaccatgcagatttatgctctatattcaattttctataataataaaaaatatcattaaaattactaattgagaaag

SEQ ID NO: 19063 - DNA, 584 bp, Arabidopsis thaliana landsberg
aatgaaaaaccatcatatctcctttggtctactaaaaataaaccaaatcatgatgcacacaatgaaagcaaaataaaaaagacccacctccttcacctccagggcaaccaactattctcatgtcgtagtaggattcgactacagcaggagcttcctatagatcagaaaacataacactcagacaagagtcgagagaggattgcttatcatatgcaatatagtcgatccttttcaattacacaaacctttgttccaaaaggcccttcaggaaagtctatatcgtccagcttcctcccctgtcaaaggtaaactaatagcaatcagaatcaaatcaattgctctctgaaatgatatagccaaaaggtaatcaatatactcctatatattatatcttcaaccacacgctctaaagcaacaaactaatgttgttgaggtactaatctctctaatcatgtcaataactcaagagacaatcacttcacaatcattgcgtgtaaccagattcaattaacaagtaaggattagggagaaaagaacctccaattcggcttgtagttcctctttctcgtgaccggttgcaatag

SEQ ID NO: 19064 - DNA, 1000 bp, Arabidopsis thaliana landsberg
aaaggaaactgatccgattagccggagaggagaccaccccggtgccgaaggatgatgaagtagttgttttcaagagttttttcagagcaggactgtggttccctctgaacgagatgataggagaggtcttgaaaattttgaaatttatcttcatcagctgaccccttacgccattgttaggctcagtgtcttcatctaggccctctgaagccaagggatgagcctagatgtcgaagcattttgccgagtgcatgagttgcactaccagacgaaggccagggcagacggtctgcatgaaaattttggctgctataatttcgtgtatcgcaaggatacgaaggctcttgtttttagctaccacacaaaatggccaaccgtctggaaaggtgaatggttttatattaaggctgatgagaagaagagggggaaactgatgacgatggtcatgtgcccgctgtctttatactttgaaatgaccaggcccctatgcaacatgcaactagggtcgccatgccagctggtcaaagtggagtttagagtggtggctgagcaaatcagtaccagggacctagtgtaggaatatctggccaaccagacatatccaacgtcaagcggctgggggatgccgaagatgaaagaaatgaagaagcatgaacttgttcgactagcttatcgtttcaagtttgaaaaacagtttaaagaaccttgccaagaatgactggacatgatcgagacaacgtttaatgaaatactcgggaattatacaaagaaagaagatcaattgatgacagcaccttcggcacccggccaaaacaaaggttaaaccgggtgatggatgcccttaaatttgaataaccttattataaaagacttgataagggtgccgaaggtgtaaaaagaaagagagttgtcagtattctgagcaggcagactgctagaatggtgaaagaggatgaaaaggcttcaaagaaaagaaaaaccactcctgaccgaaggctgc

SEQ ID NO: 19065 - DNA, 759 bp, Arabidopsis thaliana landsberg
gagattctattgctaatgtatcatatatatgcaggtatcggctagggaaaccgtcagagcaatatgctccttggttcgaacctatattgaaaacagtaagaattgggacaagcattttggctttgctcaagaatgaaacaaggatggctaagctttcatatacagatgtcataaaaagactatgtgggctagaggagaacgatcaagcttacatttcttctacgttctttgacgttgagagatatgtgatcgtccatggacaaataatattgcagtttcttacagaatgtcctgacgaatatatcaaaaggtgtccatttgttactggtcttgcaagtaaaatgcaggataggcaccatacaaaatggatcatcaagaagaagagaaaaatgttgcaaaagggagagaatttgaatctaaggagaggcaaggcacctaaggtatccaagatgaaagccatgcaagcaacaacaactcggcttatcaatagaatttggggtgagttttactccatttattctccagaagatccgttggaggagattggtgcagaagaagagtttgaagaggtagaagatgttgaagaggaggatgagaatgaagaagaggacactatacaaaaagctattgaggttcaaaaggctgatacacttaagaaaatccgaggtagttgtaaggaaatggaaataagatgggaaggtgaaattcttggagaaacttgtgctggtgagcctctctatggacaagcccttgttggag

SEQ ID NO: 19066 - DNA, 814 bp, Arabidopsis thaliana landsberg
aaccatcccaataggctaggataccattccatttgttttccttatccttcagaatttctcgtctattggatttgtctgttttatcgctattgcttaatcgttctcattgcttgttgcttagttttcgcatttcttacctgttatcaccaacttacttgaccacacccagtgtttggtaatagaatgtgcagtcgagtataattgttttattttttgtctattactcaaccacatcctgcttctggcatgagccagtggtggtcgagtgatttgtgtaattttgttagaaattctgttttttgtgcatgttcacttaggactgttagaaacctcaaacatgttattgcttggcttgacttagtgacttctgatcacatctcatatgtttgcaccacacctgattggattgacacctaaaatacaacaacgacatgatagtgtattaggattaatttactaaaatcctattatcaatgacacacgaagacgaattcacggctgaaaatgaaaatcactctctacaaaacccctggatatgacgcacaaagtcggatcatgcattgatcaaccgattttacacaccattaaccagacctactaatattacacaccattgacaagaaatgaaatttcactcttaaaaataacaaagatatcaaaaaggcttattttttattcatgcaatgaaccttattatatggagtaaatacaacagtttcatccataataattgtttaacatgcaaatcatcaagagatgaaatttaaattctaaagtgcatataagagagagaaatcacaaaattaaattcagt

SEQ ID NO: 19067 - DNA, 2420 bp, Arabidopsis thaliana landsberg
ccatctgcctctcattaatggaacatgcactcctttttttttctttttttttttaatctcttacatctttatttaattgcctgttcaagagcattaatattactatataagtcctccacgagcttcggatttcgtactctgtgcaatctacccacttctagtactcgagcgcattgtagtaaaagctcttatctcacactaaaatatacaaattggagtatatcatatatatcctcaattccccatcatgcaaaccatgcgtgatacgcctgattcatgtcacgaaaacgcttattatcttggacataagcattcatggtactatagatatcatacagttatagccataagaaagtaaattgcaagccctatccttctgtttatactattttgttaggcgaatagatttatgatgaatgtatatatttcttattattcccctagaaatttgtttttgaaaacaatagtcgtaatgcaattacaagtacataaaagcatgattagcctgatcaagtttagtctttttttttttttgggttaaaatgatacagttttagtttcttctacgaaatcattatatactgagagttctcttgtcactttctggcgtcaacttgttcttttagatggctttgttcttctgtctcttcattagcttatgtaagaaagcatgacaaaaaggcgacattacctttttgctgcctttaataattatatccaaaaatacatacatacacattaccaaaaagcttactatttttttctttttctttgaaattttattttatttttctttcaaatttgtaatagaaagttgaccttgttattgaaggaaaaaaaaaaaatggcccttactttcaaattgcttttgtgggaattgttatgtatacaagataattgtttgaagaagcatgcgtattcatggaggtcacaagttgatatgatggtagttataaaattttgtaagcacatacactctcacgcccatgcgtgaatttttcacatttttttagctctatacttttatttattttgacatcatcaatatatagattattctggtccggaaatataagcggtcatcaaatgttctttatattttggcctttatagtcactttaattatttgatttaatcattcctagggagaaaatcggagcatgcacgaaagatgccataatttgggtaacattcatgcatcttggaccaagaactcgaaaacgttaattttagggggaaaattgagataaatttgatcaagaaatttttaattacaaatttgaaatggagaactttctatatcattatctggtcacatgttataacatatataggattttgtattcatttgtaaattattataagtaaataaataatggcattgatgaaactattttatttactcaaaaaaatatacaggaccgggctgctcgtcgattgcttatggagcttcagaggaaattggaccgtttcgtatcaacaaaaccggttccaatctctatctcaacaagttcgcttggaacaaaggtgattacaaatttcattacaaacaagttcactttattctatgcttcatgtaaggaattattttgaggcttcaaaatttaaatttctcattattgaatgtgtactataacagacgcaaaccttctgtttcttgaatcaccggccggagttggatattcctacacgaacacaagctccgatcttaaagactccggagatgaacgaacaggtttaccattttcttaaatcatgcatgttctgttaattagttataacttataaatcgacatgcttggtttacttacattcttatgtttgctagagattaattgatttataaatgtttatgatcatattcctcctaatcacagctcaagacaacttgatatttcttatcaaatggttatcgagatttcctcaatacaaatacagagacttctatatcgctggtgaaagctatgccggtacgttttttgttttgacaaaaatggttccgtttaaagattcaagaattgcctatttgctaaataattttaatggacattattattttgacagggcattatgttcctcagcttgccaaaaagataaatgactacaacaaagctttctccaaaccaatcattaatctcaaaggattcttggtaaaaacaaaaagggtctacttagctcaaatcaaaactatatgtctccgattcctaattaacgaaagattaccattcttgttgctaaaggtgggaaatgcagtgacggacaatcagtacgacagtataggaaccagtacttactggtggactcacgcaattatcttcgacaaaagctacaagtcaatcctcaaatactgcaacttcacggtggagagagtttccgacgattgcgacaatgcgtttactacgctatgaaacatgagtttg

SEQ ID NO: 19068 - DNA, 528 bp, Arabidopsis thaliana landsberg
  unsure (1)..(528): unsure at all n locations
tttgtctagtatcatgtgctgtatatctacacatgctttttgcttcataagttannnnnnnnnnnnnnnnnnnnnnnnnnnnnnnnnnnnnnnnnnnnnnnnnnnnnnnnnnnnnnnnnnnnnnnnnnnnnnnnncagttagtctcggtccaaaagccaaccacctcagcttcatcgaatgatcatctgagttagcagggatctaatgttcatataacaagatacatgaattaatttaaaacacgagaaagagtgttagagtgacgataaatagaagatagatatgtacaaaccttttttttaatccattgggcaaactgttttgtatgaaatttccatagcaatgtttcatttctagcacatcgaccatcgtgagactgcaattcttccaaatgcatcatgttttccatagataaaacacttatcttactagtatatgtaataaagaagctattaaacagttcaacgtactcaacataaggatccatagcnnnnnnnnnnnnnnnnncatatcgatgtgctatgtct

SEQ ID NO: 19069 - DNA, 711 bp, Arabidopsis thaliana landsberg
  unsure (1)..(711): unsure at all n locations
caccaagtttcgattatttgaaaactgtaggaggtgtggtacatgaaagttttaaagcagcatgtcacacaagagggttgctagatggagacaaagaatggcatgatgcaatggatgaagcagcacaatggtcaacatcatacttacttagaagcttatttgtcttgatcttgatatactgtgaggtctctgaaccactaaaactgtggagtcactgttgggagagcatggcagatgatgtcttccgtaagcagcaaagacatctgaatttccctcaactagaactgaaagcagaagaactagagaaatacacattgatcgagattgaaacactcttacgccagcatgaaaagtcattgtcagattatccagaaatgcctcagccagaaaagtcaatattggaagaactaaacaactccttacttcggcaagagaaacacatgcaaatttattcagcaagctgaacgagcagcaacggataatttacgatgatgttctcaaatcagtgataaataaagaaggcaagttattctttctatatggagctggaggcacaggcaaaacattnttgtacaagactattatctctgctcttagatcaaaaggaaaaaatgtcatgcccgtcgcatcataagctattgcagctctactcctaccaggtggcagaactgcacattcaaggtttaagataccaatcaatgtgcatgaggg

SEQ ID NO: 19070 - DNA, 878 bp, Arabidopsis thaliana landsberg
cattgccgcgatcaaaaaatggaggcctattgcgacgaagttcggcgcttggaagataagttccacgggctggaactcaaccatgttgctcgacggtacaacgagactgcggatgagctggctaaaatagcctcggggcggacgacggttcccccgaacgtcttctccagggacatatatcaaccatccatcaacctcggcgacgcgcccaaacccgacgagacctcggcccagcccgaggtaccctcggccgccgagggtgaggccttgcgcatcaagggagagcggaatggggttgcgccaaaccaggtctggcagaccccgtacctgcaatatctcttccgaggagagctgcccctcgacaaggccgaagctcgacgactggctcgatgcgccaagtcgttcattttgctgggtgatgaaaagagttgtaccaccgcacgccctcgggcatcctccagcgatgcatctccgtcgctgaaggtcaggaactcctgcaagagatacactgcgggggcttgcggccatcacgcagcgcctcgagcccttgttgggaatgctttccggcaaggcttctactggccaacggcggtggttgacgccactagaattgtccgcacttgcgaagggtgtcaattctatgcgaagcaaacccacctgcccgctcaggctctgcagacgatacccatcacctggccctttgctgtgtgggggctggacctcgtcggccccttgcagaaggcgcccgggggctacacgcacctgctggtcgccatcgacaaattctccaagtgggtcgagtcgacctctgaaccgcatcaggtccgagcaggcggtgacgttcttcaccaacatcatccatcgcttcggggtcccga

SEQ ID NO: 19071 - DNA, 2623 bp, Arabidopsis thaliana landsberg
  unsure (1)..(2623): unsure at all n locations
ctttataaatcttttaaaatatttttaaaactcttataaaatctttaaataattttttaacttttaaacaaaatttctaaatattttaaaacatttgtaactctttttgaattattttaaaactcttgtgaatccttacaaaaagtttttaaaaaattgcaagggttttaaacccttactagatacggacccgcgatacaccgcgagttgagtatttgcgtttgatcgtaatatgatggtttcattgtaatataattgacagttaaatcattatagttaatttgcatttttctactatatatttatatctattgacatgggtgattatatttgtatgtttcggtctggttttgtaaagttccacaaacatgtataatattctatttatatacatgtactaattttattgttggagttatgatccaattcctaagttgctaaagtctaatgtcgactattgacttaagctgagttttgaatttggattggaggagctaaaccggtctggttaagtttggttattgaaagaaggaaggattgagttcggtttaatcattgaagctgaagactcgacttggtttagagggtttgacgttgactataaaaaggattcgtcttcttcttttctgtttcatcctctgtaacaaacattgtatcttcttcttcttcctctgatcttgagcttgtaacggtgtgtgtaaaagcttgagaaactccactgatatagtgaattgctggtcagaatccagccgagacgtaggcttactcattccgagtagctgaacccgtaaatcttctgtgtcactttattctttgagtgtttcctgttttgagagtgagagattacaaattgagagacgagagagaggttcgtgtgcgtgagatcacaaatcgatcaaggtttaaggttcgtttggtaacaatcaatataacttcaatgtaaacatcatttgagctctaattaattcggatgacaaaaaaaattttagcagagaaactagtttattagtgttcataatctaaccaattctagcctaggtaggttatgttaatagtcaattctccgagatatttctctagtcttcttatttcttatcacgagttgtaatctctgatagagaattattcagagttgcttaatatttaccattcaatattaattagaagaattattaagactactcaaagttgatatttaaattcaatgtttgaagtaatttagccaaacaaatattatagtgttcttaacctaatcatttttattctcggtagagaattattcaaagttgcttaatatttttaaataagtgcttgaattaatttaacttacatacaactatagtgttcttattttgatcagttctaatcttattagagaacaactcaaagctgcttaatattgaaaatccaatgtttgaaataattataggttttttaatttgaactatgtcaagattgaaacattgactctcaaaaacaaagcaacccacatggttgtagaaagagtcctcgaacgttagaccttatataaagcctttgcttcattgacaatcttaaacatcgaaacatttatctctttatcatttcaagagagaaaatgagcaaaaccataattctcttggcgttttttctatctatagttttgaatgtgcagatcagtttcgtcgttgctgagagcaaggtaattggtatttatgagagatctctcttgctcatgcaacataagcattgacttttgtattgtttttgcctttgtgatcaaataggtttatgtagtttacttgggggagaaggaacatgacaatcctgagtcggtcactgaatctcaccatcagatattgtggtcacttcttggaaggtatgatttagtacttctacataggaacttttggaagatatacatacatatctcgaaatatctcagattactttgttgattttcaatgattcagcaaagaggctgttcttgattcaatagtgtatagttatcgacacggcttttcaggctttgcagcgaagctcactgagtcccaagcccagcaaatttctggtactttagagttgaactcttttctgtttcttgatttgacttaaaccaagaagttgtttttttttaaaacaaatcaatgccctttcttgaaacagaactgcctgaagtagtacaagtcataccaaatacattatacgaaatgacaacaacaagaacttgggattacttaggtgtatctccgggaaattcagatagtctcctacaaaaggccaatatggggtacaatgtaatcgttggagtcatcgacacaggtatgtgcatatcgaaaatatgtttgattctctcttaaagacatgattactaatagaaaacattaaatgtggtgacaggagtgtggccagaatctgaaatgtttaatgacaaaggttatggaccaataccaagccgttggaaaggcggctgcgaatctggcgaacttttcaatggctccattcattgcaacagaaagctgataggagcaaaatactttattgatgccaacaatgcccaatttggagtcttgaacaaaacagagaacccggactaccttttcccaagagactntaacggtcatggcacgcatgttggctcgac

SEQ ID NO: 19072 - DNA, 275 bp, Arabidopsis thaliana landsberg
actactttcaagagtgaggtcataaatgtaagtgtaaattatcagcaaaagtgcgtatttggaaatagcacgaaaatcaggcgttaatcaattatcaaaacgtacacagtcgtcgagtcgtgaccacttatttacaggtgttttctaatataggaaatatccacgtgtattttagttttcaatttttggctgtaaacataatacaaagcccaaaaagaaaccctaaagtgtacggaatttaaaaggggaaattatttgaatggtttcattgtgat

SEQ ID NO: 19073 - DNA, 1227 bp, Arabidopsis thaliana landsberg
gctagttgaactgcgaatgagcaactgtaaaatgctcaagaggcttcctgaatcgtttggagacttgaaatctcttcaccgtctgtacatgaaggaaactttggtctcagagttgccagaaagtttcggaaacctctcaaatttaatggtactggaaatgctgaagaagcctctttttagaatttctgagagtaatgttccaggtacaagcgaagaacctcgttttgtagaagtaccaaactctttctcaaagctcttgaagcttgaggaactagatgcttgcagctggagaatatcgggtaaaatccctgatgatcttgagaagctttcgtgtttgatgaaactgaatctggggaataattattttcatagtcttccgtctagcctcgtaaagttatcaaatctccaagaattttcattacgtgactgccgagagctcaagcgtcttccccctcttccatgtaaactggagcagctaaacctagcaaactgtttctcattggagagtgtatccgacctttcagagttaacgatcttgacggatctcaatctcacaaactgtgcgaaagtggttgatattccaggcctagagcacttgatggctctgaaaagattatacatgaccggatgtaactccaactacgcccttgcagtaaagaaaagactttccaaggtgattccaaaaactccacagaatctcatcatggcctatttaaaaacatttcttacacctcttttgatttgttactgcaggcttctttgaagatgatgcggaatctgagcttgcctggaaacagggtcccggactggttctcgcaaggccctgtcacattctcagctcaaccgaacagagagctcagaggtgtaatcattgctgttgttgtggctcttaacgatgaaaccgaagatgacgactatcagctgcctgatgtgatggaggttcaagcccaaattcataaacttgatcatcacaaatgcaccaacacattgcatctctctggagtgcctagaacaaataacgatcagctccacatctgccgatactcagcttttcacccactggttacgatgttgaaagacgggtacaccatacaggtgatcaaacgaaacccaccaatcaaacaaggcgttgagctaaagatgcacggcattcatctcgtttacgagggggataatgaattggaaggcagagaaaatacattacccgaggctcaacaaacggtttgc

SEQ ID NO: 19074 - DNA, 803 bp, Arabidopsis thaliana landsberg
tgcgatcgagtggaaagaagtaagaaccgggtctcgggagtttgcgatcgagtgaacttgatgaggatggcttgagatcgtctaagtgagagacttgaggcggttgagcttcacggggttgtgatcgagtgaaagaaggcgaggcgtcgggagcttgcgatcgagtgaagtaaacttccaagggtcgagaggcttgcgatcgagttaaggcagcgcttaaagagagagaagcttgcgatcgagtatgagagagagagagagagatgttgttgtgaggtgtgattattggatgaggagcttgatatttataggaagaggaggaggtagatgcgccccttaggtaggtgaggagagctcttcccttggcaaaaatgtgatgagaggtgggtggtgagaactattgatttgttgacatttttgtcatgggggacaaggtgggcttcaccggttttgtcattgggaagtgatggcctgatttctcccactccacgtactcgatcacgccttggacttgaacgggtcactgcacgttttcgttcctttgttcagcgctgttatcaaaatttttgaactattacttcccgggaaatgtacgactcgatcgcgaactttgaaaaccgtcttgacttcatgagcgagtgactccactattcaccctataaatcactattcaccctgtagatcactattcaccttgtagttgatttttgttgcttactttcctgagattaaaacaccaccatagtgagttagaaaataataagaaacttaaaattatatacaaagatagtcatgagattcct

SEQ ID NO: 19075 - DNA, 2416 bp, Arabidopsis thaliana landsberg
tttttcaacaaaaaaaaaattattgttaaatattttgtatcttttaaattaatatatgtcctatttgtattttctatcttcaatatatttggttttgatatattttagaaaacctgtttaaataattattaaaatttgaatgccatatatatttatgtgattttttataatttaaagacatatatatatatatatatatatatattgtttagatttgttgttgagatctttttagtgtctatttttgtttaaagatatatatatatatatatatatatatatatatatatattttttttgttcagaaaaaagagcaaatatgtatttcaaaaatgttaagtagataaaataaaattgttaagtagataaacaaaataaaattatttttgtaacatggtttataattttctcaattataaaatttgcaagtattattagattgacaaatagtgtaaataagtgtaatgtatatgtgacacttagggttctaatgaggattcaagtattacatgaccatcaaggcctagttagcgaaatagcccaaaaccatataacataagaatctaatttgaataaagaaaacccacctaaagaataattaaaagaagtgaagtcgtagctaaacccgtcccacaatataacctcgtcctgtgaaattcaacataagttgtcattttcttataaatttcaaatatttataaaatttgaaacgtcaaaataaatttaatatcgacccaaactttatcattgaattttgattgttatatctagaatttctcccgtagtatatcgtcccgtattaatttatttttatatattaataatgtttaaattacaagtaaaattcaatttataattttcaaaacttcataagttttaaaattataaatattaaaaagatatttaaagctaaactttataaaaagtttgtaaaattataatatttaacttttgataaaaagttaaaatatttataatttttgaaactttgtaaagtttttattctttaaaatcaagaacccgagtaaacgaataaccactttaattttggacgcctgataaatcaagcttcctgcttattcttaaccagaatcattttggtcctttttatagtatgactctgaaccaatgtccaattttttaagcaatgtgggacattgtacacatattatttttcatggattgaataatatatgttcgtttaaaaaaatttgaactacaacatatacagaaaaaaatataatattttattaactatttttattttatataaattcaaaataaattaatataagatcaaataaatttgaaagaaaaatcatatatttatgtctaaattagataaagatgttttaggaaattagttaaagtaaataacaaatatggttagtttagagatattatatatattaaatttggtaattaaatcattaatttcgtttttaattattatttttaggtaacttttccaaaaattaatgttatccaagattagaacagaattaaacatgttatcgaggatccgaacagagttaaaccgggttatacccacccatttgaattaattgttgaattatggctcaaatctcaaaaattatcttcaaaaaagtgatacaaaatgtatatatagatatttatgacaaataattttgtatttatactattaattgggaagcattgtgtgaactacaatattgtaagggtagtttaaaactaagtaaatgattttttttcatggataatttagtaaattaacaactacttcaactaaataaatatcttgaattttgctttaaaaaaacgaattaaatcaataaattaatatctacacaatattttcggaaatcatttaaaaacgtttccataacatatcagactattttaattttaattatatatatgtaaacttatttattttggtaatatgttattagataattcggaaactttaatctaatttaataacaaattatcatttagtttagattttaaacaatttctttaacaaaactatgttaattgtttctcattagtacacataaaaatacgattttagttatgatttagcatattcaaaagataatttttggattttagatttgtaaatatctagaagatattatcagtatagattcaaatatttaacattttaattagaatttaaatgatataaacttttaaaggatttttttaaacatgtaattttcattattttaaaaatatatcgctaagctaaatttgaattatatgaaagaaaatatatttttaaacgtattataatagatacaagcttttagaatattcattcttctagatttgattttttttttaaacaataaaacagagtttaaaataccaatgtttaaaatttttaatgcaaatattcaaaatgagaaaatattgattcacaccaaaa

SEQ ID NO: 19076 - DNA, 1419 bp, Arabidopsis thaliana landsberg
ctttctaatattcacaccaaaaccgataaatgaaaaactcattgacgtttttccctttgaagttagtagcccaaaaagcatcaagataatgtctgtaagcccatgggcttatatccattataattttttttgtcaaataacaaataatatatgaaacgacgtcggtaacagctgaaacgacgccggtgtttgttgatccagaacgacagcgtttttagttattcaccctctcgaatttttccgaaacctgtgttttcccatcaccaagctttctctgcatcgccgccgtgtttacatttactgttgttaaggccgagagatagatagaaaaaaacatctgtgcgattttgccgcctctccctaaaatctttggagctccttcgtagttagccggaggtgaagtacaataaaagaaagaagaaagtccaagtgtctcttctcatctcttttctccagtaggtacgttttggtttaatttacagagttgattctaagcctaagagaaggttttctatcgattagagtgtttgatttgctgtaagggttgctcaaagttttgatttttagtttactagtgatagcagataatggaggggagattggctaatatgtggaggttgactgttaacgaaagtaaattcgtggaaactgcgttgcaatctgagctcagagtagatggtcgtggcctttatgattatcgcaagcttactattaagtttggcaagtaagtgctcatagaactgcttattgatggcgtttcttttctgcactttgtaggctttgtttgctttctttagctctaaagcttccctctttgtcgagttttgtgataaatttgaatgtagataactttgttcagtctattacctctgttagaacgaatactagcatgcttttcttttagtgtttgtaaccaaagacagcttttaatctcgtttgaattaacagagaatatggtagctcggaagttcaacttggtcagactcatgtaatgggtttcgtgactgctcagttggtacaaccttacaaagacagacctaatgaagggtctctctcgatcttcacggaattttctccaatggctgatccgtcttttgagcctggtcgtcctggcgaatctgcagtggagttgggacgcattatcgatcgtggtctaaggtaaatgtttttttggacaaactttgttgatgctgcaagagtattgctggctgttctggttggagtaatggtaagttggtctttgtgttgattgcagagaaagccgtgcagtagatacagagtcactctgcgttctagctggaaagatggtttggtctgttcgcattgaccttcatatcttggacaatggagggtaagttttgttggcaacagtatatctcattgaaggttctggttttaaaatgatctttaatgggtgtt

SEQ ID NO: 19077 - DNA, 590 bp, Arabidopsis thaliana landsberg
aatattttatcttctatggcttaattttttgttcacccttcaaataatatgaaacaaaacttttttcaatatctccaattttgaaactgttggaataaaatatgtaattgattatttataaattaagattttagaacatatgtaaatgtaaatgaaattttggagtggaatacgaaaggtaaatccactcaatcaagtgcacttacaaactgatgcttcgatatttctaagaagaagatgacttctatcactgggttcaacaaatttcgataatggataaggatcagagaataaccaaatttcttttgtcgagtggtaaagtgtaacgccccgaccacttttatcactgggttccacaaatttttcggattcatatatatatttctatttgatggttggtacactatttatggaattttttttttttttttttgtcaaaagtacttgcattcaactaaggcaagaaaaagtacaaagagtaaacaatcatcaacctcatggttgaatacaacaaggagagttctcaaaattgattgaaccataacatagatagcataatacaacgataaatccatacgttggagacaaaa

SEQ ID NO: 19078 - DNA, 1198 bp, Arabidopsis thaliana landsberg
agcatccctgccaagtaacgaataagttttcgccaagcacggcttcccaagcatagacggtttgccgctctgatatcatcttgcatacgcctatcaatctggtgagaagttgaaccaaaaatgagactccagtatgctcacaaaaccaataaaatgtgacataggtggaaaacaaacctctgatctttgcatgttacgtgctaatgcaaaactcgcaacaagtacagcaataaatttgtaggacaaagcattaaaatcttttccataaactgattttgtatccactggttggagacattccatccacgccactcccatagcttcagagacattccatctctgtaaacgctccatgtcaccgatatttctccgctgtgaagatgtggccattgcaacagcactaagacctctcccagaaccaatctttgcattccattcaagatcgcgtgcagctgccaaagctgccgcttttgcagcagccttatctcttggtcgacctggtgtatcatcatttggagcctccaagggtttctggaagcttgaaaaggtctgaagtttggtactcttacgctcaagtaatgaactgtctcgcctaagaggtggaggcgctggaggtgctggatgtgccggcgcttcccaaccagctgcccctgcagctatcatcgccagtgccattgcagaaggaggcgatgcaaaagcagctgcccactccggagaaatcatagagagagccgcctagaataaaaagtaacagtttaataccttaggctaagggatgaagcagcactgtcagaagctataaatatatgtgatagaaactacagggtatgtgaacagatttgtggaacctcaatgggaagtgcatcagcagccaaagcacgagtatcaacgacaaggggattcacaccatcaccagtggaaagttcatgaataccagccaaaagaggcctccatcttcggagaattgcaacaaatggtggtaaaatagcctctagatactgcttacgtagtggtcttttgtctttgctaacagcattccatacctgcaacagattttgaatcaaaaatcgaaaaaccacaaaataaaacaaagtgagcattattaagttcacaaagaagactaggggagcaattttcattatcgttctccaaaaactcaacatgaaatgtgagaccagaccataattatttgaagtat

SEQ ID NO: 19079 - DNA, 620 bp, Arabidopsis thaliana landsberg
gtaccttcagaaatcactggttctgcggatggcggcagttgaagttgaggttctgacgaacattcggtcttgacatcaactagaccacatccaccagttgtaacttgatcttgatcttgagcttcaatgttcttttccatagttgtaggtgacgatgaaggcacaacatcagcgagatgggtcttggcattatctaccccggtcattagatgggaagaattatctaccccggtcattaggagggaagaagggaattctgtaccttcagcaaccactggctctgcggacggcggtaattgaacttgtggttctgttgaacatccggtagagacaacaacaaattcacatccagcagtttcaacttgatcttcaatgttcttttgcacagctgtaagagacgatgatggctcggtgtcagctaattggctcttggcattttcttcctccgtcttcgggagagatgaagagaagtcagtaccttcggcaactatttctgatttgcttgcccctaaatgaacgtgcatatctcccactggctctgaagatggcggtaattgaacttgaggttctgttgaacattcggcagagacatcaactaactcagatccagcagtttcaac

SEQ ID NO: 19080 - DNA, 906 bp, Arabidopsis thaliana landsberg
  unsure (1)..(906): unsure at all n locations
tgggtgtgtgctaatatctgttccaatctatgaccgcgtcatcgtccccttattttgacagtttacaggcttatctaaaggattcacggagctggtaagaatggggattggtctttttgtctctgttctgagctagacacttgcagctatcggtgagacggttcggttacagttagctagagatcttgatctattggaaagtggagacattgttccattaaacatcgtttggcatatccctcagtacttctctaatgggcactgttggagttttcttctttgtggggaggattgagtttttctatgagctatctccagattcaatgagaagcttgtgtagcgcttgggctctgctcattactacactaagaaactactggagctcgttgatcattacccttgtggcgtatttgagcggaaaagattgttggattccttcagacaacattaacaatggacatcttgattacttcttctggcttttggtcagtcttggatctgttaacatacctgtttttgtcttcttctctgtgaaatatactcatatgaaggtttgatctcttcttctggctcttgtgtgtactttcaaaattgtttttttttaaaccagcaaatcagttatattaaatcataacggtttacatgatacatacaacaaccattcaaatataactattgaaacaaataaaggaaattgaacacaattttgatgaagaagtgtaagtgaccctgttttcgaaacggaagccttacaggcaacaaaataaatctgttaagtcctctcatcatacanctcgcaaaagctaacatcttatagatgaaactcctaaatgctttctgcattactttaataaaacgaagaatttggtaagttgctcgaaatgtttcttgatcatgctttttgaa

SEQ ID NO: 19081 - DNA, 181 bp, Arabidopsis thaliana landsberg
tcgagatcttgatatcgggttactgctcggttgcgggatcattgctaatgttttagctcttttgagtattattgtagataaacagagttgagtacatgcactctcgaggatttcttcaccgtgatattaaaccggataactttctgatgggtctcggtcgcaaagccccccaagaaggctt

SEQ ID NO: 19082 - DNA, 1057 bp, Arabidopsis thaliana landsberg
tgtatgaagcataactatcacgctgaatgttcacagcccactcactgtaccatttaaaccaattccacaaattagtagccaataaaaacaatgcatataaaaatttgaacactaaaatcaaaagaaactcacaatctactcaaatcagcatgaccggttccaacatatttagcttgaagatgctcaagctgagaattgatgttaaacctatcacttgcctgcaaaagaaaaaaacccaaaccaaaagatgttaaatttaaagcaaattgttcccgatttcatctatatatgctttataagaaacaaatcgacctaatttcgtctaagccaattctcttcgacatagataaattaaacagacagagaatcaaaggtagaagaagctaattaggttatttcttcttccaatttaccaacaaaagctagggtttcggatcgagaacatacctgcatctttttcagagtttcgcagcaactagaagaagaagaagaagaagaagaagacgaagaagaagaagatctaaaccctatctttcttcaagtcctttatctgctaattgttttcggttaatatttaaatccgaaataaccgaccggttcgttcggtgtacccgaagtagtagatcataaaatgaaaacgtggtcgtttcacataataaagaagttaaggcaagaagcttggaatttggctaacaattgtggattctttaatcattatcaatctacagaatacaaacaaaagtggctgtagtttagtggttagaatcccacgttgtggccgtggggacctgggctcgaatcccagcagccacacttagtcttttttcttttttatactattttgacatttgaagaaggtctcttaagggcctacgaatactcatagaggtacatttgttctctacttcttttgtatgcactttttagtcttcagtcttcacacgcaattggttccaaaggcctacatatagtgtagactgtagacttttagcaccgaatctcaggtgccattaaaccatctgtttcactcttgagtgtactcaattaaacacattca

SEQ ID NO: 19083 - DNA, 595 bp, Arabidopsis thaliana landsberg
  unsure (1)..(595): unsure at all n locations
taaagtgcgagttccgtcaaagcccatttatggcccacatacaagtcgatgccgtttcactccgacacttaggtttaggtcgttttccacctccgactagnnnnnnnnnnnnnnnnnnnnnnnnnnnnnnnnnnnnnnnnnnnnngccaagaacaagaaagcagtagcctcccgtctctgctgcttatgcaacctgagacgtcccgtcctcaaaagacctaaaacccttcaacaggtaacttttcaatttttctttcttctcttttctcttagaatctcgttgggttttagctaacatattaagcagaagcttggaacaaacttctatactgttagtgttaggtttgactctttatgaattgcattggtttggattatgatctctatgtggaatcaaatcaaaattatcaatgtagttcgtcgaagttggatcaatagtgaaagtaacgacaatctttagtttttcagtctattgctagtttccagagtctcctatttttgtgttatgtatgagaagcgattgaatatgtgtgtgttaaagatatgcagagaatgctttatgaggtttttgggaggagatcatcaagtcattgtc

SEQ ID NO: 19084 - DNA, 764 bp, Arabidopsis thaliana landsberg
tggaatgcacgtgaatcggtaggctctttgaatccgatactattcatggtcaaagctcttcattgttgattctatcgaacaaaaggataagtggatcggatgagatacgttttagataataattaaatagatagattaacactcaataagacaaaaaaaaatacacactcaatttaagagacgagtagtttgaattgaaacaaagcagaacaagaatggatcgatatgatcttcccttaaacgggtactagctaatcataaactgtatagtccaatcatcaaacataggtagattgcaaagagtaggcattggattaatagaaacttgatccaaatcatgactgcatgtaaatgagatttgcaagtaactcataaagaactttaaaaatgcataaataaaagatgaagtcacaactcacaacttaacttctcatcatgaaggacgaatccccaaaaagaatgtagtttccgtcttctgatccatttgaacttcataacagaaagaaaaagctgcttcacaccatgttttgcatacaacggaagctagtatgttggcttttaatacgaggcgtgatagtatctcttgcaggagctctgttggaatattttgatcccacaatcttgtaatacactttttttttgctctacgatttcctctagcctttataatactgcatccaaacaattgggagaaaaacaagaatatttaggttaaatatcaaaaggagattttacaatggtgcttaacgttttcaatgatgttc

SEQ ID NO: 19085 - DNA, 582 bp, Arabidopsis thaliana landsberg
ctagctcattgcaatttggaactatcttttaagtctggagttggttcaacggaaaatgcgtagcttaaacaaaaccaggtttggtttcaaagttgtgatattattgttggaagtgagaatcctagattaaatcatacaagaagaaaagcttggtgtgaagaagaagatgaagaacagaggaagaagcaacggaagaagaagacgatgtcggagaagagacgtcgtgaagagaagaaagttaacaaactaaatgggtttgtgttttgtgtgttgggccataagtgatgagataaggcccatacgaataagtgttttgttgttgtctagttaaggtccaacataacgaataagtgttgtgttgttacttgttagtctaagatagagtcatgttgtgtaagagtgaattaaggagttgggagttccaacatagtagagtggctgatgtaagtcttaggacaatgatgtggtctagagtctaagtgtgtgtagtgtagcaagtggagaaaaaccactatatgtatgtgtgtgtttatgttgtgtaagattatccaagatattaacaatgtagtcttaaaaggaaat

SEQ ID NO: 19086 - DNA, 663 bp, Arabidopsis thaliana landsberg
ttccactatcgcgacaaaggaggaggaactccgttgagaaaggcagagaaaaatgcaagggattcgctaggtttgaaggaaggcacatcatgtcctgctcctctgaacgttgcaaacgttagaccttcatattcctgaaaccatccacttacctaaaataccatcagaaaaatctgttaattaatcaagcttcataaacaaaaaccgtagtatgaaataacatttattagtaatattttgactgtgatgagttgtgacctgtttctcatggtaccatggcctccaagctgtcttgattggtaattccagtttatttatgcagtaccttgtcgagagtaccggtactcttccatcagtatcgccactgatttaccacataaaattgacaattgttcagccaattattgccaaaccggataaatcaacttttgaaaccaagaggataaaagaaaaatagatggaaatacattttgcttggggtttcaagcaaccaagtttaaaatggttgttttagtccccgttggtcataatattcataactgatttgaaagtaatgtctgaaaaaggtttttgtttgccaaaaatgtaaccaaaattttacctataaaccccaactttaaatcctccggcaaggagtttcctttatataggcaaaacggatcg

SEQ ID NO: 19087 - DNA, 809 bp, Arabidopsis thaliana landsberg
gactaagccagttgtaccgattggttcggatcaatgtttttggctgtttcgatcgaaatagaaacgacagcgttttgtagaaaagctaaataataacaagagctagcaacatgtctactattgctatttttttttagagttttttagccaatcaggagactctatttcagaaccactctcacaaagtgcgcgtagagagcgtgagagcaattctgtaggggtttaccttctgaaatcatgcctttttttatcaacgcacttgtctccaaaatcaccatcgcgtgaatatttttttcttttcctctctaaaccagtctaaaccaaacccaaaatcgattttaatttcaatactaatgtaaactttttgttccggttcgagatctctcctccaaaacttttgtctgatttcttcaatcaaaagctctctccgacaaactgcaaattcttctccagaatctgtggcggattcccatatcggctattcgattccaaatgtatagttgcttctcttacttctattgcttcagattattgttttttcgtaggaatctctgttagtcattcgaatgtagttgtgcttaatattgataatgatattgattataataactagtatacctctgtcacatgtggaacaaatttagttattttttggtctaattggtagtatactaaaaactcaagatttctaagtgttgaaaatttcagtaatcttaaatcccactgtataatgggacttattgctaagttgagagaaaaagtatggacattctttctttggttggagttttggcatacatataaacaca

SEQ ID NO: 19088 - DNA, 2035 bp, Arabidopsis thaliana landsberg
catgaataagtaatctcaaggggtgtgtgttagcttactgagacaaggtttaaagatatgatgtttccctcaagtacgcccatagcttataaaaaggttgatagcttcagccgctgtgtttccggacaagatcatattcaatttcagtgtcattaagcacttcaagtgtgtttgaattggctaacaatgtgcactagagcaaagcgaaaagaggagatatcttgtaatatgtccttaacaatttttagttttctaaatttattctcatacaataaaaacattattattagcttttcaaaacgtgaatttcacatggatagtttgacagtaaccggaaaataacaattattagcagtctgcaaaattgaacattcaaacagttaaaacacacacgaaacattagatatctactcaaaccgcatcaaaggcaaacgcccgttctcaaaggatcctagtacctgtatcctatcacaaccaagttctcgaaagcggccgagtcaccagaagcccagccggtgtatttcccgagggtagcgtccttgttagccttgcacctggtcaggaacttggcctgagctttggctacgttctcgggcttaccggcccaagccttgatagcactttgctggagggctccgccaaaagagaaagtgagcgtccatggcttcaacacatcaagcttgttcattgcctttagatttagtgtcgcttgctcttcgcgctgtatgcctgagaggaacacgattcccggaatagctggtgggactgtgcggcgcaaagcagtcaccgtgtattccgcaattagttccggtgcaacctgtaagaagaactattttagcgttttgtagcaaattaacgttgcatttcgaggtattgatgtctctgtgattcatttgattgtggttacgtaaggaccgggcatgtaaatttaaataaaatagcatcacaccgatacagtttggttgtggtttcagtttcaaaatataagaccaataaaacaacgactccaaaacaaaaccggattgcaacatctagtttggatacctttgggctgtcggagccgggagtgaccatgttaggtttaagcagagtgccttcgaggaggacatggtggtcgttcaaggccttgaacacggcagcaagaaccgtctcagtcaccgccgcacatttcttgatgtcgtggctcccacctgtcagcacctctggctcgacgatcgggacaagtccattctcctggcagatgatggcatagcgggctagcaccctggcgtcctcttggatggagagaacgcttggctcggtggccccaatcttgaagaatgcacgccatttagcaaaccgggctcctgcctcgtaatactgctgacaccgtgcaccaagcgagtctagaccttgagtagtggtctcgccgttggtccctgctagatcaaccaaacccttgtccactttgattccggggataacaccgttctcctgatccaaagaaaaatcagatccaaactgaaacagtaagttccatttgggtcatgtcaagagcttcaactctgcaactcttggacccaatgactaagactagagctggagtttgctttttccgagacggaccatgaggagatcgacgaagggtttgccatcagaggttttctggtagagggtttcctcgaagagtataacaccagagaggcaagggtaactgccaggggaagtgaagaggagctcacggtaagcttggcggttggactcagtgttctcaacattgattccggcgaatcgtttcccaatggtttctgtgctctcatctgccgccaaaatgccccttcccggcgttgcaatgtacttggccgtcttgatcagctcatctgaactcagaaagcacataaaatggagaactgaagattactggaacacgaagagaagagtgcatattaagtgtacttaccttcgtatctgctgccaaaagcagacatggtaataattcatccaaaacagatgagttcctgctgaagaggacgaggatgccaaggcaaaggccttt

SEQ ID NO: 19089 - DNA, 525 bp, Arabidopsis thaliana landsberg
gcaagcaaaaaactttttggtatctgtgatgcacataaaaggaaatgtatcaaagagcaatgttctcggtatcactgaagtagaggttagttcaaaaagtgtcaaaatactctacttgataagattctttatagatacttaaataacacaagcctacaatatggatactaactagcggtaaaaaaaaatccctcataggagttgctttatgcagggagctataatgtaccaagaacaattcatgaagtcatagcacacttggcttgccgtctttctcgatgggatgataggtgacaacaattttctgattttaacttaataaacgagtgacttgagttctattctattaaatgttcttgttttagtccggtcgggaaagtatctaacaaaatctttttgttggtcattgattggtgacagattgtttcgtaaatccatatttggtgctgccgatgaaatcgaattgaagtttatgaacaggttcttacaaatatgtatgtattcccgttattttatttaattaaa

SEQ ID NO: 19090 - DNA, 505 bp, Arabidopsis thaliana landsberg
aaatgcatggtaagaaatatcattttgttttccaaaaaataaaatagaagaaatgtaagaaattgtgtttttctgttgcatttgttttatacagagttgtaaaggactatagaagagcatcattttatcttagtaatgcatatttttataaatttgattttgtctttaacatttgctttgttgtcctcttttgttattttggaaaattgtatttaaaagtaaattttgttttgcaaatgattgctacttaatttgttcatatttttatttctcaccccatatataatgtttgattaatggatgcttaacaatattaccaatacgttgaaactactatatgcacagatatataatagaagagttggattttatttaaattaaaacagtaaagaaggaaaaacatgaaagtaaaagaaatgacaaaaattattttactttgaggttttgatgatagttcaccgcctcaaacatcatcggtgaaatttttaaaattggcttcaactct

SEQ ID NO: 19091 - DNA, 173 bp, Arabidopsis thaliana landsberg
cctttgaagagtatatgcagcagcagcttaaagaatttgaaaaaactaagcctagattgttgcccatatattgaaacgctatttcctgcatccgcgcttccaaccagcctagaagtcctgaagataaagttttgtgagaagctggagaaagtgtttgtacgagaagtcgaagt

SEQ ID NO: 19092 - DNA, 1365 bp, Arabidopsis thaliana landsberg
tcactctgcgggtgagcaacagttatcgttatttatttagttgagttagttcaagcatttatacaagattctaccaagtataaaatacctaagatcatgtactaggtggagttccaaacatacatgcattaagattaaactcaactagaaagaatagtgtaaacgatcaaactaatccatagaaaccgccaacctaaacttgatctaaagtccccatgaattcccctttgaaaccccctaaaacctaactagagatctactcgctcatggcaaaggagctaattaaaagttgggctgagtaaaccaaatcaaaaagacaaataaaacttaaaaagggtttagagattacttctttaaatgaagaacacaagaggcaaagctccaccttaaagagtcttatacaaaacaaaagagaaagagagatagatggtgatcttcgagctcaagagttgcggcggcgagtcggcagctctcggcgacggctagggtttgcttttgatgaaggcacacctagggttagggcttataacaagtatttgtacttgagggccaagaattaggtttagaggtaaaaacgtcaatccgccggataagtaagtgatagggccagtcgtgggcatcagggaaggagccaaatgacggtggcacaatgaggaattgacttgggcttgacctaatggtcggtggaaagcttctcggagctgcccgggttcaagtctcctcggccggatgctttttggatttattatttccaaacaaccggtttttggcatgtcttcactctttggttcatatcttctaaacggctttatggattgctttaattcgacttcaacttgactcctgactcttacatacagaaatatctccttgccgtgatggggaagacctcagccggatgctaaacttctgaagtgttggagtgatcgtcttttgattactttagcttcaaaactcttaaaaccttcttggcacctagaatacgtgtttctcctcttattggctctagaatagaaccaaattctcattgaaacataagaaaacaatagctaaaacaggctaaaaacccgtgttatcaactcccctagacttagactttacttgtcctcaagcaaacaaaagaacaaatctggtggagaggtttgaaaatcgtggggagtctcctgttatcagtgaccgtgtctcgaatatgtcctacagaccacattaaacaaatgttgcgttagaacggccgctcaatagtcctacacctttctcgtccttgtccatccactttgatcctacagaactctgaattcacgtcagtcaactctttacattctttaaatgttagggcgtggactttctcattagaaggtgtcattc

SEQ ID NO: 19093 - DNA, 703 bp, Arabidopsis thaliana landsberg
  unsure (1)..(703): unsure at all n locations
agtatatctcacaagctgcagaatacttcatccgtataaacttttgtgtcaagaaacacaagcatagagaattacatttttagtttcataccaactaaaatacgacaacaccctcatttactatcaaaagagacttttctttcagacacatataaaaggcctgcggtttttgtccgaaccgaagggatttttcggtttttggttcgaaattggtttagcaatcagttcaagttggcagaattttgaatcatgttcagttagttcagttagcctaaccgagcggttgactctttttttaaaaaccaaaaacataccaaatcgaaccaaaacaattataaatctgaaccaaataatccgattatatcttatttaaccggattttgcccgattttaactgagaaaaccaaaaaaaccagttcaattgggtagaattccattaaccgaaatgagaaccgaacaaaccgtttatttattctgttagtttcagtagtaatacgaaaaaccgagaaccgaagtgactggcttggttcggttaaccgagctcgcaggtcaattaatattgtgtagtattcgtcaactgccgacttaaggccacaagtgtatagtgtagtattcgtcgattaccgacttatggctattagcctattactttctgcaacacacanaagttagttactttgcataatncacacgtttagtttgg

SEQ ID NO: 19094 - DNA, 612 bp, Arabidopsis thaliana landsberg
ataaattatatttatattattttttattttatcataataatataaacttttcaatcaaatatgaaatatgtttatatatatatatatattcttttctataaatatgtttacaagtaaaagattcatatttttttctaaaaaataaaaagatataaaatcaaatatatatatatatatatatatatatatatatcttactataaaacgtcaaattatatatatatatatatatatacgttctataatatatttacaagtaagagtatcatatacttttctattcataaaagatttataaaatcaaacagatctcctttctataaatccgtatgtgcaatgcatgacacctatataaatcttctttctgtagtctattaatttttcacgttaatcaatattcactattcagtatacgagtaactaaatttaagagaaaagaaaaaaagaaacaaaaatggccaaggcaacttcttcacttgtcgtccccatcatctttcttgtgatatttgctgtaggtatgcatttatctctcatttgatcatagagcaatgagtttgcatatgtatccaatattggagacttgtcattcacgtaactctactgtcattttta

SEQ ID NO: 19095 - DNA, 215 bp, Arabidopsis thaliana landsberg
gggttcgtcggtggagtaaccaatcaaactttaatatttgtacatgtcattctattatgaaaactggattaattataatccaacccaacttctttttaaactaaactttcaatgttataataaattttacattagcccagcccaaattgtttaaaagctatttttccaatgttattacatgggcctatactttctatattccgatttgttgacct

SEQ ID NO: 19096 - DNA, 2034 bp, Arabidopsis thaliana landsberg
  unsure (1)..(2034): unsure at all n locations
gagctcgacgaatttctccgttcggagatgcggaattatccggcggagacgacggagagacttcttgaaacggcgatcgagaagattaaagagaacacttgtttgcttgcgtgtagacaattgcagaagattcaaaggctttacaagcagtggaagtggaacatgcaccgtgtcgacgcgacgnnnnnnnnnnnnnnnnnnnnnnnnnnnnnnnnngaggcttgggataactcagtggctcatccgagcgcactcgccgtcgaaaagttccttagttacagcgatgaccaccatttggaaggcgccaatattctcctaccggagatctctgccgttccgcctcttccagccgccgtggcggcgatttcccggtgaggtaaaacaggaacaaatcaatgtatacgacgatgacgaaagaagggaagtttaaagaaaagaaaaaccataatagtgccacgtggcgagattggtcggaaagaggattaagccatgatattgccacgtggcgagattggtcgctgtcttggagaagatgatgaccttttaattctgttacttaaagaaagtgtgttacggttaaacggaaaaaacagttttgagggaagtgagctgcacgcgcggggcggacgcagataatttttcccttattttattttccgggtatagtactttagggctagggtgtcgtgcggaatagtgtacggtttatacggtggactagtcaggtttaagagagagatcgttggtcaacgcggttttgttaaaaaagaataaaggatccaacggactaaaaagggagttttgttgtgttggacattgacccaacttttggcggcggattgccgtccgatacgtgtttggggtgacctgatgttgttaaataattcaatcaaacggctgtgaagtgattattgttaatattgtttataatcgtctttgtccatgagcttatgtgtaactactatcatcttcgttataaaaagacgaatggatttgaaaattgcgattaaattaacaattctgatatcaaaatatctatgagaaaaattatgtattcgataagagattcttgtgtgagttgatgcccactacccaccgacacacaccaaaaatatgaatacatgcctttttcgaaaaagtggtatggctttaaattctaaatttattccttacatttatagtatatacagtaagtaatatgatttttgtaacttcacgtactattctgtatttatcatagagctcttttatttttttttgtttttttctttaaacttactttcaataaaacgaaacaaggttacatagggcctccaaactgagttacacttaataagaactgaaacacaagacacaacaacnaataatagagcacattatcaatcaaagagaccaaaccaagtggcgaggaagaaagttccattaggacctaatctttgagctcttgaaagcggatccaagtgacaccgaataactgacttaatctccaaaatcagagcagctgcaggtcttgaagccgaagcgtgaagtcgagcatttcgttctttccagatcgtgtacaccgatgcatgatgggcaagcctaagaatcgtcgtcacattcttgtcctgacaaggattctttagccatctaattccatcttcaaacaaaagaggaggaaaaacatgggcccgagaagtgaaatagatccaaacctcccttgcaaactcacaatcaaaaaacagatgttgtctctctattgttccgcccctttgtttactttgcaatactcatgatgaaacatcatttagttatctcactcggtaatgcacaaacatcatcattacgtctctctatttgctaatttgcatattgatcgtaagaaaaagagagaagatatacaaactcaaaattaatgtttaatacctaattccagatatacacattaacacgtcaattctgtagaatggtctttccgtacaaaaaaaattcttgttatacattacacaaactttacgcctgtctttccaacagctagatcttcgaatttcattc

SEQ ID NO: 19097 - DNA, 836 bp, Arabidopsis thaliana landsberg
taccatgtgaagaaaaaccagttgaaaaagctgccttggtctttagttttttcgtactggttcgcaccagcggtggccaaggtaaaccgtatcccacctgctcccacacagcctagagttattgctgtgtaaaggacaccgagctggatgttcgtaggggcttgacataactttgatgctgtttcgcaggcttggggtcttaaagagtcaaacaaagtggttagagccagcagaactacgccctgagcaaggagtagaattggtgagttctgtttgagaatttcgaagagaggaattgatgaaaacaaatgagagtgagtcaaatcaactttaccactatagaaatgaatgatgaaaccaagataacaggaattgttccgaagaaagaatccgctgcaatggctccaatggcagggaacataaaggtaaaaccactgaaaatgttgagaatcttcgcagctgcgatgctcttcatgttgtactcttcgatcaggtagacaatcaagttctgtaaccatcccaacgtagctaatgttaggccgaacaacgttactgcgacaaagaaactagcttcaatatacatgaactctcttcttcttctgtggctttatatagttatgcaacaatgaaaacataaaaactacattacctatcataaacgggaaggtgatcctgccgccagagcgtctggtgctagaatctgctgacttcagagcttctgcatcgcgggaaactgaaccagacatatttctaaagaacaacaagtgatgttccactaagttttcaacaattgccagaaaaaaaagcatatatataaataagccaatgaaacaaca

SEQ ID NO: 19098 - DNA, 1231 bp, Arabidopsis thaliana landsberg
atctagcccggtacttggctcatccatgtaaacaaccttggcaaagtttctcatattaggctcattacatatcatagaacatagcataccaacagatgcctcaagttactttggggcttactataagagaaatatcgacgctgagccggctcttcatccctccactgaattaactgacttgtttgtcaccaatccctccatggaaaaggttgacactcttaagagactcttccacagcctgatgcaggtaagtaacgatgagaaatatattgagcaatggaagtaatatagaaggtgagcgagattgataacaatacttggttgagatcagcgcctttgagattcttaagtctcccataaaacagcagatgttcccttcctgtcagtgtttcccatagcaaactggtatacgacagacaataagagaatgattaaacaactatatcatctatagtgaaacactaagaacaaaatgaaattaatttcaagaatttaattactcatgctgcgggcatacgcccatgctggtgtatactctgtccatatcattgcatatatccaaaccttgaacaagtgctgtcccagatgtcggtttcaggagcccagtcatctgacaaagaaaacaaaggacatattactaaggctgacgcacaattcgtttgggcatacactagatagagtttctcgatcagcaatgatattggaagctaaggtctaatgtgcacaaaatattttgtccgtttgactgaccatattgatgaaggaagtctttccagcaccattgggacctaacatgccgaagcattctcctgaaggcactgcaagagataacccccgaacagccaatttaggcgggttcccatctctaccaggatacaccttcttcaggttgtcacaaacaatcgcatggcttgtactcgactcaagcatcaaccgctcgacttttttactctgattggaacattttttgttatcagaaccagtatatattatcaaaaacatagaatatattgtaaagcctttggacatacctcgtgagtaacatctggtttttccatatcaactgagactttggagccttgcctctgcaaactaggccttctcaaagaaggagatttcttgaaagggttttgcaagaagaacatcgggtttcttccggatgaagatatcttatcgatatagtatgctgcaatgagtgcacaaaccattcaacgacaatgatgtaaaaaac

SEQ ID NO: 19099 - DNA, 715 bp, Arabidopsis thaliana landsberg
gttgtttgtttacacatataaggtcttcttaataaatgcgactctgcttatgattagatagtgagattctcctgtatggctagaaaggatccaacaacgtttcctccgacatcagggaactcctcacttcctggaagtggtcggactttgcctttccgatcaacttccaccggatatttcatcagatgtcctctcatctccgacacttcctcactcctaaactgttcccagttctcctccgccactgttctcactttccttacacactctagactctctggatccacaaagcaatcatctagcagtgccatgtgttctgcccaaagcgacattctatatccgtagatctgcagattatgtaccaagtattattgatacgactaggactatgaaaccatgtgtgtactatctttgtgtgctattacctgaccccgaggacctgactgtcgtcgtgcccatgtatgttgaggctggtaagctcccattgcaatctctgtatctcttgtcccctccattgatctttggtttatgtttgcagatccaattaccacatactcatcatcaacaaccatcccttttgaatgaacatatatcataaatcttctgctctttcgacataatccctataatacagtttcaatcaaaactcatcaatcaatgacgatagaaaccgcattagcaagtcaagcagtttggttttgttacctgaggagtg

SEQ ID NO: 19100 - DNA, 577 bp, Arabidopsis thaliana landsberg
aataatccgggtcgctgtacataaagatccaaaagtagaaaacatatcatcttacaagtgagtaagctgtcttaagttgaaaagtgaagccggaattgttccatgtagtttgttgaagctcaaatcactggaaaacagacatgaattacatggtaaaacgtcaaaccattcctgttaagcaataaatgaggaaaaataagaaattatataatcagaaatataggatcaattcgtaatttctcgtgactttcacaaatcatctcactctttttacaaacaaaaaacccctgaaaaagctgctagagcatttgaagaaacaaattgacatatatacgtacagttgtcgcaaacttgaatattctccaatattagacggtattgtcccagtgagattattgttcctcaatactctgccacatatattacaaatgttaaatacagggaggagagaaccagatcaattcctagaaggtaagttgaaactggcttacaatatacttagagatctcatgcctttaaagaatttacgagaaaatattcattttagtactttcacccaagccctactcctttagtt

SEQ ID NO: 19101 - DNA, 1643 bp, Arabidopsis thaliana landsberg
ctgaatcggagaatgggaaacgaaactgtcactcctctttcgtggccatcgttcgatcaagtgtgcttctgcgaaagaggcagagacgatcggcgaatataagatccgaatcctttaaacccgaccgtttgaaattgaaccgttgggctacgataatgattttaactttcctttttctactcaaccggcccattaaagcccaacatatgccttcccaaattacgttatagtttaggcccataaaagatccattaaaccaaatggaacaacaaattatcaaaacaaaatccattaaaaattaacatgaaacatagtcataatcatcaccacatgcacatagtttttgttttttttagtttacagatcttacaaatcataactttgtttgccagtaaacttaacttcaatgggactaacatttttcccaatagatctcatgttgagaccaacaccttctcttcctggattcgccttctctggataaacaccatctttaggatgaagatattgaacctcaccgttaggaaacactctataaaactggtaagtgatcttgtacttggatctaagccttgtccccaaagctaaacactgctctttcctcgctagcttcagcagattcggaccttctctcatgatcgctgctcctcctgtcggcatctcaaagatctgttctttcggtgagttccacgtgataacgtagaactcttccacttgcgctttacgtagaagaccaccggtgcttccagcgaagatcggagacggtgtgtttgggtctagctgcggtggcgtgaatcccacgggagcttctttcgtggcgggggctgcagcagcggcggcggaggaatctgttttctcggcgcggattgcggttttggtgaaggagagggatttgggacggtgggttgttgagaaaaagtggagtttcttgacgccggaggttgcggcggttgttatggcggagttgaagatcccggcggcttgagttgccattgttttttttttctctgttctctaatgagcaaattgcttattggtatgttttgatgagaagagaaaagagataatattgtgaaatgagaagctagagtttgttggattaagtggataaggtaaccaataggattcaaccattagatttttctcttacccatcttattctgatattatctgacgtcgttttgcctcctttgttctgattctttctttctttttttctttttctttttcaatatcaattcaaattaaggcctgataatctagaacatcattgaccattagaggaccaaatcatttggattgatcatctatatgtgttgggctttgagcttagaagattgaaacttgggcctgaatcaaaattagctttttctagaatcttactacataggccttgttcaattgggtaccgctcatagatggtttcccagaattctagctaatcgtccgaggttactacttatcatcccaaatctattgtatgacctggattatttacttattctagttatgttttttcggttttacacgctcatccccttagacaccttattgactttagaagaaattaatggtgatgaacgattaagattgagttgttcgaatgttgggttggctgattttatagccataaactaataaca

SEQ ID NO: 19102 - DNA, 595 bp, Arabidopsis thaliana landsberg
ggtttgatgtggtagcatcatctttgaaacgatccaggctggtatgccccatcgctttagtttcccatgttccagtagaagactcagcagctaccgcatatatcgtttcttcatcgacactagctttgtatccaacatttgctttagtctttgttttggtgagataagtccctcccaacaagccatatatttaaaattcttgcagtaaaacgaaacaacaaggtctactcgacataaattaagaatatatcatttagttaaccttttcacatgaattttcacaaaattaacaactattcaaaatgattcaatcagaatgattcaatcggaatgattctgtattagaccatgatgcttgattcgccaaatacatcatttagtatatatttttcatatgtatagcgcaatctaatacttccttttcacgttacgttatctttgactttttatatatccaaatatttcatattaaaatcttaataaaatcactcttgacactaaatatgtttaagaaacctattgcctattctcgatgagaactaaagcaaaagtttttgtaaattgttttttatacatatacattttcagtttaaaa

SEQ ID NO: 19103 - DNA, 690 bp, Arabidopsis thaliana landsberg
gattttcgaatccctagttcaataacattagattttatgagacttttaaaaattcatgattgtttaacataagatctgttattttaacacaaatcacttgaaaatgtttgattgaatacaccctcctaagtatttggtttgtaacaatattgaacttgaccatctaaaacatgctcttatcatattaggtagatccgtagatgtaaatatgacaataaatttgaaaactgttatatataaaacccacttagagtattcaacctccatgaaaaattgttttcatttagcgatttctgatatattccaaatttcagaattgagaccaaaagataaaaatatccggtttttcaaatcaaaataacataaattgatttttttgaacagagcaaaaggactaaaccatattgacttccaattaaattggactacttctttttttttttagataatcaatgattagtcttttttcaatctatatatatttttttgcaaaaaaagttaaataaattttagaattggctcttatttacaatagaatgtcattttcttaaattcttgacatttcaaaattttaatagaaaattcataattctctattaaatttaaatggattttaatttaaaatttaaatttgttatatgcataaactttctaagttggctagtcaaaacttcaatacacaatactttt

SEQ ID NO: 19104 - DNA, 1346 bp, Arabidopsis thaliana landsberg
ccgtgacagttcatttcgcaattttagcatgcaccaaataattatgaaaattaaatcaaggtgacagacggacacagatctgaagatgaaaatacacaaaatgataacgatggaaaactcaactttcagagtgtgctctgataccacatgatgagatcctcccaaggactcggcactcttaggttgagaaatggatagaggtggctgtgatgccgtgatgatggatagatttgaatgaatcgatggatatcacagaagcttgcggaagggcttcaagatatcgagacttagatcctttggatatgcgcactaaaagagactaaggattttgctggatatacacaccaacaagatgatcttcttataaaaggtttttgattaaaagaaagataagttctcaaaagagaatacaagagtatataaagagaaggagaagagaagatgaagaggcaagtcttggaacatgctccaaggctgcctagaaaacaacagaaattaaaaacaatttttgaaaatcaaaataaactcttcaactactaaggccacgaaattgtctctttaattcagtgggtttgggccttgaatcatcaaaatggattatatgaagtgaaaacataagcctcattaaaaaccttcctttggaaaacccagtgggacaaaaccaaaggcagggaaaaagagcactcatgaatcacttatcctcttgatgaggtccttgagcttgaatcaaaaccaaagaggtagtgacttggctcaagtcatttggtcggtcccaaatgtggttaagcatcccggcaatggcttggtcgaatagcttagctctagaacaagtcattgggacggccgatgtgacaagaacatcctccgctacaagcttctcctcagctacaagctcatcctcagctacaagctcacgttcaagctccggttcatgctccatatcgttaatgctatccctgatcatatcagcgccatccggttcatcgaggcgacagcctggagagcagattagagactaattacgagatcagaacttagaaataacgcgcaaacgagaaggaaaagggttacacgtacccgcaagaagtgagacgccgtctcggcatacttccgcgactctaagagagtatccggtggagggagcagaggacccgcacagccctcgagaaggtttgccgaggtaatccgatccttaaagatcgggagctccttctccgcctcgtcgctcgagggcttcttccttttgtacttcttcttcttggacgaagagtcatccgttcgaacacgcttccccgctaccttatcagtcgccggcagcgcaacgaccgctgatataacccgatttt

SEQ ID NO: 19105 - DNA, 573 bp, Arabidopsis thaliana landsberg
ttggtctgaatgtcacaaactaaccagtgtacatgtagtcttgaaaattagagtatcttactatgcaatctcatgatcaacttccagttaacaacaaccaacattgtctgatggagatgggaggttttacattggtttatacaaagttgtgttttctaagcctcatttgctaaaccatgaagatgtcacaagaatgcatggaaatacaaaagctgccttgatagaatggtataaatggatgtataaaactctgttcttgagaagaaaagcatttgcagaggtaagtgctcatagaactgaagagaaagtaagctctttaggaggttcataagaatgattttgaaactggcagaggatctgcattgccctgactgcttctgtgaattcaaactgtaatcttttaacacaagttattgtttattttcattaaaagcgtcatatttcaatcgtttttttaaagttcagccgctcttttagaatttaacaaattagtatgtcccttcagagcttagaccattcacgaatttcacttcccttaaactattcgaaaaaatcataaacaacactgcgaaa

SEQ ID NO: 19106 - DNA, 751 bp, Arabidopsis thaliana landsberg
aagcacctattacatggtgctgtagggaaaaattcatagattttagagacaaatttgaagcccaacacaacttgataaactacttcacttataataacgaaaaaaaaacttttccttttcttacccttgagaccaacaatcaaataactttgtaacgataacaatacattccaaccaacgataaaaagactccctttggaagcatcaaggtataataaaaaagtaagtttctttataagcacgacatcgacacataggctagagttagttgtctatatattaataccagggagatgaaattatgaaagactaataaaaataattgtacgctttctcgagggtgtcagaataaattggttcggtcttgtgcaaggtaaatcccaaagtcatgttcaaatcctcaagaacgacctcgagggtgtacaatcctcaaatgaatatataagtgaagcaagcatgagaggtacaatcctcaaagccagtgatattccaggacatatccagggtatcttctcaatgtctttttatttttaagagttactaataatcttttttttttaaaattaatacatgctagatttatttaattgatcataacacatgtaaaatcaaatttgttaatttttttttattaataaacataattatatatatatatacttgccacatgtcatgatctcgcgagttactaactttctaaactgtattttatataataagatttggacccatggactgcctgatttattat

SEQ ID NO: 19107 - DNA, 609 bp, Arabidopsis thaliana landsberg
gctacctagcaaggtggtacaagttgaggcggcggggctaaatgatgaagagatggctctcatcatcaagcgcttcaagacggcgctaaagggtcacaaggggcagccaagcaagaccaagacaaaggggaagcgctcatgcttcaagtgtggtaagattggtcattttattgctaactgtcccgataatgatagtgaccaggaacagaggaacaagagggagaagaagaaggcatacaaaaaactaagggcgaggcacaccttggaaagaagtgggactcggagtgttcgtcatccgactcagacaatgaaggactcgtcgccaccgccttcaacaagtcatccctcttccccaacgagcgtcacacctgcctcatggcgaaggagaagaaggtatgtactcgaaacagtgccacttatgattcttctagtgatgatgagtctagtgatgaagaagtagattactctagtttgttcaagggattggatagaactaaaatagataagattaatgaattgattgatgccttgaatgaaaaggatagacttttagagaaacaagaggcccttttatatgaagagcatgacaaatttgtagatgccaaaaat

SEQ ID NO: 19108 - DNA, 596 bp, Arabidopsis thaliana landsberg
atttcttatataaaaacaattccagaatcttgttaaatccatagaaaattcatattaagttcgaatcaacccatttcagtttctataattttgttttaatatttttcatcactcaataatactgttttagcatgaaactcatgatgaaatttatctcttaattaattttgtactaaacacataaaacctttagaaattcataacttaaaatccataactccaaattgattcattctagtgacattaattttgtttaaatattgtttatcacctagtgcctttgtttagccatgaaaattaaattaaaattgttcatttgaattaatctagtctaggtgctcaatacttcaaaaattcataacccaataataactgtagctccgaatttaggtgatcctggacccatggtcccgtagtgacgtgtcaacattataaggcggttaacctaaggtttggtgtgatgttaatttgcctatacaatgtttggtttgaaattgcttaacggtttaatccaaggttttggaaaaggggggagaaccccaacacgcgggtttttgtgggggttttctcccaaaaatcccccttggggggaaaaa

SEQ ID NO: 19109 - DNA, 390 bp, Arabidopsis thaliana landsberg
ttatatcttacaacctagatattaggtttgtgagatggaaccttgctatggtgccaaactaacagaatgaaaaccatgagaggataaatacattattttttaattggagaacgtgattaatggatatccatcattgatgatttttgaccaacaggtccatatttgatgcaaggaattggctttgattaagttccagcgaattgggacttaaccattggagacgaaatcatattattctttagcttaaaccgccaacttatccattgcgaagaagaataatgagacatgctatttttttatctaagcgactgaagaggtagttattgaaacagtggatcttctttacataaaagaaggattattggtacctttggtgcaaacgttctcttt

SEQ ID NO: 19110 - DNA, 575 bp, Arabidopsis thaliana landsberg
aggattgattccatctgcggaaagtccaagccgcaggttcctttcttcagctgcaaatgatggattcttatcattcatcttctcccatgtaacagaatctacaggatgacggagctttccatcgcagctcttgttagtaaaatgccaccttaagtccttggccatttcttctgtcctgaacattctcttaagccgagggatgattggaaagtaccgtaaaaccttttgtgggacacctttctttacctcgcctgtgtggatattagtcttccaacgagacgcattgcatttgggacacttatccagcttcttgtacttctttctgaataggcaacagtcatttacacgcatggatcttctcatatcccatatcaaaggtctttaaaaatttcttcacatcatacaatgatgtgtgaagaacattattttgaggcaacatgtttggcaatgtctccagcagctcgttgaagctcttatcagaccatccattcttggtcttaatcctaaagagagacacaatagctgatagcttactgtggtttaaacaactagggtacaaaggggtttcagcatct

SEQ ID NO: 19111 - DNA, 612 bp, Arabidopsis thaliana landsberg
cttatctcgttaatatataatttaaactgatgtataatgtgtcaactactatatctgagaatgaagccacaaaggtccacttatagatagagacgatcttattataccatccgagtgaccttttttgggatatctctagctaaagtgttattattatacagttaataaaaatttggaaatgttatataaagttttataagtttgcatatatattgttaggcctataagttcaggttagattatggttttagagtttaggcttggagggtccatacatgtattttatatatgcgggtcaggtttggttttggttacttcggttcgggtatccgaaatatcaaaaaagttggttagatttgaaaaaactttggttaatttttggacttttttggttattttaagtattttagtaattttgatttatatataatatttgatatatttggatttataataataatttttggctacatccagtctatagtaattatatttggggttcagtttggttattcggacatttattagtgttttgatttttcatatttttgtcaaaattatctgagtaaattttgtataaattcaaaattaatcttttatacacaatgaaag

SEQ ID NO: 19112 - DNA, 950 bp, Arabidopsis thaliana landsberg
gatgcaatttcttctaaacgttatttttctaacgcgcacacaagttactactacaagtctaacttttacgagtaacacttgtcatccccacatcgtctccctggccaggagttcgattctaaaacgcgttcccacatggatgcagtggtgctcgttagataggtctaaaaaacctgttttcgaagaaataatccacatctttacttaagtaagctaaaacttacacttaaagatttaaagccgacccagattcgcactaaataagctgatagtaaggcagaacaatataagccgagtccgctcgcacgttctcgcttacctagaggcatccacagggtaagccggacaccagcgccgcacctacaaagtacgacgagtcagtctcgcatacttcatacgtaagccttgtgattcgagttcaacgtatacaggataagtcaagggacgccttgccccataatacgtttcgaaatcaagcttaaacgccaaggaaaacctcgcaaaatataagcttaggataaccttgcacaaaaaactcaagaacaagcttcaagtcatcactaaattctccgtctgtctcatcattgtcacttcgtctctaagacaaactcctaattgcgtatttagataggataagccgagctgcagatcgcaccgaatctaaatttcgcaacataagccaagcccagccttgcattcataatctgaagtcaagcttagtctcgctcccaaataacaaacaatatcatgctgaatcaaactaccagttacggttaagccgagctcgatctcgcacatacaaagatcatttcctttactaaaatgcatgacgaagacatgatccacgacataacttaaagtcgtgccgatctccccatgcctaaaagaagatccgtaaaatcaacatcatcattcagtcttacgtcatcttctcgctcgccaaaacaagt

SEQ ID NO: 19113 - DNA, 419 bp, Arabidopsis thaliana landsberg
ctattcatttaactctcttaagatgatcttctcgattggatttttagataaaaaaggtaaagaagaacgtgtccagaaatcgttgtctacaaatgtctgttcatttaactcagttaagatgatcttctcgattttgcaccaaattttttaacatttatatcttaaacacaaacgttgaaatcaatctaacatttgtgaatgaaaattagtctcagatctaagctaatacctccatcaatttcactagcaacaaggttcttcaataagtgaatcaaccatcaaaaaacttaaaaaccttttatgatgaacacataagataaccagactttcggaaaagatacaacccaaatataatcatgaatcaaatttacagaacatgaactaagcaacgagttccattaattagtgattcgatcatt

SEQ ID NO: 19114 - DNA, 625 bp, Arabidopsis thaliana landsberg
  unsure (1)..(625): unsure at all n locations
tagcccgcgcttggggtcgacttggatcgtcttccgcatcgcgcgattaattaatgtacctgaatgaaatgcattatgcacatgaatgcatatcgatggaaatattacaaacctaaatagtgttacgcgatagganacacctagcggcgaggcgttgcgactacgtataataattacgcttctctaaattaaacgaacctaacacaaacatcacaaacaataaatcatacactttaaacataattagcctaattttggctacacgataataaatcgaatacctagtgacgaggcacaaataacatttataagcaattaccagatgccgggatattactaagtacaatgatcgcattcttccagtctaattagatctagttgccacatcacggaattgataaactatacacacgctctaccctccttagctaaagctcaacaccctaagactaacaaacttagacttattagttttagacatctaagtgcaaaacaaagatagaggcacagtaactacctttgtaaattctcatccggactaatgtgcacaatacgctaattatatgaacattacactattctatagtctagtaggtagagcattatcaaggactatagaccttta

SEQ ID NO: 19115 - DNA, 1543 bp, Arabidopsis thaliana landsberg
ttgtttaccctgtgcaatgttgatcaactaaaagtgattaggtttccattagtagatataaatatgtataacagaattattttgttaaaaaccaattgtaattgtgtcattagtgcataagatttaacccccctgcgagacctttcccgtttctttctaaccataacaaatgcgttatcgaatgtcatacttgatgcatattcgctttatttgttatcttgtatggtgtactgttcttttgtattaaatatgtggatgtatgtatgtatgtttgcgctcgcatagagaacgatccggtcgaagagcccgaggaattcgcaggagaagcccctgagcagcagtcggttggtggaggcaagtgtcctttgacctatctctgtcctattcattctttaattcacctcccgcattacacatttatatctagggattgactagcttttgttatccctatccttgtttacctatttgggttggattattattgtttagctttatgctattgctcaactctaatcaatgaacatgatgagaattatcaatgatacgttgttttcccctcttttattatgatgttatacttgtggtcttcaagggggctcgagcggtttctcgagtgcctctccgtaaggacctgttctatggatgaccgcccgggaaaacagtgcaaccatgagggtggaatggggtgcccttagctgaataattagaggaactggggtgtagttcgcttagccgtcgtgccatcaatggggctcggtgtatgcggctcgctctgccaagtttgggttcgccccttggggaggagtgcggtgcatttaggaaacctaacgggcggctacagccccggggaatctttgtaaaggctacatagtgatgccctgctgggtcaccttggtagtgtttaagggtttgatcggcccgaggcaagagggaatcacggcttgtgggtaaagtgcacaacctctgcagagtgtttgaaaactgatatatcagccgtgctcgcggttatgagcaaccttgggatcctcttcgattagaagaactttggttacttttatgatgatgaatagcaatgatggttataaatctgatctctggtatttcctcttggaggaagtgcctctgggtaataactgggttattactaaaatttggctctacttatagtaataaaatttgaccaactaaaagcaactgcttaaccttaactccacatacagctagtccactttagccaaacgggacatttgctgagtacgttgatgtgtactcacccttgctttacaaaccaccccaccctaggttgtccccattgtactcagtgctcaggaggagatgttggcaacatggaggactttgaggagttccaggactacgacgagttctagtttactttagtggcaaacccccagttagctgcctgtgcaggcttatcttctacgtttcgttactccgcactttgatattattgttgaaccctatggatatgtattagactctgtggatgtcttagacatcttgatgtaattaagtacctttc

SEQ ID NO: 19116 - DNA, 200 bp, Arabidopsis thaliana landsberg
taattgatatggagcagtttttggcactagaagctgagattgttgaaaccctttgcctgttatataaggtttttcccacctagtttctttgatatcatggtgcatttgacagtatatatacgcagataagcccggttaggtggaccagttcatttaagatggaggtatccggacgaaaggcatgagtttgttgtgccggt

SEQ ID NO: 19117 - DNA, 665 bp, Arabidopsis thaliana landsberg
catatatccacgacggtcaccccaaaagaccaatgtcttaaaaatgtttgacaatttatgaatttaatgcatattcggttcaagtttatgccaatttatactaacttcaaaattcatatatgagtacttctcttccattctttccaaaaagaacaacttacacattctagatatgtttgcccaaaaaagaaaaatacattcgaaatatgtatgtttatctacatagtctcgatttttatatagattatttttctgatttttgttgatgttttagataaagcagagaagtaaggaacaaaactacattttctaaagttggacgagttcattcccatcatcatcaaccgaaaagagtgataaactttaaatacaatttcatttatatcttcttctttttttctgcatacagaaaaacatatcagataaagaaaaaccttttttttttgtggtcttagatactattattcttaaataaaacttcaaaaaataaagtcaaattagatatgtagtgcaaaggcttgttgtttattaactttacttgggccaatatgagattacccaaagaaacatacttgttggtattaataattataaggctttagcaaagatgtatatctatggatatacaatgatttggcccaaaaagcccattaatcaaaattatt

SEQ ID NO: 19118 - DNA, 412 bp, Arabidopsis thaliana landsberg
gagaagtgcaaatctaggcaaaaggtatgtttctagatgtggtgaattgttttatgtactaacatggttatccaagtgctagaaacagtgactaaagaagaagagagaaaaagggaaggtcttggctctgtgcagccaaacttcagctcagtctggcacactggactgtccggtggtgtgtccggtgcgccaggctggtccgcggtgaactcgccgctctcgggtttcgacggcggcgtacggctataattcaccggactgtccagtggtgcaccggactgttcggtgagccaacggtcgccagagcaatggtcggtcgcgcaatccgcgggcgacgtgtggcccgcagcaacggtcggttgggcacccggacagtgtcgtgcgccaatcgaccctgaggaccaacggcgga

SEQ ID NO: 19119 - DNA, 531 bp, Arabidopsis thaliana landsberg
atatctatgattatcagagtttgtcggtgtgtgtttcttttgtgtccacgatgactaattgtgacacagacaagtgtttctattctctcgtgagtcgacaagttatttccaaaaaatcatggaacaaaacagagagggaaaaacagagaaatggaactgactttgtctctgttaaccatttttctgcttttctttgcattgtctgggagatgcagcgacaagaacgacttccccgagggcttcatttttggatccgccacttctgcttatcaggttcttcggaatttgatttttcaacttctagggttatgtctttcatttttctgaagaagaaatgtttggcttttgaaagtgggaaggagcttttgatgaagatggaagaaaacctagcgtctgggatactttccttcacactcgtaattacaagcttttcttttgtgttatgaattttagttaaatgataattaagcgtctagtcttagtaaaattggtgtttaaccaatatgctgtcttaatttgacaggtaaccta

SEQ ID NO: 19120 - DNA, 972 bp, Arabidopsis thaliana landsberg
accaaacataatctgaaagtttttctgtgccaaatctgatgcaagaagtttctattggctataaactcgtagagactagatttgcttgtgaatttattaaataggagtcatttacacagggaaaacttcttgcatcaggagaaagggctccttaccaagaagaggaactgtccattattctcaagctcacgaacttcacatcttggcaatgcaccacggagtctttcaatgtcttccttgttcattaaccattgatcacgtccactgcaataacacaggcttattaaatctacacaactcagcttccaattaactaaactcattaaaaaaaaatagatcactgaacttccacttatattcagagcagagaagtttactagtgtattaacctcagaagtatcagtgtttgggcgttgactgtgtccatctgagaattagcagacgctgaagcagacttaagcaattgaagcttccatagaagtgtgtccttgggaaagattctaatcagagtctgtaaataatttgtttccgtgagtttatctcatgactagagaaagtaaaatcgaaacaacaaaatgaagaacaaccaagagcacattactagttaaataatatgaactgcaagacaaacaacatgctaatcatttgttctcctaagatagagtcttacaggcagattagatgaagttgcaaagaagtctcctaatagccctctacccatctgcgcggcatcattttcattgagcatagtctcgaacatttctgtcaatggggaagctatgtaataaaacagttagccctgactttgaagcaagaccttacactgaaacccatctttgagacagaattttataaggcacagtctttgcgtctaatttttttttgctttacaccgatatacaaaggggtgaaacttcacctttgtaaaacccaaaaatctttggtatcaaaccgggaactccgtcaggcaaa

SEQ ID NO: 19121 - DNA, 571 bp, Arabidopsis thaliana landsberg
tggcaattgattctggaaggaagaggcaaagacttttgggaagatgcagaaggtgtggtatggttcaaggaccgtttgtgtgttcccaatgtctagtccattcgggagttgatcctcaaggaagctcatgagacagtttattccatacaccctggaagtgagaatatgtatcaggatctaaagaagaaattctagtggtacggaatgaaaagggagatcgtagagcacgtggctatatgtgatagttgtcagaggatcaaggcagagcatcagaagccagctgggttgttgcagccgttgtgaattccttagtggaaatgggatgaaatcgggatggacttcatagtcgaattacctcacactcgagccggctacgattccatttgggtagtggtggacgcttaaccatgtcaccgactttatacctgtcaagactaactacagtagtgcaatattggtggagctatacatgtctcggattgtttacttcatggtgtgacaaagaagatagtgtcagacagatgaacgcagtcaccacgtcatttctggtagcagttgcatgaagccttgg

SEQ ID NO: 19122 - DNA, 855 bp, Arabidopsis thaliana landsberg
tttggacacaaaatgtcgtcgacaaatagtcgtccaatagttcgtcaaatagtcgtatcatagtcgtaaaatagtcaccattattaacgactattgtctgacaatataagagagtcgttaagtaatcgtaaaggcgtcgtacaatagtcgtatattatttagcgactaagatacgacaaccagaatagtgcccacaattcaatacaattgatcgtaaactagtcgcaaagtagtcgtcaatagaactacgactattttacgactacacgaataatcccccataaacaggttaattaatcgtatcatagtcgctatatagtcgccaaatgttacgaccaatcgacgactatttcatgccgactgttacgtagtcgtaagttagtcgtaactttactactaacatacgactatgttgcttagcgactatgtatatacgactactctgattagttgtctattagtcgtattatttctgtttatgactatgaaacgactagtgttgtagtcagtaaacgcctgttttctttgatttaaatcaaagccaaaaatcatagatctaagtttttctctctacaaaatcctaataactggatatgtaatcagagatttgaatcaaacctgaaatcaagcggaccgagagagaaaaaatttatggatagaccatagaagaaaggaattcaactaattattattattcccccttctatgattcaaaatagtaaatccccacaaattaatattttaaattcaataatttttaaatctttataccattttcataaactaatctatttttaatcataaacaaaattaggaatttttaaattttatacccctttccatctttattaattg

SEQ ID NO: 19123 - DNA, 708 bp, Arabidopsis thaliana landsberg
  unsure (1)..(708): unsure at all n locations
accttgtactaagcagaaatttggcttgacctcgaaaattcgtctagaagcaggttgcggatatcatcaatttatatgtgttcataatcttttttctgtccaaaataacatgtccaccaataaccgtccgtttggatttaatataaatatttgatttgagttatatgacccaaaagggttagcatttgagaatcttttctgggaaattaactgattcaaacgtgctcaacagattcatgtcaaccaaaaaagttagttggggaatgaatgaatttacctaggattaaacttcaaaagatataagatatatcaaatatagaaatgtagatgacaagataacaatggacataacattatgaacatattgatttctatgcttcatactctccgtaaagctccgcccataaggtagctctatagcattcggctgcaaaattctcatatgctattggtttgtacaatacagcattcaaagcatgtggatttttggcttcaagagattttgtgaagaaatgataatagatggagtgcgtcgtggaccaccacatgtaataacgagatttgtcaaggcgcacacaacttagagtttcctttgaatacacagccgatttaaatagtggtccagctttcacaaagggtttcaaagcatccacgctttcttcagcaacgtagctaacaattntagcaagtactggtgccgatatgtga

SEQ ID NO: 19124 - DNA, 515 bp, Arabidopsis thaliana landsberg
aaaattggtacagagacaaatatgaccgttggctgttgcaaagagctcacatgcatgatccctactttgctcctctcgctttcaaggccaaattctctgtttcaaaaataagaaacctcaaataatttgtcttgataaattgttgttacgcagtaagatacaaatatgaccgttgtgaggaaatttccttttctttttttgcagcctaattaaaatttcctttttcttaacctagtcgaaaacaaaaaggaaacaatagaaatttccttttttctattgaacaacgtttgcttataaatactcttcttccttgtaaaataactaattcttcattcatcttcttcttcttcttcttctgcaaaacgaaaacaaaagaaaccatctttcatttctatttttcttcggaggatctatggatcgattggattttgactcagtcggtacgtgttatctgaaactattttggtgtgaatctcttttgcttttaattgtgagtttcgctgttctgtctaatc

SEQ ID NO: 19125 - DNA, 491 bp, Arabidopsis thaliana landsberg
acactcatgtattatagtatataaaaaatctacacccaataaaatgcttaaaccggttaacttcaaaatggcggacaataaaaagtgatatttaagtccaagagattaggcataatgggacgtttatggcaaacggctcgtaattgcacgagtttacgcatagccattccaggattctctgtcatgtcaacatcttcaccgttgactttttcccagtcaaagcattgaatcaacgaacctaaagccaacaataccatcctctggcctaaagtcgcaccaggacacgttcttcgtacgttaccaaacaccattagtttctttgaagcttcttggtcttcgaaccgctcaggcataaacttctcgggctcatcccaaagtcttggggctctatggatggcccaagcgttcactagcacgatagtgccacgtggtatgtagcatccaccaatctttgagatctttagatggagaacgtggaacaagaagtggtg

SEQ ID NO: 19126 - DNA, 3349 bp, Arabidopsis thaliana landsberg
cttttgtgtgtgtttatacgtaatgttaatgtcatgtctataaacctgaaagaaatacgtatacgataatacgaatacgagataccttcgtgttttcttttccaattaggtcatttttgtacaattgtttttaaaaaagtaatttaatttaaccacgagtcattccataaattttcgtggccggcggaaaaagttgcatgtccacgaatgaaagtaatacacatccaaagtaaatttgtagtcagtcggtagctaactaaccacaaatagatttgtagtcattgtgttgctaactagtcacaaattttgctctgacctatctatcattcaatgataaataatgtcatatttatagttatgataaatttacggctatccatgatcctacaaaaaagtattttccaaaaattccaaattttaacgagttaatatgtataaattatttgcccttaaaccatatattcattttgccttcaaacccccataaatcttagaaccagctctgtaactacaaagtattgtttcttgatcttccgccaaagtcatagacaagtctggtttccaccacaatcgacccatgatgatgtgcatgtgatagtaaaccaactagttatgtaattaaaaatccgatgatctgcaaaatatgcaaccattcttcgagttttgcttatagcattagttatttttatttggtatgatttaaattacacgattatgttagaaaacatcctgactccgtaaagaactgagaaaatgagaagtaacttgtttctgaaaaaaaagatcagaaattaattatatattaatgtggagagagttacaaatatattcttgtactatattgtaaaaagttacaaatgtgtatgcacacacaatcaccttaccacctactacttgatatcatacaaaactatgtgatatatcaactttaatataatgcgaacacgtgttacgcattgaaataaaagaatcacaccatgtatgtatacaagatttgcaattttgattatatttctctactttgaaatcgtctaaagggaaaagaaaaagctaataacaaattccaaaatgaattcttatataaatgatatgctgacatgcatatgtaaaagtaaataactatgtaagacatatttttctgttaacttattcatatctctaaagtgtaaacactagttcattaaaatattccaaaagatacgtagacgtattattgagtgaacaaaataatgagtgtatcttttttattctaacttttgctcgactataaaaaggagtcatctcccattaggttttgcctgcctcaaacaaatagagcttatctcatcactcaccaaacaactctcatcaatataaagagaagagagtgggagagttatatattacacacataaacttagatatagtagtgttatattcttgattaagtaataaagatgaaaggtggaagcatggagaaaattaagccgatattggcgataatttcactgcaatttgggtatgcaggcatgtacatcatcaccatggtctcgttcaaacatggcatggaccattgggttcttgctacataccgtcatgtcgtagccacggttgtcatggctccctttgctctcatgttcgagaggtacaactacacacacatattatccacatctatgtacatgcatgcatagatatgagaatacttattttaataattgtatgtttgcaggaaaattaggcccaagatgacactagcaatattctggaggcttcttgctcttggaatattagagtaagtctctttcattagaaaaccatcttttctgctttacaattagaaagttcggttcatacaacttttaaaggttttcgtaatatttatcaaacaaaaaaatttggatatagtaaggctttgtatatagaaaacattgttttcgtacatgaagaaatcttataactaattaataataaatacggtgtaaaaatcaaaagttactttttatagttgtgatggcaaattcatgtgttcgggtacgttactttatcatgctaattcgggtacgttacttatggagatggaatacatactcacatatcgtacccaaaaaaaaactaaactcatataaaatatgattttggtttaggtattcgtcagtcataattagagttatagtcagagattgtttaacgtttaaacaattccactatcacgataaacatataccaaaattcgtctagagttgaacatacaaaatagatttttttttcttgtttgaaaaattgatttacaagtaaaatatataattatctattattacatagtatttattttgattaaaaaatttaccgtgaaaatgtagaaacaaatgaatgaaattggtaatatagtattgattattgattgggaatgagatcagcacccacaacaaacatctttaatgtgaatgtttggcttacatgttatcctacgtacacgttttccttttgatctttggaaaaagcatctacttattattgcacaaacaaaaagatgatgtgaaaaggctatgtaattaaaaaaacaacaataataatttgtatttatttgtgaatgatttcaggcccctcatggaccagaatttgtactacataggattgaaaaacacatcagcatcgtacacttctgcctttaccaatgcacttcccgccgtcaccttcattctcgccctcattttcaggtacttactttcactcaaaaacattttcttctaatgacttacttaatcataatattgctagacattagtaaattattaaccagattatttaagactttctagacatgaatttccaattaaaccccgagtaatttatattattttcaaatgtttatacgtagttatttaaaatgattagttggccaaaacattactattagtgaaccaaccaatttagtagttgttctaacacaacttctcatattatttaggcttgagacggtgaactttagaaaggtccacagtgttgcaaaagtggtaggaacggtaataacggttggaggagcaatgatcatgaccttgtacaaaggtccggccattgagattgtgaaagccgcacataattctttccacggcggttcgagcagcacacccacacggccaacattgggtccttggaaccatagccattatgggcagtatctctacatgggctgctttcttcattttacaggggatttattttttagaaatcaatcttaaatttttacattttgagaaaaattatattgatatataagaaaacattatttttcttttgcagtcatacacattaaaagtctatccagctgagctatcacttgtaacgttgatatgtgggatagggacga

SEQ ID NO: 19127 - DNA, 1504 bp, Arabidopsis thaliana landsberg
taagccgtctatcaaagaatactttcctcctctactttaactcttaacaatcatatacagtaaactccagttaatggttgttaatggttcaattgagttaaaaatgagagtggaaatcatcaacaattccaaaagtcaaacactttgtatggtgtgttttctccggaggtttgagtatgtgttcacgacttaaccaagaggaatgaatattgatccttcatgacaaaaatgtgggatctctaaggaaactatcaattaaccatgttctcttcactttcccatgtcattttgacgctggtttagacccgactactgatcaggtaacgagcggttggatcattctagatcaacgggaacccctattagttggggagtagcctaattacaattggcctcatcacctttggaagcggaagctaaagctattttggcttcaatacaacaagtttggttaaaaagttgattatcaagtacttactaaaatcatgaatggtgatttcaaagacatatccatcgataatctgcatcaaaacatcatcggttagactcagaaattgtaagaagtatgtttagttcatatatacaattaagaaggcgatgtaatgaagctgcacataatggatgtataattattaattcggatttttatccggattcatgtaatatgccggaatggctggaacatcacatgtacttaattaagggtttgtttggttctccctttgccacccgcaaacgcagcgtttgcggatggtggcgattgttagcgattgacaccaatcatagaaaccgctaaataccgttttgaaccattcgaaatagccagatttcaaaagctccttctcgcaagcgtttgcggctgcgggcggtagcggttaggttaaaaaaaaaaattcttaattaattaaaaaaattctggcttccacccaaaccctaatcactataattaaaataatctaatctattatatatcttatttttattagaaaaccctaatcaatatattgtaaccctattctctcaattatgacatccgatcaaaatcaaaaatcaaacataagtatcatctatccttttattcattcattagctactctaattctttaactatttcatggcatcgttgtttatattttattttgtattcttttgagttttttgattgtatacatttttcgatttgttttctcaattaaaaaattatttggccggacgagatgatatattgtatttttgtttggtcagaaaatcaatttttctaatattatcaatttattatagtatattgtatttttttatttcatttaatagtaatatattatatttatttttgttatttttatttaataactatcgcacccgctggtttaccagtcataaaactcccgcaaacgcacccattatcaaacgttcaaccagtcgtttaaaacgcttgataaagcttgaaaccgcaaccacccgttttcgcaaactcccgcaaccgcaaccgcaaccagttgttgta

SEQ ID NO: 19128 - DNA, 540 bp, Arabidopsis thaliana landsberg
atcactgctttgatcccattgagttgttcctatacaagagattcttacttctctatccaagctttcctgaacttccttagaagaacaagtggaggtaatggagttggcttggatcgttttaccattctctcaatgatggctactttctcttctaaggtagacagaatttgatggcgagatccagctgaatggtcaagttcaataactaagacttcaatccgattcgaaacctgcccttcctgagcttcgttttcctcagtgattgagttagaggcatgacgaatgggtagctctcgatcttggcagatagtgatggcgtgagctatggagggtagacttgttcctgcgagtttgcaacattgctacttctgtaaaacatattaggattgttctacttgaagttgttgaaacctttgttgtagcctccctgattttgcacataactaacttcttcttattggagagtctccccatcctggacttgaaatgtctcatcttcaatgagaaaatggacttgcttctattgcacaatgattagct

SEQ ID NO: 19129 - DNA, 880 bp, Arabidopsis thaliana landsberg
catgcacacgacaccgctcccgagccaaaacacgccggataccccgaaaccacctctcaaacgatcaccgaacatagaggaagtatcccgagggaaaacatcaagaacacccaaggcagagacttgtaaaatattgcctcgctcaaaggattccagggaaaccggatcatttccgagaatcacagaaatgatatggaagaatcttcaaggattatatcaaatcagaaaatcttctcgaagtccctgaagaataaggaatatttccttaaggcagaaaggttctggaaccgacttaaggatatattcaaatcttccgagaatattgctggagaggcaatttatcaagtctatatgaagcgactcaagaacttcgcataaaagggagacacacaaataacgccctcaacttcagacgactcaagagctctgaatttgaaggcaaaacacttttcttttcataatctaatcacttgtacaatcaaacacatctatttatcaataatatcaagaacaccatctgtggcttgcaatcacttttctttaaaatctcgcaaagtatcatcccacagacataccctaaatataatttcgattgtgtaagttttgacttccacaatctgtgttttattaatatagagaaactcatgagttgagcaacaaaatacacatggttttcaaggggagaagccacctaatgaaaagtaggcaatgttgaacattttgagtcctatattatctcgcgtgtgtgtgccaactttgataactaaaaagcattgcttcctctacatagcatgcgtccaattctcaatcttgtcatctaagaccttcctccattgcattctctgcaaaacatgtttgctaatttccagaatactctact

SEQ ID NO: 19130 - DNA, 551 bp, Arabidopsis thaliana landsberg
acagaagtgatggagatgttggaagagtacaagaggctaacttcgatgtttggcaaggtgaaagggcttaaggacctagggaaaggaaatatgagcgcactctcaagaaacaagaactcgcagcaattgaataaggtcctaccggctcagatgctaaagcagattggcggcatgagtggtctgcagagtctcatgaagcagatgggttcaggtaaagacctgatgggaatgttcggtggccgagacgagtagtttcttccagtccaaaactataaacatagctactagagataatgagtgttgagcgaggactgaaatattattatttttttggtagacaggactgaaatattattgtagttgtgaagtgtgattgagagaaaatttatgacatgaaaatatgtgattctccgtatcagttaatcgagtttatgtatttaactaatctgtaactttatagtctattgattgggttattattgtagtagtagttatgttaccgtccaaattcaaatttggtattatgttgatgataaacataaaatctaaat

SEQ ID NO: 19131 - DNA, 1947 bp, Arabidopsis thaliana landsberg
tctctccattcaactgcatgtacagcttttagaaaaagataaatgacttatctatgggatacatatttaacttgcattacctgagcaacctttgcctcacactgctttcgctgctcatgaaggagacccaactcttctgcctttggtcttataagatccattttcgagtctctggtacgaaaaaaagattaaagaagatcatgtgggacaaataagaactctctattttaacttcttggtgcatcgaaatagatactacagagaagaactaatagcatgaaagacatacttgtatagaccatagttcaaaagtgcgctgatgaaaaactccgttcgggatgattcagggcgtaagagatccttgaaactaattggtaatggacaatcaagcatttctaacatatctttcactttgcaataaagcttcatagcttgcattgaagtggcatgatgacctggattctccaattgctccaaagcctcaaaatcaacttgccctttctcttctctacaatgtcgaaaaacgcaattcaaaaaagaagcatcatcagaaattcccccaaattgaaacaaaaaatagggttttcaaaattacttagcagttcatacaatcaaaaatagaaaatcccaaagattcaatatttaacataatttctgacagaattcgatgacctagctcgaaactagacgaagagtttcaaaatcgagggtaaaattgagtgaagagctaagagaggaactagggttttgaggagtacatactcgtcgagggcgtcgagatagataagaattctggtgtaaagctcggagacaaagtcggaagttggggttttgagatcggtctctgtaacgctagcgatttgagcatccttgagcgccgtgataatgtcggaacgagagagcctcgggtactcgtaggctgacatagttttcagttttagtcaggttcggatttgttgtgtctggattcgaagaaactgaaaatgacaatttggaaagaaatgaaaaaaaaaaaagagagcctttgattttagttgggtcaggttcgatttgttttttgcatttgcttttcccgcctatatgaaactgcagtctctgcagatattgatgcatatttggatacggtagaacgtagaagcttttataaataaaattaaaaaagaaactttaatctacaaaaaaaaaaattaagcattttaatattgtagagatttggtcttaatatcttgatgcactagacatcttgccaaaacatagaggtcaagagacattcactgatgtgaataatgtatactttgtacgtggaaaaataatagaaaatgtgctcattacaatctctcttctaccttactttagctcaatcagacctgccttgtactttagaggcttggtagaaacgcatcaaacgacaccgtgtattcatgaaactgcaaatatcaaaagcaaggctcactaatatgtcttacaaagaatctggaagaagcctagtacttttttaactttagaaacctcttaacttgatgcaccacaaagcttttgcttccatatcctagatcagcataatgatagaaaaatgcatatgggaaaagcacgaatcagcaaaatgatttatgaaaaaacctaaaaaagttaaaaactcatagttgataacatccataagacttgatcattatcacagtagggtagtagcaaagtttctcaataaacaccttcttaaataacatccattagacttgatcattcactattactaaacatgggaacagaaacatcatcagatggataaaactctatgatgatttaagatacctcaacgatgactttaaaaagctactaagaagctgagagagggattggtttcacagcgctctgaatccgctcaaaagctactctcactctttccttaagacctgaatgctcactctctacctctccactctctttatc

SEQ ID NO: 19132 - DNA, 1947 bp, Arabidopsis thaliana landsberg
agtctgaaaccgtgtaacaagccaatacagagaaaaagcaaaacaagcaggactagaagataatctcctgcatgcaatttcagcccctgataaaagaaaaccgaagtctgtgccggaatccgttgatggtaatgttgtttccatcgaggagcttcgcacttcaagcagaaagcgtaaaccaaaggtttggtttacaagacagtttttctctttaagttctttgttatcgtgtcattcttctgtgtatcacatagctatatgcaaattacattcagtttcaggtgctagatgttgtagctccaaaagagtctacacaggacaaatctctatatactaaggtatttttttaaacctatagatatgcaaaacccgcttctctcctatttaatcgtactctgtgatctgcggttactccttgtaattttagaatccttgacaaattcttttgatcaaagaagcttatgctttagtagtttttgtttgtgctttctctaatgatttttgtttattgcattgcaggaatcggctgaagttgatagtttgaagactctggtcaaaagcagacgttctagtcaaggtccagcaaaacagctgaaaactgcaaagaccacggtagaatcttcttcagctagtgataagaaaataactggaccggatgcagtagtgccagctacacaagtttcagcttcgggtccagagactttgccacagaaaccaccaaacaggcgtaagataagtttgaagaaaagtttacaagaaagagctaaatctttagaaaccactcatgacaaaccacgtagtttcaaaaaactttcagaacatgaattactacaggtgagtctctaacttcatttttcttatacaaatccaataaatctggtctctaatttgcttattccatttacaggagaagttgtcaaattgtctgtcatgcccattggtacgtcgatggtgcatatatgaatggttctacagtgctattgactatccctggtttgcaaagatggagttcactgattatctaaatcatgtggggcttggtcacgctccaagacttactcgtgttgaatggagtgtcattaaaaggtttgttaaagtttctgtgtatgtatgtcgatggaattataaagatacaaaaggttactcattctgtaattttttcagttctctcggtagacctcggagattgtctcagagattcctacaggatgagcgggataaactccaagaatatcgtgagtctgtgagaaagcattatacagagctgcgtggatgtgctacgggagtgcttcatacagatttggcccgtcctttatcagtcgggaatagagtgattgccatccatcctaaaacacgggagattcgtgatggcaagattcttactgtggatcataacaagtgcaacgttctctttgatgaattgggtgtcgagttagttatggtaaatcacaaactataccaattccgttgatagtttgtccattttttgtatatctcagatgatctaataaatccttttttctgacaggacattgactgcatgcctttaaatccattggaatacatgccagagggtctaaggaggcaaattgataagtgcttggctatatgcaaagaagcaaggcttaacagacacccaagctctgatgcatctgttctgttctctccttctgtgcttgaaaatgtcaacttttccatgaatcctcctcctgcgaaacaggtaaacaaagattgacgtttgactcgtgtgtcaaagctttgatcttcgtctttctttccatacattttttaatctctgtggataattccataattctctgcaggatgatatcagagagccagttttgtatggtaaagtaatagcaaccaacactactgatcaatctatcgtaatcaatagcaaagtaacaggaacagaaattggacggactctggcactgcagcata

SEQ ID NO: 19133 - DNA, 1394 bp, Arabidopsis thaliana landsberg
gtaggtaaaaacaaaaaagaaaaggaaatgagcgtatatgggccgctattggtttgactaggcttcattcttgtgggccggaagaagatttgagaaatgtcttgaaaactccacacagttctacaaatttttgcaaatgaccactaactaaagttattattgccttgaacaaacaatccttaccagtacacttatacaccaataaaaaaaatctcttttgttttagaacacaactacaaaaagtcaaaaactataacatgttgtctcagattcacctttactatttttctctcatacgttgcatgttgctatctttctcgtggttatttgagtaattggtattttcttgttaccactttgttcatatctagcaatcacacatatgacacatctacttgaaattaatgacagttacagttctaaagaagcaaaaactattgaaaacatgttttgtttcttcttattattatcaattgacgttttgttgatcactttgggccttgggctgccaaggaaagttatggatattttgataacatctgaggtaccatgtttaaaaattaaaatgaccgaacctgacgcaatcgaaccggttaattaaacagaaccggaatcgttaaggaaataacccaaaatctctgaaacaccataacaattacttccaacggagaatggcctcaattgtcggaattcgaacaagattcctgagtttcgggaagctttcacaaatctcttcttcactgtcgagaatacacaatcctcgtaatcatcagaatcctcttattctccctcttccttgtttctctgccgctcctagtcgtcatcgtcctctgctttggcttcgctcatctccgcctgtgtcctcgatgaccactcaggctgaatctgggtcttcccagcgatccgattcttccaaaacggtattatatattcgttgaatttgtggctaaagttgagattttttttctggtatctttgggtattgagagtcgtcaatccgtttctgtttgaaattagatttttcattggttttctactcaacggggtatttttcatttcaatgtcgattgatgaaagtttttatttgtttgaattcagtgaatcttattccatagcctttaggtttgcttctttgagtatataggattgggttgttgtttctcattgatttatcattcaaaacgtgttactaagatttatactttgaatgaaactatgattgcttgttcagattataaactatttttattggtctcaaatgttggagattttttaagtttcataaggttgagagtttggtaccatcaaaaggtagagtgagagatgcaattctgtaaccgaatctatctgcattattgttttgcatcttatgcctgcctcatggaacttcttct

SEQ ID NO: 19134 - DNA, 502 bp, Arabidopsis thaliana landsberg
ttaagacacaccggtatgaagtgccaagacaataccatgtcataaagtgctcgacacgagtttcatgtatcgccggtggtctgagtatgtacatgcacacaacctgatcgaatactgcctaggtataaaaccgaagcgaatccaccataccaaggggttcatacacaatgcctttgacaggcttctcagcgtcctttacattgggaccctatacacaaaatttgtaagtgtcattgaatcctgttttagagtcacaaaacagagaattcatcagactttcaaatggattgacaataaaataagtcgtttgtgcaagaaatacccgggggtgaaggaagagtacattaggtttagcttcgtctgcatattttacattcctagtctacctggacgcgggataaaaagttttatggagttctttggcatccgagctcagctggatgagggtgatctacacatccaagtgatcgtctcaccctggatatgtgggaacacatattcg

SEQ ID NO: 19135 - DNA, 752 bp, Arabidopsis thaliana landsberg
atctcctttcccattttttgcagcaaagagtgcatttccacagtattgtatctttcatgtataagggatttatcaactaggcttttaagaccaacattaacatccaacttactatcagctagtagcagtttaatgtcatttactttctcaccatcgaaaagacatgcaatgtgacgaaataatgcttcatcttttctgttatctaatccatcataacagactcttagtgtcttctcaattttcccatccaaatcattttgaagcctcggcatcacatctacccattcctctttgtccctaccccgtagatatgaacctaaaacgttaagacccaaaggaagattgccagcaagcaatgcaacttcagaagaaagctccataaaaccatcaggtggagatttcttcctaaaagcataccgacaaaacatctcaagagcgatgtcttcagatgggacaccgactttgtaaatgtgatcaatcccatgagcccttaaaaaatgcttattctttgtaaccactatgattctactcccacttccaaaccattgagtttgacccactaaggcatctagcacatcttggtcatctaaatcatcaacaaagataagaactttctggttctttagcatcttttcgattgcacctatctgatctatctttatgtcttttttggctaacatttcagctagaaaagttctttgcaagtgcaacttcatgttatagtcaactagactagctctactgtaaacatc

SEQ ID NO: 19136 - DNA, 1555 bp, Arabidopsis thaliana landsberg
ccgcctccaatctgcgatcttgagaaccaatattgacccccaaagtcccgaacttggtatttagggatgctaaaggtgtatcggaacgggtcacctgcatacccaatacactgatcttatcgtaaacatctgccaaacgcagcaaattcctccgcttgagaaacctcacagatcagagataattctgactccattaccatcttggatttcttcttttgctcttcgacaaaaaaccctaaattgcctgcgttagattcgatcactgctcacgagagcaccaattgtaagattgaaacccgaaactctctattatctaagaattgtatacaaattgtcactggagaagagctctaaaacatactctagatcatcactctctctcaaatgtcacatacgacattcacaacaacaacaaaatgcataagctttctaaaaaagctaaactattgtttatgtacactttagtattcccacatatcttcaactgtaactcacgggctcctcacctaccttctcgctcgcacgtgtctctctgctcttctttcttaagtatactattaacggtctatgagagacttgattagagaagagattcaatacccaatgtctgtggagtcggagacttgaccggagaagaacgagatccttaaggggttagagctagacacttgatcggagagttcgatggtagtgagtgatgaacatgaatgttgtttggttttgaattgaacaagaatgtgtggtttgttgtttgtattttaaaaacaaatttcttatgtgttaacaagtctgttgataataaattaaaaattacaatcaatttatcaagaattaaatcaagaattaatagctggctaaatcgataattaaacctgtaatcagtcacaaagaggtagtattcagtcaccaaaactataaaacaacagtcgcatgtagtggataaacagtcactatatcagtcgctaactagtggttatatagtggcataaatgtagccaaatagtcataaatttcgattaaccgactgtttagctagggatattgtagtcactaataccatgttttcttctagtaatttagaactatcatttgatgaggatcttcaatgaattgttccatcatcgatacccactactaatgaacaaggacaaagttctccttctcgtacaaataaatcaaactcgggtgttcgaaagacgactactagacgtacaaatctaagaaaaaataactttgagactcaagttaaaacagggtttcaacgtcttgaagtgtctcataaaggtttactgaatgtcttaaggtcacgagataatcaaaaagctacatttggagatactttggctgaattagagatattgtcgattgaaccgatgggaatgttttggtatgaagcaaacaagttcttgatgaacgacgaggattttcgtgatggatttatgaaattatggtgaagagatcaaaattcagttcttggaaaagcttgttggcgttgatagatatggtaatccatgtgatgtaagtaattgaataagatggaaaactgtaaggcctt

SEQ ID NO: 19137 - DNA, 2326 bp, Arabidopsis thaliana landsberg
  unsure (1)..(2326): unsure at all n locations
cccttgatctaccgtctcctagctgcaacatcttttaaactcctcacacggaatttttaaattcctttgccagccttccttgattccatatcttgtctttacttcaagactatgatcannnnnnnnnnnnnnnnnnnnnnnnnnnnnnnnnttctcacatatttttctctcaaagttgttagttccgttttcaagttcagcaccagcacatcttgccacatgtgacttctcttttgctggataatctattccttccnnnnnnnnnnnnnnnnnnnnnnnnnnnnnnnnnnnggaaccttttctattaacaccaccaacattggatctagctcatctccactcaacatgttttgaggataaatcatcaggggctgaagctctagtagacccaacaaatatgctcataacccttgaatttctctgaactccctccatcgacctttttcctttgaggtgagttctcttcacctttcgatttactaaacgttccaaacttgaaccacaaaacataccatagctcttaagagctttcacaagatcacatcgtgatctctttttacgagtcttgtggtagcgtcgcttgaatagaaatctatgaactccttgtagtcgtttctcctttggtattgcaagtgacttacccagattcgcaaaagaagcttcgtgtggttgaaaacacgccacctgttcgacgaaattacccaaaggcattttcgagtttaccatcgacaacaactcatctgcacttgcctcatgtgtctgctgaagctctagcgtcttgtgctcaaccgccaacggtcggagagaataagctctgtcgtagtgttctccgaatctttgcttgaggagatttatgaagtcatcccttagattcacatcgtgccttaccacctccagcatggtctgccttagctcctcagtagaactgtcccaatgtgtgtcccaacctgtctcgagttctgaagtacccatcatcaaaacctctcaatgaaaagcaccaatgataagtatcagacttatctcttagaagaaagcaacgtaaaacaaagtaaaaacagagtaaactaataactatgcgccgattatcgacgaagagtatgagatgagaagagaaatttagattgatattgttgttgattgtttttgatgaaccattacagagacgagagagtgactaaatactaagagaatgctagctactttgggcctaagcgataaactaacggacaagcccaataagacccaatagtggaagtccataacctatcaacatcctactagatttacctatgattcaaaagaaaagaaatttaatatcagaaagaaaggttttgctataggaaggataaactatgttcttcgtgatatagaagatgaatattatttgagaatactcctcaatgttcaatcaggtccaaaatgttttgaagagctcatgacagttaatggtgtgctatatgaagagtggaaagatgcttgtgaagcataaggcttattagataatgatcaagaatacattgatgatttaaagcccccaagtttttggagcagtggttggtatctatgtcagttattcgtaattatgttagatgctctaattagtcctgaaaatgtgttggctgcaacgtggcaacatctctcttaacatattcaaaacgataaaaggaaatatttcaacagaccaggtaacatctcatatcatttcaaaacctcaattttatctcattttgttatacaatgcaatatagtatgctaaacttgctttgctaaattgtaactcatttagttatctgtttgtttacatatctaattttgtctgatgaagagaaaaaattatatgctctacaagagatagatcacattttaagaaggaatggtacttcacttacatattataagactatgccacaagtacatagagatcctaggtttgatactaatgtcttgattttggatgagaaagggtatgatcgtgagagtgagagaaaaaaacatgccgaatcgattaaaaagcttacttcagagcagaagtcagtttacgacaacattattggtgcagtgaatgaaaacgttggaggattattttttgtttatggatttggaggaacaggaaatacatttctttggaaaacactctttgttgcatttaggtcaaagggtgacattgttcttaatgttgcttccagtggtattgcttctctccttttagaaggaggtaggacagctcactctagatttggaattcctcttactcctaatgagtttgctacatgtaatatgaaagctggttcagatagggcaaatttagtcaaagaagcttttctga

SEQ ID NO: 19138 - DNA, 1068 bp, Arabidopsis thaliana landsberg
tcagccgaatccaaaccggaagaaacattagatactcttccgtcggtttctctatccaacgatccatcacaacacaccattcatcctgagtccaaactccggtttttaagatttcaattaaatcatcctctgatttgaagaagaattgaaacctttcttgtgataaagcaacaccacgaactgttgaatatagtctccaaattctaggcatgtctaatatccaattagacatccgttgaggagaaggattcagaaaccttcccaagatactacaatcattcctttcaatcgaacaaaactgcgcttggttcgacaaaaccagaggttcatcatccttgattgacatctcttgaatcgcttgatccaaatccatattcatcacaacaaaagtaaaaagaagaatgcttccttagacagaaacttgaaatcaacacagccaaaagaaaacagggaaatcttcggatcctggctccgctctactagaaacgagttattgagggagaagttcttgagcccaatcgaatgggaccgtgagattaacggcaatcaaagtattatccaaacgagttactaagagagagaacagagataagtttttcagcaattacatgaactctcttcatgttttacaattagtcaaatacccaaaactaaatttctgaactctacgtgatgaattgagttaaataactgcaggtcggcccgttaatctgttgggctttgcagggcgggtatgagcttcgatttgtaacccgcggtcgttagcggaatggcatgttttggatcagaaaaaaagttgtccgtctttacatgtaactaaaatatttttattatcatgaaataggaatagattatgtcaatttgtttttgtctaattacttagctgattagaaatagtttgatttccacgatttgatgattagtccatctgcaatatatatatatatatatatatatatatatatatatgaaaatataggagaaaactatgatatataccacatttttcacattttttccaaatctaccacttctctttccccttttccaaatctaaaaaatttccca

SEQ ID NO: 19139 - DNA, 513 bp, Arabidopsis thaliana landsberg
agtcgcgttagaaagtgagacgcaaagactacaagctttcgatataagcgagtatgtcaatcaagcttaattaatatgttttaatgtaatagaacttatcttttatgatcggaggcgctagagagaggggtccatgaacgattataagtaatattccatagtcgcttgttggtgtactgctttttgctgatttggagaatagctgataacttttgtttaaatcgttaggcttttgatcccaccgttcagtctttagatggtagttccatgaaagtctcctccatatttcagtcaaatcggatattgcatgaagcttccacgatctgatgaagttgccgtgacaaagtgatttttcctttgttttgctgattcagagatgcgttggtaactttagtctggaccgttgatttttcgatcccattggtgaatctttagctattagcgtcaagaagcactctgtaaagttctagctagatcggacgtcgtatgtatcttccattagcttctaaagtt

SEQ ID NO: 19140 - DNA, 1950 bp, Arabidopsis thaliana landsberg
ggaaacacacaaacaagttaagcaaccaatgaagcaactgagttttcaaatttcaaagaatccaagaatcaaagagacggagaggaaacatgttaacttaaagcatgtaaacaaacaacgaagtgaggaagtaggaagcaaagaatcaaaaaagcaaaatgggaagcaagcaatcaatggagcaggtaagcaaaaaacaaagaaacaaagaaagcatcaagtatacgagttaagcatgtaatcaaatagtgaaagaaacaagcaagcaagcaaaagaaacaaagaagaaagcaagtgaacaagctaatgatgtaagtaaagaatcaagcaatgaatcaacgaattaacattgcatgaatgtaagaatctaagtacatatgcaatgcgttgagagattcaagagatcaacctacatcatgctattgaaggaaaccaaggaaccataaaaatattttcttcgcttctgtctatagcgaaatctctggtttttgtggtatgtacctgttcatcactatagaattttgagaagtctattagctatgaacaaaagagacgataaattttgtgactgtagtggaataatatacctgaaactgcatattttctgagtatgaacttaatgaaaatttgcttctctttaagtaactttcaagcatcttccctgttgaaatcacatttattgtgttatttgtgttaaaaatggtattcaacacttaaaaaacatgatcagtcttacttaccagtttaaccaccccatataagacggcatagattggtgctagtacagtcacaagggctctaacaaaacaagaatgcagccataatcagctcctttcgtcttctttgcaaaatttagtaaatcacaaactttaatttctttctcactcaaattgtgctatatatttctgtctaccaggtgaagaaaatgggaaacaatccaacctataatgtgagcaatgctaacaaccacaattgagccatatacactatgaagtgagccactggtctgctgaaattttaacactattttgttagcaatttgtctttactttgaaacaaaaaacactgatccaaaaggcgataggaggataaactatatgtagtgaccaacaagcagaataagcatgtaagatactttggtgaatggtgatatacacctagacaaccattcataaaggacaatgaaagcgactggatgaaagggaaaagctagtaagatagcaaagtcataggcttccaaaagaatgtagacaagtgataagctagtaagatagcaaagtcatagactacatactttcagacaaacttaaaaaaatcgtaagaggtttctttacctttagagtcaaatgaagagaagttaatcttttactcatccaggttatagcccgagaattttcttcaatatgctgaaattttgtcatcctacaccccgagatttcacattctgtcatacaacaagagaaatagagaaggtgtaaaaatgtaaggctattatttacctgcttcttttttcttcagtgttcttccaattgagcaagttgttgtgtatattatctctcctgtttggctatcattgtcttctccttttccctacatgttaatttacaagaaggaacgtctcattaacagtagtctcattaggggattgttggcttacctagcttctcatatcgcatatagacctctccatgtcctgctcaaactctaaattagtgtcgaccaagcagaaacacatgttcattagtttcattaagaaaatgaaagaaaactttaattagacaccaaacacactactgatcttaagagtatgagaacactaagcgatatgaaaaaggtacttgtagataactttaaatttttgaaatgtcacttttttagtcttcaaaaaagggtaccagtgagagctgaccgtggatcccatattttggcagggggtcaagaaaataaccc

SEQ ID NO: 19141 - DNA, 2279 bp, Arabidopsis thaliana landsberg
ctctgtgcacctttcatatacgaccttacccttcttttggcctttaatctcagaaacacatatttaacattttcaaattttttgaatcgaatcttgaaacgaaatatgagaacactaatgtatagtggatttattatattggatttaacatgtatagtggattcatcattactgtattatctatattttttttcttgcataaaactaaatggccgaaactttaagtcgtttacagcccacactagttagtacccttacataagaatataattgaacctatagttgaaaagccccttaaggtagtagacccatttagagaagaaaagcccatttaaagatgttaatgaaacggttgttcttgttgtcgttcatttccgagaccatccaaggtttgctcgccaaagtcgtcggtttctgatttctaaacgccgagatccgatgatacgagtgattgtttccggcgaaatatgagtgttgtgatgaatgaaggcgaaaagttgctctctcccctgatcccataagattaaatatatcagagttttgaagctgatgagagattgaagcaggttacatgtagagagagcatcgattgatgaataaaagccaggttagtggtctcgtatcgattacttggttcagaaaaaaaagtataatcactgggccaaatttattaaaataaattgcagtgaaagcttcaaccaacaaacaggaatacaaaaccaaaacccaaaaaaacagtaaagcttcttaatcaattacaacaagcgacttatactcatctttagctatagcagcctccatgatcattacgggatcaatctctccatcgtaatccaagaacattttttggaaaacccacttaccaaagccactcctttcttgtttcccggcacaggcgttgctctcgaatccctcaagttccaaaacactatctccggcacaacgtctccatacccattctgtttatacttcctcacaatcacttcataatccgtttcccatccattacttggattacttggatgctgccttaaaaatgcatagcctggtcttgaataatgtgacgacgacgccgcttcatcaaactccatgtcactgaacacaaacaccctcttgatcatgtcttccggcttaagcttgctttccacggccactttaagaatcaaatcaaacactttctgaaaatcagtgttcatatcccattgcattctctccacaaactctgtttttgatctcaaatcgtctccttgcaccaaatgcaactccggattttggctgaatgttataagctttcctttccatggctcttcagatagctcagagactagcagacccaaagccacacaaacctccattggttcaccattcatagaccctgaaacgtcacagacagctatacaattcctcaaagaacctttctctttcatatcatctaccgttctcttccattgcagctctgctacttgtccaccgtctccaccgtctaactctctgattatctcatgaggcaacacagcaccagcagctaccttggttttccccgcctttgcatcgtcaagatattgctgaaacctctctgcgtcgtgcttcaagaatatctccttgtacgacttcatcgccactgatgctacacggttgtacggaagaatatcccagtttctcgctcccatatatacttcaggcagttgcagagttttacgcagaggaacaagaacatctttccttagccgatcacgaactctgtatgcatagtgagcttcttcaacgccttcgtattcagggaatgattctcgagtaaagatcttcctagcaatgctctcgcagagaagagttgctttgtcaaacgaagagtcaagcgatggacaccatttagcagcaagagagatttcgtttggtttgtccgatgtaaaaaactcaagatctttctttagctgatttgcgaatagatcagagacgcgttcgtggagatatctatagtctggatcgcaagaatatcttgtaaacgcgtccttccccatcgaaaccttctttttcttccgatccaagcttgctctggctttctcggcttgattcttcctctcagcgttggctactctcaacgccctcgtcgccactggcttccttttactactggggcgactagatccacgttcacgaccaccataaagacgaccatgataacaatgaccatcataaggagctcttctatctagagcttcactttttctcttgaacctttctgatttctggatctttcggatttcagatccttgtagaat

SEQ ID NO: 19142 - DNA, 1572 bp, Arabidopsis thaliana landsberg
gaatctgttcttttcacttaatttgtttcacataagaaattttattttgttttactcttatcttttgtgcacgattgtagcttatgtggagaagaaggtcataacaaactcaaatgcaagactgtactgaagcctaagccaccaaagaaaccaccaagtaggccacgaaagcgaccatttgcctcgatttctgaagctgaaccaagcctacctagccttccaagccttccaaacgaagttgaagatcttccaagcctgtcatctgcacttcctaggaaaggtcatggaagacctcgtaaaagttagtttgatggtgcatcatcctctcaacctcctcctgaacgaacagagcctatgtatgacatagggcctagacatctaccaagtgtgaattcactacaagaataatgggtatctatagcattagaagataacggttaacgtatttatgctatagttgacttatctctgtttttcatagcgtttgtaaattgagaaacgatattatacgtaatcgagaaaaataaaagttctactttttttttttgggctgtaaaggctttttaacatggtctgtgatagcacatgccacattataaacgttataaaaaattttagctccagaaactattgacatgtgacctaaaaacatttagtatttttttttttattaatttcttattctcttaaacctaaaaaatccattttctcttctcttaacctaagtcttttcctcttcctctgttcgtctccttcctacactttcttctcctcatttcttcgtcttcttctcctctttttggtcaaataaatctaacgtaaatttagcacaataattttcaaagaggaataaaagaggctcctttgagtgtttgattttagcaagtttgataaatcgaagactttgttgaagagattccgtcatactaatgtttgcttttgagatggagaagggtaggatttcacggattctccaattttatctcgttggccacggaaacatatcgccggagagaagaagatttgttcagatttgataaaacaattgtgagttttagattcctcgtattaatccaaatacatccaccaagtgtttgcttttattcctcactgaaaatttctgtttttcttataaatctcaaagttcgtagctttggatgtttaatttgtttaaactttaaagcctttttattcttattatttgactaagtagggatagagatgatgaaggaatgatttttgtagttgttgcttggagaagatattacaggttctcgaaatggtggattgtatcgcgcgattcttgaaagctggttaatacacataatgttttggtcttgtttgtgctgtactccagtttatctctccgtcatcttcaaattaatgaccgccgaggtgattatactttcggtctctttctcattttgttgcctactttattggggttttctcattttcttaagtataagttattcttatacatgacaaatatattcttcttcgaacccaacttttgggtttattttggttaaatgaaaatcgatattaaataattttgttgtttttgcatct

SEQ ID NO: 19143 - DNA, 560 bp, Arabidopsis thaliana landsberg
tgaaacgcagcagattctgcgtttgcgctaaaggttacgaggttaatagccctagagtggttgagtcgattttgtacggttgtgttccggtgattatctctgataactttgtgccaccgtttcttgagattctgaattgggaatctttcgcagtgtttgtgccggagaaagagatcccgaatctaaggaagattctgatatcgattccggtgaggagatacgtggagatgcaaaagagggttttgaaggttcaaaaacatttcatgtggcatgatggtgaaccggttcggtatgatatatttcatatgattcttcattcggtttggtataaccgagtttttcaaacgttttagccagattaattaggtttgacaagggttttggtttggcctttgctacttgccaataattaactacgtcttcggaagattgtattttgtagattactgatccatatttagccaattggacctgattacaaattagacccttgtttagttaaatgaacttgtaaaacttttttaaagggttaaaaaattttactttaatcaaagcttttt

SEQ ID NO: 19144 - DNA, 1607 bp, Arabidopsis thaliana landsberg
  unsure (1)..(1607): unsure at all n locations
agcaatgaatttggtacttcgtcgtgggccgtggtcgtttaatgattggatgctctcaatccatcgctggtatccaaacatcagtgaaaccgagttgaagatcatgccgttttgggtgcaaattacgggtatcccacttctcttccttactaatgcgatggcacgatgtgttggaaataggctaggaattgtgtctactgttgactttgatgagaattcgaatcatgttggatttgtaagggtaaaaattgattggaatctagatgatccgcttcgatttcaaaggaattttcaatttgctgttgatgaaaacactgtgattaagtaccggtttgagagacttaggaacttctgttccaaatgcggttctctgaaacatgatgtgaaggaatgtgttcttgcctttgatgatgaagacccagccgtgatcagtgaggatgatgatgatgataatgatgaagataatcaaggggataacaaggataaggacatgagtgacaccgatacccttcaaacagttgaccctgcaactctcatccctagacttcaagcatcgattccaagggagactcaaagtaatgtcatgaaaaggccaatctcttcagcatttctaagagccttcgaggacacagacctcaatgttgaacgactccgctaccttcatgcgaaattggcaagagtcagaacacacacacccgttgaaagcgatctccttctagattcctctgacaatgcacagaatcctttcgtcttcatgaagaggaagagagttcagtttgagcaactgtttcaagaagttgaagaagcagaggagatggcggtcctgagccatctctgcaagaaagagagaaagactgaatcggcaggctcttgctcgattcatggtggtatagacagaggcgcgggggccccggtacccccaagggatccaatatgaagatcgcctcatggaactgtcagggcattggtgtgccgctgactcagtcacggctttctcgtcttttacgtatttataagtttgatattctatttctaattgaaacaatgaaccagtgtgatgtattatgtaacttagcgggtgaacttggctatcctaatgtaataacacagccacctattggaagaagtggtggcttagctcttatgtggaaaaactatgtttcttgtccttgatttctcaggatgaaaggctcattgatacatatgtaacatataataataagagcttctacttgtcttgtgtgtatggtcatccagtacaaacagagcgttatcatttatgggaaactcttgaacaaatatcaaattaccgtaatgatgaatggctattaatgggtgacttcaacgagatactttccaatgatgaaaaaattggaggccctcagcgtgaagattggacttttagaagattcagacagttagtctcacattgtgaccttgaatacatgagatcaagaggggatccgttcacgtgggttggggaaagacattcccatacagtcaaatgttgtttaggcaaggccttcattatttcagcttggtccacgacttttcctaatgcagagaaagagtttaaaaattcacgggatcagatcatcgaccnattc

SEQ ID NO: 19145 - DNA, 606 bp, Arabidopsis thaliana landsberg
  unsure (1)..(606): unsure at all n locations
taatacttaaagtttaacaaaaaaaattatcgctgttaaatgtcatttagaattttttttagaaaagaaatagaaaaaacttaaaaggtagtacatactctttatgtaagaaataaatattaaatgttataaaacaatttaacaaatggcgtgattatgtgagttataaatttgatattttttgttttcaacaaatttttagtcttgtacattccattttatcaaagaatttaattctacacacttgtttttattgatgatatctaaattctaaataacaattatttagtattaaaaaaaggaaaaacataattcttccatgatgcgttaaaattcttaaaatataacataggtattcaaaaatttattcttataagctcatcattttttccattttttatgtttttatttaacaaatgaaaacactatattatagatgataaatataattttatccaattaaattaatgttaaataaattatatttttattttaaatttcaatgtcccgttttaattagtattattatctataataaatgattntaaaaaataataattcatgctaaatataatgttatcccatcanattaatgttaaataaata

SEQ ID NO: 19146 - DNA, 2124 bp, Arabidopsis thaliana landsberg
ctcttacaaaaagaagatcccttgccttgcgatcaaggagattggtctttctttcttttcacgcatctgtaatacttgcgatcatctcgctttcctctttcacactttgtaaattccaataaccagaaaagaacatcactacttatacatttcatatccctttaacaaaactatctatatatatgctcagcttcaactttgaaaatccgctcgacatatatatgtttggcgtttacaggtacatcttctaatgtggaacttctctaaatatatctcctaatatgaaatttgcaaaatgggtctttaaaacccttgacgtgataaagtgacttgtatgttcttcttatcttgtagatataatttatgacaaatgtattgttgactgattcttgaacctctgcgatgttgtaggcctcttaagaatgaacgttttgtctaatcagaatctcaagaacgtttgtctcactacagtcctcatctacatggtttccccaaaataacgtttcgaaagtataactttgttttaggctgattaaaatatgatactattaataaaatatgatactattaacccaacattaagaaaaaagttgtaaaaaattcaagaaagctcatgtactatacatcgtcgtttattcagagcatataagaaatttaaacaaaatcacctttcaaagaagggaaaaggtattatagctactctctgtaacaaggagagcagaaattgcttttaaacttgatgtgattcaaaaggaaccgagatcaaatttggaagatagacacagtaagaaaactgaaaaatcccagaattgatctgaatcttcttgaacatatctcccctcaccatatagatgcaagtagctccagttttgtaatcgccacaacacatgattatggtcttgtcaaagatgaagtaactactgcgacaataagtatcatctagattaggcaagttggttgtcggcaatgtcataaactttatccacaccacttcctcctctctatcaatcttcatctttgttacccaaatctcaatcttcgttgtttcgaagcattgctttaacaatgaaaaccgatcttccttaaaaaccgccaggacaagttcattgctaccaaagtccttccgacacggcagtagacaaaagggtttgaaaatctccatggagaaatcaaaggtttcgatgaaatactcaagagtctcagggtggttatgagcaagccaataaagattcccgttcacggacaaaggatccttgttgggccacaggttgaaagggttaggggtatcaataaatttgaacgcctgcgatgcacactcgtagatcgcagcttggtagtaaccttcctggagagagtcgctgagtctacgcgtacaattaaaataccccaagatcttgtaacacttatcgggtttacaactatcgtatcctacaccgcaaaaacggaaacctttatcctcatactcgatccacccaacctgtctcaaccacggattccaaaccgcaacaccttgtttccaaaaatcacgaaacaataacccatcgcaagccatgatagttgtaaaattcttcttcataggctgacaatgaaaatcgtagggtacctcacgcacctctatcgttccacccagatcgatctctatcgagtacatcttcttcgattcggtaaggaagatgaattggggacgggcacggaccaagtgctttttgacaaacctcttgtcgctgaaaagaccgttccagtgtttacatacggtcctgaaccgaacaagagatcgaggtggaagccgagacagtatctcttcctccaaatcccacggcaacttcaccgacgccatcaggtgctctgttttacaaatcctttttttcggtcaaactgtttttgcaattccagctgctaaataatctgattatataggaaataaaattaatttttgtttggtcaaactgtttttactttttacaatttagctgctaaattatattgaagaaagataaacttgagacaagttgccgacgaaaaaaaaaagaaaaaaaaaagaagaagaagaaggataaatgggcatttaaaattgacaaaactcttctatagaccacaaaatgagtataaacaagagtttttatt

SEQ ID NO: 19147 - DNA, 2185 bp, Arabidopsis thaliana landsberg
tcaggatctttaaccgaaaaaataagtgcactttggtgacataggtggtcaaatcaatttttttaaatctctccgcatgcactaccatattcatgaaacggtgtgttacgattcacccccactaacagatcgcaacatcctcgttgcgcgccaagaccgtaacccccgatggtgcaagccttcttgacttcacactcatctgagttcggctctgatatcatttgtaacgctctgaccgtccctacccgcagaccccacatcatctttcgggctcaaggaccacccctgttcgacggtcggtgcgccacgtccaggaggctttaagacttgttaccgaccctacaagtcaacacatgatcttttcccatgctttgtcttcactcgcatggttccgataatcactttgcggaaggttacccatcctgaaattattccagcccaagcacgcttaactgtggtgttcttttaggccctttgactgaaaagctaagtgcactttagtgacataagtggccaaatcaattcttttaaatctctctgcatgcaccaccatattcccaaaactggggtgtacacttttagtgtgaactataaagttttatccttacaaaagtctagtctatttttaatagaaaatacttagattaacaatgattttcgcaaatgatacaaacaaaaagaaaagatttgaagacatagagaagaatgcagttggttgatcagtaattgttggcgttggctgtaattaagtggctgaaacaaagtagagagatttctactttgatttggttttagtaaatccaataatatgagtcaaaacagtagacaaaaacaaaatattataactgacatgcatgaacacagatcaaaccaaaaacgttcattaaaaacatcaaaccaaaaggcaaaagagtcaatgaagcgttcatgtagattattctgtttcattaaaattcatgttttcgaccaagaattgcaatggaagtagtcaactaaaattattcataatcgaatatgcaactttttatacatttcacattgaccagtaataagcaaattgaaatcttggactcttggaacgaacgtctcttattacacacgaaaccggcacacgtccaacattcattcaataggcaaattctctgcttcatatctaaccgaatcgaacagtttagtcgataaataacgttctcctccactaggaaaaaccacctgaaaaccaaacaataaccagttagtgaaaaagcttataggtaagcagttagtgaaaaagcttaccacaatgagtttccctgcgttttctggccgctttgcaacctttaacgcagccgctgctgcggctccagaggatattcccacctgccaaatgaattatctcatttatcagaaacttctcctttttttctgtcaaaatttcgggtttataccgacaaaaacaagttaacctatagtaccagtaatccttctttgagggcaagaagcttggctgtttcaatagcctcttcacctgtcacctaatgcaaaacattgcaaaacttagattattgtttcacgatcaagaagtaaattatctcggctacttacttgaataatttcatcaacaatgcttaagtccaaattggctggaatttcaccagagcctattccttggatcaaatgtggacctattgatcaagaatcatcaatgatggatagagataatcaagtactccaagaaaataatgatgtttattcctcacctggttttcctccgctgagtaccgcactttcggaaggttccaccacacaaacctattatcaagattgtaagaaaattatgttaaaaataagatcctatttcctatggttgttttcaaggattattaaagttttgaaccttaatatctttgttcttttctttaagaaacttccctgttccagtaaccgttccaccagttccaacaccggcgactaagatatctactttccctgctgaatctctccaaatctccggacccgtggttctataatgaatctgcaagaaacaagtttaaactcaatcataaaagagaaagaatgagaaagattttaaaaatatagtcggatgccataatataatataacctctggattttcaggatttataaactggtgttgtatgtaaccaccaggagttttgcttaatatctctttagctttctccact

SEQ ID NO: 19148 - DNA, 1829 bp, Arabidopsis thaliana landsberg
gtgccggtaactattgcctatggaatattagttggtctaactgatgacaataaatctgcaaaattaatgataaaggaccacttatgtttaatggatttgaaatagtgttctcggcgtgtcattcgggtttgaatccagcgtgtgaatatgaacgacgacaaaaagaagaaaaaaaaaagaagaagcaaaaaaagctgaacgtctcagtctcgaagactctagttttctaagtaaacgcaagacaataaaagcatgacaaaagctgttgttgtaaagtgcaattcaataacacatggagagcttcttaagacttttttgcaataaaatatgaaatggtgtaaagtccaatttaatattagaaaatgaaatggtctatatattctacgaccatttccacgagagaatgttgtgagccctaagttcacacttctatcgagcacaatgtagcccacaacgaaaaccctagtgtagagatgatcggaagtttcacactactactgtatagtaaagacaatggactcgggactgagtgggtacagatcataagcagattcagaggatgaaggaatcgtcacgatataatcagatgacaaagaagatggcttgaagcgcaagttatcactgtacactccagggtctgatatgatctgttccatctcagtctctcctttaagattttgtgataaagagtatctaaacttagaaaatacatgtgtttctacatcattgaattacgctttcatgtccatttgatgtctcccaagtaaatcgatgtgtatgagttcaatcgtagtgagaaaaagatagtttgattcaaaaagcactagcgatacatgtgtgttttggatgtatgtaaattgagatgatggtaaggttccagacaactttaatgatataactacgtagttaactttcggataacctcactagcctctcattaagtaggcaatgtatcatagcttttgatattacagtgacgaggaagaattctctactgtggagtttaagatcatggattcagggtataacggatagagatcacaaccagaaacagaggatttcattgttgttgtcgtctgatcggtcacaccagacgtgctcgagctactatgcgtatcaatgtccctcagctttgagatgctccagtcgtgcccatatataccaggatctgacataacctgtgttatttccgatctctccctctagcatcttcacagcctctgacattgttggccttaaggaaggagatgagtttgtgcaaacgagagcaactttgatcatcctcacggcttcacttctattgaactcaccctcaagcattcgatctacaatctccaatatgtcccctgtctgttgcagcgtcagcgcctgagatttgatgtaaaaactggtttcagtaaacttatggaaacagattacacataaaatcaactaaagagaaagaaaagctccatggttacccaattgataagcgagacgttatcagcatttccctgctgtttggtattactctttccactaacaatttccattgccacaactccgaagctgtacacatctgctttctctgtcagttgaccccataatgcatattctggagccatatatccgctgcatcattattggaaagaaaccaagaatgagatatttcttcagccatgaagtggtttttgtcttatgttcaatacttacatggttcctgcaaccttggtgctaatgtgagtgtgttctgcttcatgaagcctagctaatccaaagtcagatatttttgcattaaggtcggtgtctagaagcacattagtggtttttatgtcacagtgaaccattct

SEQ ID NO: 19149 - DNA, 836 bp, Arabidopsis thaliana landsberg
tttgtgatctaggagggaggatttctccatcaatgtagtcaaaatattggtttgacggaagaggagaattgaagttgtggttccctgtcaaggatgtcatggaatgcttcaaagatcctcaaggctcatcagttcttcttctgactatggcagaagttggtggagataaggtgggttttcacttgtttgatgtggtggttaatggcaactctttcagatctgtttgactgatacgaagctcgtcttcaaagctgattagtgagccaccaccctctggatccttcgcgtttggtatccacccgtccggttgaagtgtgcatgcttggtcaaaccgaatatagttggaatgggaaggaaagggatatacatgagtatgtcgggttgctaggtcgggccgtcccagtagatcgactatcgagatgattaactttccagaagataaccggtggatctagtgcgtcagaggaaagcgatcggtgtcggaaacctactcttccggcggtggttttttattttctaaggctatcgagagctaggtatcttgaatccgcctgatctaaggctcatgccaccttgccatcgaccatcaataggatgcgatccatttttccgattttggaagtttctacaattaggcttttttgtaactggatcactatttgtaaagctaaatcgagcccaattttgagaaattttttaagaataattatttcttaaaaagaataacaaaaagttttcgattgagtaattttagaaataaactttactaagagataatgcgtactagaacatattagtataagtcgatattcactagttttttgagatggttatat

SEQ ID NO: 19150 - DNA, 1882 bp, Arabidopsis thaliana landsberg
  unsure (1)..(1882): unsure at all n locations
gatgcattatatggcgccgtaggagctgtgctagtgnctgagattagacaagaatcttcacgtcatatgtggggcctttcggacgttggatgaagctcaaggaaaatatgtgatatgtcatggtttttactgacaccacacctgtgttaatggacactcttattgctgccaagggaattcttgtttactaccaagtctttgagaatccctgaagtcttttttatttgcaaaagtagtccctgcacgttttaagtgacaaatatacctaattgtttggtcattgggagacctaagttttgttttaaagattgttacacattttgagagaagaatccaatccctttagagaggattctgaactcctttacatctattcttaattcatcaatgcaaactattcagattatgatttgtgtttctattatcatgtctaagtaatcaccttgttgggtttagggagtctcaatagggatttagatggattagtagatcgaaaacccattaggattattcttagagttcttcatcttgattattcttattgctagttttagattgatcacctagaacttgatattagataataggtatgcccgccatgggtagttgttattagaactatcatagatgagcctaggaatttaagaaagaacatgtaggctcatagaagggctctggtttagatactaggtgaactaatcaagcttaataacaatgcatgctttacacaagatttctcagcttctctggttatcttagctctaagtatagaaactttcacggaacaccaccggttactctaatactatagtttgagtttgagaaaggttcgataacaatccttatattagctagatctacaatttatctatctcccgagacaattccttagatatgacgctttaatcacttgaatctacaactcatttacttgcctatttgtctttattattcaattacctcatttagcttattgaacaacatcataagtctattgtttgaacatcgagagctcagtggaattcgacccttaagtgctaacgacgatctcttaattgagggagtaagcttaaggcaatttgagctatatcaaatttggcgccgttgccgaagttctcttttagtttaccattagactaggtgtccttttaagcctaaatacaacttttctaccacctattcccgtgtttctttgtgtattggtctcttgtgtttcaggtaccttcagattgagactcacgttttcatggcagattttcacgacggtgtcgaccgacacaactctgtgtcgatcgacagcctttgcagaaccagaaagctacaataggagactttaacggaactgatctcttctacaccaaccgttcaacattcaatctaccaccatttgaaagagaagaatttgctatacaccctgcctattatgatcttgtatcaagaggaaagtttagaggagctctagatgaatcaccatttgatcatttggaagtcttggaagacatagtgtcctctactaatacaaaaggtgtaccagctgattaccttctttgcatactcttcccccactctctcgcgagcaggggaacatcatggctgcgtcaactagaacaaggttcaataaccaactggactgatttaaagaatgcattcatgaattaattctttgatgaatccgtgatagtggcacttcgtttgcaaatttcttcggtcactcaagctccagccgagtcccttctagcagcttggctccgcttcagatcttatcagagagaatgtccccaacatggcttccaagagagtcaactcatcaatctattctagagagggatagcaaagccattcaagaatcaacttaatgcagcaagcttatgtaacttcttga

SEQ ID NO: 19151 - DNA, 1657 bp, Arabidopsis thaliana landsberg
tattctctcttatatattattgactcttattaaacaactttcatacacccttatttatatagaacttattttcccctaattctattatggaaaagaaaatttacaaatttatctaatttgactatttgtatttcttccttcttatttcctttttgtatctcttctaaaaattagaaaaatagattatattttttttattatagtatgaattactattattgtatatataaattcaaaaattacaaattttgtttaaataaaatttgaaacttcttaatagacatttacataaacaaaatgctaaaagtcgtgggatgttcggttccggttctggttataatcttggttccaattctggttccagttttaggtcctgaatggatactgcttttcgattcaaattttggatttagattttagtttatagattatagattttagattttagttttagatttatgttattatatttttgtttaaaaaactctaaaaaattggtttgagttttgagaaaaataaagttgatagagtaaaaactacattttctaaattttaggagaactaaaaaaactaaaatcatgaatgaaaaactacaacaaaatagtttttctaaattgtaggaaaaccaaaattttaaaattttgattagtatgaaaataagtttttgaaaaataaaaaccaaaaactcttacaaaatctacaaaatattcaaggcctttagattacagattttttattctacaaaataaaaataaataaaataaatgataataataataatttggaaaagaaagaaatatggctacgttcacgacaaacactcaaacttgtaaaccaaaatgggcttttggattttccttacagaaatgtataaagtaaactctcatctagattctctattggaaggtatttttttttaaagtaataactctcaaatatgccttttgttttgttctgttttgttttgttaaagtagtaattagcaaaacctttctatataaaaaaggaaaattaaaaggccttaaagaaaaaaaggaaaattaaccaaagaaccgtaagtttcgtctttccatattccacgtccgtttacgtttgtttgcagttgcaaaaatatttataaatcaaagattaatccttcttttttttatataacaaagaagattgatctttatcaggaaccctaagttttgtcttctctctaataagtctctctggattaccttgtgtaacaaggatgggcagcaccgtcttggacgcaaacccgtcaaccttaagagaacatccaccttcctcatattccatcaagtttgagaatatcgcagaactcgacgatggcaaatacgaatctagtcttttcgcagctggcgggtacaactggtatgtatacttacaaatacaactctttgtttcactaattgtgtacctaaatttagcactatgtatatgtttaatctaacttatttcgaatctagtctttaattaccttacaaagtttccaagaaagatgaagaactgaacataatagagctcacggtagtgagtagtttggaccttggagacaataaattttttattgctagatgtgatttgtgagacatatcactccatgaagaatgatcatgtttttaccctctatgattttgttggcaaacttttt

SEQ ID NO: 19152 - DNA, 555 bp, Arabidopsis thaliana landsberg
acggagttggatttggaagtgaatcatgcgagtttatcggtagtgaatgatcttatgatccaacaagcgactgtgaaaatggggaatcagtttttcacgcaagatcagctcaaggttgctctaacggagaaagttggagaatgtccatgaatcgaagtcagcatctttagggctaataaactggagaaatactgcgaaaagtcgaaaacaacgatcatagtataagccgcggtaaaaagtgttaaacctttcaaacaagtttctctagtgaatgtagttgtaaactctattgtgtaagggtaattttgtagtacccacttgttgctattgaatgcttgttagagaggattcttagtgtagtatatgattaggttggggtttgttgtttcatgagataaataaatgtgtttggccaatggttaagtctttggtttattggtgtatgtatgtaactaaagcttttgttagaaataagacaaatgggactgaagttggagttttttgttgtcttttgagttaaagtttgagtttttcactctcaagtggagttttttt

SEQ ID NO: 19153 - DNA, 1689 bp, Arabidopsis thaliana landsberg
ttcacttctcgaaacccaactagatctttctcttctttctcttgttcctcatccacaccatcaccttccactacacttcttctcctctccctaatctccggcgccggaggtttcttattgtatgaactacgcgacgatgaattagcgaattcacgaacactagggagacaattagcgtcgtcgcttttctgatttaccaacggaacaacaacgtcttcaggagtctctaaagagcaatgcctagggtttgattgtttccttggtaacttcttcttcccgggaattgtggaagatttagaggagccgctgaaattgaatagctcgaagagaacatcgctcatcacgccgtaccattctccaggaactggctcctccgatggactttcagctaattctggatctgaaggaattggagcagatggaggtgaatcggaagcggaactagtggcggcgatttccgtgtggtggttgcggcggagaaagtcgtcgagagtaagtggattgccagaagcatcgtcatcgtcggttgtgaggcctctgtttaatcggaggcggttgagccaagtggaggaggcaggtttgtcgtcgatgatggagcttagcatcggagacgacgaagataaaaatcaagactcgtctttgttttgtttttttgtctctctgctgtgaatttaaaaacagtgcgccgtttggattacaggaaaactacaaatgaaaatcctgagttcaactacgcgtcgtcttcttattatctttttttttttggtaacaataaatacgtcttcatatggttttgtttttataaatccaaaaataccaaaaccaaaaaacattgaaaagcgaatttttctctatctttaatctcttgtagtactaatgttaaaacggattttttggtacgaaaagttcgtacccaaccgcttcatattatatttgtaaacaacattcctcaggaatggctcttttgagtcctaattaattttcggatgacaaacaaaaaaaagaatcagaatcattacctggagaaccctttcaacagaaaccatttctttttctgtttcagtaaaacttgttaacaagcttcctaacagagaaaccaatggagctgcatatgagagcgctaatcccacctgtgatccaaattataaatagtatgcttttcactttcctatatatttatgaaaactgcagtttcttaccagaccaggtgtaccaaaactgattggaaagttccccccggagccgaggacagccattacagcgacaaataagacaatcattgatcctaacaactgcaccattttactcaacttatcagcgatttttcgagatttccatatttattgcagacacatgaaactaaacattgttaccaattctcaaaaggtgaatgaaaaatgttctacaaaatgtaagcaacgatgtattagtgaacctgaagacgcaaggagagccacaagcttgcgattatctttgagtaagaagtccgctggtatagcgtcaaatgctcaataaatctaccttacaaaagctcctgtcatgcaaaccggaattagcatacagttttgtcattaatggagaaagcaaacctgacatttagaagcagaaccaaaactaccctaaaattaaaagccctgatggttgatgaccccataagggtctccgtgaacgatgcatatatcggtgatc

SEQ ID NO: 19154 - DNA, 1025 bp, Arabidopsis thaliana landsberg
gccacaacctttggaatccaagtttttcagagatcacattcaatacaagagctagtgcattcactccaagacacatttccaaagatcaaaccctctccaagcctagaattcaactcaaacatttagtgacttgtgagagagtgtgttcgtgttcttttgtgctcttgtttcttggattgcctttcttcttcctcattcttgttctcaagtgacttgtaattaaagcaagagacatctaagtgtgtggtggtccttgtggggtcttagtgactcgattgattaaggagaaggctcactcggtctaagtgaccgtttgagtgagggaaagggttgaaatagacccggtctttgtgacctcctcaaggggactaggttctttggaaccgaagctcggtaaaacaaatctccgtgttcactcgcttgattcttgattaatttgttttgcgccctctctctcggactcatttatatttctaacgctaacccggcttgtagttgtgtttatatttgtaaatttcagtttcgccctattcaccccccctctaggcgactttcaattggtatcggagcccggtgcttcattagagcctaaccgctcgaagtgatgtcggaacatccgccaagagggatctcgggaccgacgacaagactgcaagctcggaagaacacactcaagggagtccgcccacaagcacaaggaggaatcctctttctccatcaagtcccatcggatgggtgacaagaagaagatgagaaaagtggtctactacgagaccgactcttcgtcaccctccaccgccggctcggaatcggcctccactacttcaaagcgccatgagcgcaagaagtataataagatgccccttcgctatcctcgcatttctagacgtactccattactctccgttccattaggcaaaccacctatgtttgaaggtgaagattattctatgtggagtgataaaatgaggcatcacctaacctcactccacaaaagcatatgggatattgttgagtatggagtg

SEQ ID NO: 19155 - DNA, 257 bp, Arabidopsis thaliana landsberg
ttgacgtcatttcgataatcgcgaaaacgggaaaaatgccatttaatactccaactttcaaattatggtcattttatacatcagcttcacatatggccattttatacatgaactaaacgttgaccccctgtccagaaaattgaaatcgttgaagctgatcctcgaccttaccacgttacgcatggtttaagacttaaaactactttctcgaacgagcttaccatcatacccatttaacccgggatctcctcgcttgg

SEQ ID NO: 19156 - DNA, 524 bp, Arabidopsis thaliana landsberg
  unsure (1)..(524): unsure at all n locations
acgaacaactactaattcattaagtcgactaacactcancgttctactaattgcaaacacaaaggaggttgactaaaaacagagtaaatgaagaacaccccaaactgaacaataaacaataacagaaatctaaaccaatccatagttggactttggtttattgctttctcctcaatcttttttcatgtgcagagggttgtaattggccaaaggtatgcatgaaccaatctggtttgtagaaaaccagtatgtatccaatcgtcaatccaaaggcaataccaggtccgaatcctattgcagctgctatccaactgaacacctctctgtcttcttcctctgactctggcggttcatgttgatgcggtgctggtgcatgaatatctaaacaaacttcttcaagtgaagagccataaagtccaggggttgtccttgaaagaagagcaattttgtcgacgaaactgagttccccctggtactagacctccagctggttgtagagaagttcatgtaggcaaggtacgata

SEQ ID NO: 19157 - DNA, 1987 bp, Arabidopsis thaliana landsberg
tttcatatacttcttatacacaaatctatgtacatatgctatgaatgtcaggaatatccggaagaatgtaggacttatgattatcatattttcaattcagaaagaagagagaagctggtggacacgactgctgaaatcggaagagaaacctgcaccttacatcaaagtcgactggaataaatggtgtgatgaggatgaggaggtcaactgtaagtcgtaaaaatatatgttacaagccaaagttctcttttcagttcaatctctagatgataatcgaaaatcttctcatattacatgcttgattaagtaaccttgtttgaaaagacataggaaaatcacaagtattctgatctctatatgataatttgcttctaacgttagactctttttcgtttctgtttcaactgaaacagcctctgatgatgagagtgcagtaagtgttttctcataatcgcctaatgtatatctttctattgttgtttagtaaagccaccctgtttgattattttccctctttattttcatagtttgttaatcaagatagtgaaagcagcgatgacgatggattgctctgtaagtttcaagaatctttatcttcttatagcaatgattacgtacatttcacatattatatctatgtatacctgcaagtagagattaagtgaagattgatggattattgtgttaaaggccaaagtattagtagcaaactattatgtgattcagttctggttagtgccaaatataaatctgaacttgtctgtactgatcttactaataacattatatttggtcagatcttcctgatctggaaaaggcaagaaacaagtagcttaaccgcaacaacaaccaaccaaccaactctggaagatgaagaaaaagtaaaagactacgagctgaaacatagtgctttaggatgatccggtttgttctgtacctgactaaaccgaccacctatctcttccggtttactcaggtttacctctgatttaggtttcgtagggtaatcagcattagttgtctctgatgtagtttggcttttttttctgttatggttggttcacaagttagggttcggtatgtgaattctaccgagagtaggaacttataaagtaatgtaagggttgaactctaatagactaataccgttgaatgactatgtctttttcaatggttcggatactttatcgtctttagcatgtgatgtcgccgtgaattgatcatccgacgaagaagaagatgcagggattatttcagaccaaacttaaaagcttctgatacaacaagaatcctagactgtataacaaaacaaaactttttctgagaagtctgcgtgtgttactttaggagaatctcaaatatccagtttggaatattttgtttgaaatcataataagatccttaataaacataaatctttctcatgatccacaaacagacatcaacgaatgaaaaaaggacaacatcgtgcaacactaaaagttttcacattatccggcatagttgcaaatctcccatcgtaaagtttttaggcggagctggtgtaggcgggaaactcttagccaccggttctttctgatggaatttgtacggtggtggtgctggtggctgcggatggacctgacgtggatacggtggtggtggtggaggacatatagtgggattgtatagttgaggttgattcatccaataatccggcagatgatagtttgagaaaccattaggaccattcatgtatggcggatgatagtttgagaaaccatcaggaacatttatgtgtcccgacgcataacgttgttccatcaaatggtctttccgattttccggctgcttactctgtccgttattgctccataatataaccgcttttttgcctgcttttgtaatcttttcaagtattatgtgtgggtcgacttttcccgatagatatactgttttgctttgcttgtcgatcatgaactcacatctgtaaacaacacaagagaag

SEQ ID NO: 19158 - DNA, 923 bp, Arabidopsis thaliana landsberg
tattgttattatatcaaaaatatgagtttttgtataaaaactatccagtttatgggcttttgtatgaaaaatacatctctctctacttttaattaaaactataatttctaacatattaaatgataatttttaagaagctgtatttttaatatatttttactatttatgagacaaatacagtttatttattttatctactaaaatatgatatattaaaaaggaggtaattttttaatttttctcataattataaagaaaaagttatcatacttggaaaatctttctatatattgttctggaacatttattaatcacttatactaattatcatacaatctaaaaaacaattgaacatatattactcatcaattcagaaaacacttcttacattatatggtatgcattgtatcatgttggaccatcttgacataaacatggcaaaacgcatatatttggaaacttatataactaaatcatgatatcttattattaaacatattatatcatctgtccaactaaaagttaatttccttaatgaaatccaactctaaatactaaaacttccacaaagtacaaataaattgagtacgggacaactgaataacttatggcacaactatggctaatgcgcagtattttgtctgggcccgcattccactttaattaccataataactattgtgtgttcacactatgcgttcacactatgtgttcacactatgtatttcaatttcaattcaaaaaactttttctcatctcattaagtacaaatttttctctctctctctttatttctctctctctctctctctctctctcctttcttctcttgaaaagttttcttctctccttctctcttctctgacgacgacctccgccgacgaacaacacaacgaacttccgccgacgaacaacacgacgac

SEQ ID NO: 19159 - DNA, 556 bp, Arabidopsis thaliana landsberg
ttttacaaacgaatgaccagttactagacgcaatatgtgaacggattgcgtcatctctaagctcacaagggaactacattgtacgtgaaggtgatccagtgacggaaatgctcttcatcatccgtggaaaactggaaagctcgacgactaatggaggcagaaccggtttcttcaactcaatcacactgagaccaggagatttctgtggagaagagcttcttgcatgggcattgctaccaaaatcaacagtaaacttaccatcctcaacaagaacggtgcgagccttggaagaagttgaagcctttgctttacaagcaggtgatctcaaattcgtggctaaccaattcaggcgtttacatagcaagaagctgcaacatacattccgttattactctcatcagtggagaacttgggctgcttgttttgtacaagtcgcttggagacggtataagagaaagaagttggctaagagtcttagcttggctgagtcattctcttcttatgatgaagaagaagcttgtgcggttgctgcacccgaggaatgagtcatgaagga

SEQ ID NO: 19160 - DNA, 892 bp, Arabidopsis thaliana landsberg
agtctcgactttcgagcagtgtgcgtaagcatctgatccctgtcttggcttacttagagagttagagaaccggtttctctaggtcaaaattaggagaatatgcttacatgcaattgggattaagtttctttgtaggctcgatgagatgagcacggcttaggttatgtcttgatgaagcatcacgagattttaaggtttaagcccgctggttgcttatttggttaatcgatcctgatttagacagaggattgatggagatcatcattcaatcaatgaaacgatatgatatatgcagagatcatcattcatccttggattttacttcatcaatgtctacttgggatcatcggaattcacagagtctctgtataaagacttcgctcgagaagaagaagaagaagaagaagaagaacaagaagcgagaaatagagagttttgattcttctccgtcaaggagaattagaagaagcgttgagagactgcgtgagatggtcagaagaaaaaggaaaatcacagtctttgtataaagacattcgctcgagaagagaagaagtgagaaatagagagctttgattctgtcacaaggaagaataagaattagggttgagagagtctttatttataagcaaagagaggtccaaaaataaaaggaaaactgacaatcacaattaattacggtcacattaagatttcctttttttctgtaatcaccagtaacggccacttaaagatttccttttatttgatctgatgatgagttttaattaagatcatctattggatcatctattgaaggaacaggctatgaaaccacatgttgagtgtttactctgcttttggcatatagggagaggtgtaactctctgatgatgaagaagttatctacagacta

SEQ ID NO: 19161 - DNA, 738 bp, Arabidopsis thaliana landsberg
tcgcttttattttataagataattatatgtagttcaaaactctttaagccatacaaaaaaagttttcctctcctttgagagtcaattgtcttgggaagatcttttccaattgcatattcaatgatgaagattagtgggattctcaaattaaaaatcatcgcattcctttgtaggtggtttttgagttccctcaaatttcttaccaactcggtgatgactagcgacgacatctgcttcacatgtctacgtgtctcaaccttgtgttggattctttaaactatcttacttcctaaaaggattaagttttttggatagagttttctttaagttggacctccacttataagctgaacttgttatttatctggttaggcaacttggatggttttattgtttagataatccaatgatgtaagaagtttaatgtgtttgttaaaacatgtaagtgaaagttttcacagttgtatcttttacaacacaaaattttaaataaagaacaacacttatgagaaagagagaaaaaagactacaagcaatatcattctttttttcctttttattgtctttttcagttttttttttcttctactttgttttactattcaaaataagttaattattggtggaacgatacaatatttgtggcctggtaagataagtatccacaacttaacatttatcaaaagtttatgaaagtaattgaaacatatgttctattgaattttgttcatatgaagt

SEQ ID NO: 19162 - DNA, 621 bp, Arabidopsis thaliana landsberg
  unsure (1)..(621): unsure at all n locations
cgtcaccgaatatgattgagtcttgggaatccttgttcttgacgtaggaggtgaacatcttcttctcccccgtcatgtggtttgtgcatccgctgtcgataatccagcttgatcccccggatgcatcaacctacaaggcaatttaggcttgggtcttaggtacccaactcctgttgggtcctacaaggttagtaacaatggtcttagggacccaaatgcaagttttatctcccctgcaggatgcccctaatttcctagcaatcagcgtcctatcagctctacgagcagcttagnnnnnnnnnnnnnnnnnnnnnnnnnnnnnnnnnnnnnnnnnnnnnnnnnnnnnnnnnnnnnnnnnnnatcctaggcatatgatgagtgacacttctcctaggcatatctctaccatgcacataggaagaacttgaagcaaacatggcatttgaatcattacaactcctatgaacatttctagaacatctcttatcacgatcaactgaaagccatgagttccttttgaccttaacctctaaatttttttaaaggggtttccccaagttgttaaaagcgttgggggggggggggggcccccttttttaccccccccccccttgtgttttt

SEQ ID NO: 19163 - DNA, 2141 bp, Arabidopsis thaliana landsberg
ctttggcttgcttgcagaaagctccagagttacggcctgatgttagtgacgttgtgagaatcttgagaggggaaatggacatttcctccactgctttcgagttttctccttcgccaccgggaacagtttacggcagtagatcgaagcggagaagctaaaacaggcaagtgcagagtagtagttcgaggtttgatctgagcttttcattttcgaaattgttggatgtaacttgaaagagttttagcttttgagaatcgtattatgttgtaatttttgtaaactatatatatgatttaagctcttatatataaatatttaaacttttaaactttttcgattgattaaataattttagataaattgtcttgttttcttaactatacctaatatatttgtgttttaaatgttaaattttaaatatgtgtaaactaattggacacatccattgtccaattatgtttatttagaattttaacacctatttcatttatcgaaaaacgtttttagtttttagtttatactaatttatatatcaatatttaaaaggtttttttgatgttctccatactcttgatggagtaaactgatggttccttgaaatgtggcatgaaaaaattgcaacacataaaagaatccaaggccataacattcatcattggttcacgagtcacagaatacagaaatattatataagaaaatgaagttcaaggacaaaagaatacagaaaaggacacaaatagactatgagagagctctgaagatcttgccttggaaacacagtgagctcaacctttgcctgttctgcagtctggctcatatcatatacacattgaactttaacttcttgtaacttgaacgtggggcgatgcgtggacgtgtaacaatcaagaatcacactagtttttaacgtctatcatgtaatccggagagagattcctgaatcagcatggctgcaaatgattagttttgcagattcattgatattaggaatatgcaaaggtagcgatcagcaaatctagtaaactgacgaaaagattacctggaaaactgcacggcggatgtagtgaaagagaggagaccgtgaggtttgagaattgagtcattatttcagtgatcgtttgatgagaaacttcaagtcttacccctatctgattattttctgtctattgatcgttgacccttgtagcctccctgagaaccaactttttgaagattcatcctcttgctttttctgacccccttcaccttttgctcctcaagaagtttctggagcataggatttcctacgaacccctttgatttcatctctgaatagatctctctggccttttcaagccacccacatgacaaaaggccctgtattgtagccaagtaaagagcaggattagccactatctcaaaacgatccatttctgcccagatcttcaaagcattttctggttgctttcccttgaacaattttccaagaataagaagaaaggtctcttctgtaggacctaaatcagagatcttcatttggcctaaaacctctaaagttttctcgaaatttacagcctcaaggaatgcatgaaatgtatcaactgttggactaaggttctcacttatcatggttgccaatacattcctggctacgtccagctttccagcctcacaaagggggcgtatcatcgagttgtaggtcactgaatctggctttaatccttcctcgttcaactttttcataagcttcatagcttcatcaaagcaatcctcacgggtcaacacataaaccaaggaattgtaaacttcaatccctggagccaatccccgtttcttcatttcatcgtatagcctgagagaatcaaaaaggttcccaactttagagaagcaagagatcatgtgactgtaagagtccttgttaggcgtgatacagtaattccccatctctcgccaaatcctctttgcttcagtcacatcagtccaaatgttacaccaaccattaagaattacgttgaatccctcaacatccaccggaaagagctttttgcttgcaagcatgaactctttagctttttcaatgtggccatgtctacacaatgcacatagcaatccttgaaatgcttcatcataaggagtgtggttaaacttatccataatatcaa

SEQ ID NO: 19164 - DNA, 505 bp, Arabidopsis thaliana landsberg
cgatctttgtcaacaagtgaaatacatttgggatgcaaattaaactaattcaaatcgcaatcgataaatggacttgagagagagagagcaaaatccttagtaattgcggttgccggtaactagatagaactagtttgaagaaaatgatgtactaaatcactaatatgtactccatttgttcatttttgtttgattgtttagaaaaaacacatatattaagaaaacatattaaatgttgattataaatgtattatttttagtgttttacagttttctataactttaaaccaatgataattaactatttttcttgaaaattacaatttatcaatactaaccaataaatattacatggaaaacttaaaaaatcaatcttttagaaacaaattttttttctaaacaatcaaacaaaaagaaatagagggagtatatgttatttttattactgattaactaggctaaaatgtattgatattgacagaataagtatttgataaatgagaat

SEQ ID NO: 19165 - DNA, 464 bp, Arabidopsis thaliana landsberg
gggcctgctagtattagcctatacaaggatcgtgattacaagagaggacttattctatagcaaaaccctagattttctagcagtttgtttcgtctccttcctcctaaattaacctcaaattcgttttagggtttcttcagccgccggtaatggacttttcagatgatgacatgattgataacaaatcaggggaggagaattacagctatggtggtggtaacgaatccgatgactacaacgatgtggtagacacaattattccatcggagaaaagttacgtggttctcaaggaagaagacattctcaagcttcaaagagacgatatcgaacgagtttcatcgattctttctctaagccaagtggaagtgattgttctgcttcttcactataactggtgtgttagtaaagtcgaagacgaatggtttacggacgaagaaagaatcccgtaagccgttggtttattg

SEQ ID NO: 19166 - DNA, 1031 bp, Arabidopsis thaliana landsberg
  unsure (1)..(1031): unsure at all n locations
caaatatatacatatcaccgcgaagacgaagggcaaggcaaagggttgacctattccggatgccgtaatccgcaagagtacgattatcctcggtgaagagctcttcaccgtgaaagataagcctctggtggtccgggcgtaaaccttccctgtcttgaatcttcgccttgacattttcaatggtgtctgagctctcaacttttagggtgagggtgtcactggtaaagtttttaccggaaaaggtactcacaaatatctgcataccaccgcaaagacgaaggacaagatgcagtgttgactctttctggatgttgtaatcggcaagagtacgaccatcctcgagttgcttacctgcaaagataagtctctgctggcgaggaaggattccttctttatcttggatcttggccttgacgttatcgatagtgtctgagcttttgacctcaagggttatggtctttcccgtaagagtctgcacaaagatttgcataccacctctcaacctcagaaccaagtggagagttgactctttctggatgttgtaatcagccaaggtaaggccatcctcgagctgtttaccagcaaagataagtcgttgctggtctaaaggaatgccttccttgttctggatcttagccttgacattatgaatggagtcggaggtttcaacatcaagtgttatggtcttttctgtaagagtctttgcgtagatttgaattgtcatctgtaaacaattttttttatgggagagaaaggaggattctgaatggtaagaaccaaaaagatcaggcgaaaaaagatgatgagaagagatagaagaaaccaataccttgaaagagagtagtagtacttcacagaaaacttttgcagaacgatcnatttagggtttgagtaaaagcctttctcagtttatatagaaaaggaaaaggtttggatttaaatcaactttcgagattataaaatattccacttaatctggtaattaaattattcnaaaattaatattatcttggttattcgctttgaatttt

SEQ ID NO: 19167 - DNA, 2300 bp, Arabidopsis thaliana landsberg
ggaatcttttggtcactctcaatgattttgaattaaaaatagttttagttatagaaatgattttatgtattgcacaagttaatcaaataaaaagaactattaaataatgaaaatatatatcttaaataaaagagtataacaattgaattcttaaaaatcatacagtatctcaacaaatccaagaaacaacgaaacgaaaaattgatgtaccatttggtcgagttaagatacaaaatgaaaaattacattttttttttgtagccatcatcgacaaaaaaaaatgtcttagtcgccgattaaatgaaataaggacaaatgatggctacaaaaaaatatgtaatttaaaactgtccctaaaggtaaatctgactcatcttaagagattgtttgatttttgatatataagtcataagtggttgactaatgtcaaataagtgacgccttttgatgacatggagaagtatgcagatgacattgattgatacggatggaatggagaagttaatgatctacatgtcacactcctcatttcaaaaatagttaacggtgattatgagtcttcatcgaatactcattttaaaggagttgctgataaaaaaaaaaagagtggatgttatgggcatgtatttaagggcatgtatttaaacaagaagttaccaatcgtagcctatgactaggattatggcatgcatgattaccatgatgtggatcaggatatagagtagagaatgttaacgcaagagacattgctagatcaagaattaactcatacaaaaatgatgaccggagattgatgatatcaaattaaattaagtaacatagactcacaaacgcatggtggtaatttgaagcctatgcattcaaagaatgttggagtcatggatccgaatagaattgttgatactagtgggaccagtccttccttgagaaaaaggatgcatgaaccatctcgtgattgtagtgctattatgtgtgtacacggcaaattgacacatccgaaccgaccaagttatatatatgtcactaaaacagtctgaccaacaagagtttgaagacctgcaggctacgtttatatcttttgactattatagtatgttcccattactttgagatctcgtagtactcaataaatattacacggttttaagtcgataaataataaatacataaaattctctagctaacgcttttagacaattcgaaaccgagtggaaactacacaaagcatcttttgacatatacgcacgtgttacttcatcatcgtccaatataaatacactcatccctaaactcaacaaccattaaaaccaaagatcaatctcttcttaatagtcaatcatatatcaaaaaatttaaactcttcttgatcaatggcttcttcttctgctgctatgtctcttgaatccatctctatgacaactctcaacaatctctctcgtaatcatcaatctcaccgcagttctcttcttggtttctcaagatctttccaaaaccttggaatctcatctaacggtccagatttctcctcccgatcaagatctactacttccaagaacctcaacgttactcgagctttcttctggaattggggcaagaagaccgaaaactccagaccaagtaagtttaatagtttatagatccttttgtcttttagtacactgcgactaagtcaacgcctgttaatccgatatttttcctagatttgagacaaatcaagatttaaagactaataatcctttttgttagctcagaaatcaaaatgctttatttcataagcaaaatcgattagatctttaaatgccctgctcaaaattgattggtctaaaaaataatcagatcttaaaaaaacaaagtaccgaattcataaattcgagttttaattattcaggtaagatccaagaactaaacgtgtatgagctcaacgaaggagatagaaacagtccagcagttcttaaactcggcaagaaaccaacagagctttgtctcggagatcttgttccatttaccaacaaactctacaccggcgatctcaagaaacgcgtgggaatcacggcaggtctctgcgttttgatccaacacgttcctgaaaagagcggtgacagattcgaagctagttacagcttctactttggtgactatggtcacttgtctgtacaaggacaatacttgacttatgaagacacgttcctcgctgtcactggtggctctggaatctttgaaggtaacgtacgaaacaggtataagctatcgtcagacttgtgtatccgacaaaactgttctacacttttaaccttaaagcg

SEQ ID NO: 19168 - DNA, 924 bp, Arabidopsis thaliana landsberg
  unsure (1)..(924): unsure at all n locations
ataaattttgtttatagaatcaaaaaatgatttttagttattgcaaatattttttctttattaaaaagaagtaaaatgttatttgtaaaagtgtcacattgaaagtagtataatgagtgtgttttttcattgaaaatatttgtggtagacaaattttaagttaaattacttagatgttaaaagacaacaatttctgattaacatgacatgaattgtataaatatatataattgaaatttatgttatgttccacttaaggctttcattatatattttttcttaattcatatgtgcatttaaacttaaatattccaaacactgtagaaattataataatctggttgacgtaaaaaggatgatactctagaattcaattctaaaacggatatttacatgaccacggccaatatcgtaaagataatcctgtattgatttatatttctgttctctatcttaaaatgaaacttcaggatgtcaattcaactcattcatatgatattcattacgtacatgacgtcctattaaggtgtttaaacaccatcttatcaaccataattatataaaaggttaaacaatcactagagtttaattttacgaaacaagttgttaaataaacaataataaagaatgagtaagagatgataatataccataaatcgcatttgatgtaaaacagctttttttcgaaaaattttacataatattcaaaaaaaagataatacaccataagtaagtatttttattatttaatcttatataactcaaataaataaaggaatactgtacaagaaaaagattgattgaataaaggaattacgttttgaggatntaattcataactattcattttatttgaatacaaaagtaactatnatttgagaagaaaaaaaaaaaaaaaagcaaaatggattgatatatgatatg

SEQ ID NO: 19169 - DNA, 2249 bp, Arabidopsis thaliana landsberg
  unsure (1)..(2249): unsure at all n locations
aaacgttcagatgtaaacaataaaaataaaaaaaaaaacaaaaaaacaatacaaaggctctattgtttttggcaaaggcccaagctcatcataaaacaggtaacactaaaccgggtttttttcagaaccccgaaatagttgtggttaaggcttaaccacactataagtctataaccaccatcgacggcgaggttaatgaccacttacgtaagcagactagcagagtcacgaagatgtatactcattcaaatgtgagcatgatggcagtgacacaaaagtagcgagagatactaaacaaggattgattagcatttagtccccctccttccctaataagatatggttcagaacaaaagcatgcaaaagcgtcaaggtgcaaaataaagagtctcaattgagtaccaatcatattccaattcatagcccttcttcaatagaacttatagagctatgtaatctggcatgccaactgaggaataagcatgtaggttcatgtgttaatcaagcgcatacaaagcgagagtggccatttttaacaagactaatattattcaagatcttattactaaacatggttctagcttctaggccttgttttcgtaggaaactaaaatgacagacagtaaaaaacattggactcaccacattcacttggaagaaccataagaaagataatatttaaaatgaaatgtaaacaagattaaaccaaaaaggaaccaatcaatgtacaaatttttttggcagctctcttctcccctatgatctacatttatttatgggcaaacccaacactagaccaccaactatacaaaactcaaaaaacttttcaaactgcaaaacacaaatgaacatccaaatgctatcctctccgcccagaaacaaacgtgggaactaatctcagtttctcgtgttagatacatcagcttcaatgtgttaaaaaatctcccccaagaagaatgcttgggaagtcctctctgtctcgctctcgctctgtttggatgcggatgtggccaaagaattgaaagaattagcaacacatgtaaataaaagaatgcacaagaagaatccagtaaaagaatgtgtcaggtggctgatgctgttgttttgttcttccggcacatacaatcaggacaagggaatatgtaaatggagtcacttgatcgtttcagctcaaaccccttggagtcactatgggacctcatgcttagcatttgccgtttaaaacttttccatctgccgtaatatcagaaacaaccattgagggatcaaacagatattattaaccaaaaaagcatgtttgtaggtggaagaggttagagttcttaccccaacttgggattgtcaaagagtacggctaactttcgcttgtctggccgaatcgtctttgaatgtcctccaaacaaatacctccgatgccccatgaggaaatgagggaagtttccaccttgtgttgtcacaaatacctcactgtggagacacaccgtgtaatctattgcagccattctcgaggagaagttctaaacacagacacataagtttacaagtcagaaaggactcatcctggatgaacaaacagtggaaaatcgtagaaaccttaaaaggagccaggtcttcctcagaagcaagcatctcctttgtctgtagattagggaacatctcgagtagtggggccatagttctatttgcgctatatatcgggccagcggcaaggaatatatatgtacttttgttgaagcccattcctctaagcatcaaaccgacctgataggtttacaagaacgaaaattgaaccaatatcagcaagttaatctactcacatgctcaagggtttgcacaactactctgattattccacagcagtgtccatggataaataatctacaacaatattctcgtaacactaatacttaatatagaccacaatcgtggataagtagagtaatgtccaggttctaaagtatttatgcttacctctaaaggagttaaagggcatttcccattgagcctgttagctcctggtcgtatcacacggcccggttttgtgaacttccctttccatcctcgttctctagcggcaatcatgtcttgtttttcttggtctccaccatcaaatacacaacaagagaacgcaaccatatcctgcaacatgttctcacagtgtattataactctccccttagatncaggtctgataaaaggatagcaaccatgataaagggacaagtaaaagattcctgatgcgtttcttc

SEQ ID NO: 19170 - DNA, 803 bp, Arabidopsis thaliana landsberg
gttcataactcctttgaacgtggtccatagttcataggggaaagtccaagccttttcagatgtcttgatctgcacatagttacatgctgagttaaaccataaactaagaagaggagtaacaacaatatgttagcacaaaaaaaaaccataattagaaatcctcatagtactaatcaactcagaagcaaaaataagaagagcaaagaataactgtaatgatgctttaaacaagtctatgatatataagctaatgatattcttattatataactacttgttatctttaaccatgataaaggataagtagttaattaagtatgatgagagtagtaactgtgtgaaacaaaacaagactagaacaatgtgagaacaaatgactattaatagattcataaaagcggcatatcatggaaattagccttcatatatcttaaacattattaaggcatgagattcgaaaacatttaattactctagaacactactaaggctttaagcaagtctatgatatataagctaatgacattcttacctaactatttgttttctttaaccatgacaaaggataagtaattaatcaagtatggtgagacgtaataacggtgtgaaacaaaacaagactataacaatgtgagaagagaacaaatgactatataaatttataacagcatcagagcatggaaattattcttcatatctaaaacattattaaggcgtttactataaaacactattaaggcataaaaatcgaaatcattctacttcagtactattttaagttcatgaaatatccaaaagttcca

SEQ ID NO: 19171 - DNA, 1547 bp, Arabidopsis thaliana landsberg
taccataggaggccaattatcaaatagttgatctaaacaatgttcatgcttcacaatatttgactgttcacaccaatcagtcattttcaaaaccaaacctgtgatttgtcgttttgaagaaccaacaaccttgtataatttcagtgcttaacttgcatcagccaatgccaagattttaatcgattttgtggcacaaatcgctacatgttgctgcaagcaactttccaccaactgctccccttcaaaatctgcttagctagagtgatgttcctcagtaggaacttcaggaacagacatcatggaaagttgaagttcatcctcgctcagcttattaagcttaattgctttcacatctctgacggagccttgcctaataccctgaagaggaacctttttctgtcctatgtgaaattgcatcaccgacttcttaaaatcacaagttattggccccaatgtctccaaccattgagcacctaataccatatcacaccctctcaaggtaattaccataagatcagcctgaagttgtgtacctcttaattcccattggaacttatctattttagcattaagtcccaacaatctcccatcagctactgaaacttgagccatacttgcaggttttaaaacacatttcaacttctcagctactttggaatccatgaaactgtgtgtagaatccgggtcaatgagtatagacaatacttgcttctcatataaacctttcaccctcatcgtgcggtaatcagaaactcctgaaattgcattaactgaaatatgagctactatgcctgttttctccaattcaaccttctccatatgtacttcttccattttcccactatcttcttcagcttcaaaccgtgtttctttgtacttctcatcaccaaagtaacaaagtttttgattattcttactcctatcttcaatggacaagactttgtgaggttgtgttgtaggatccttaggtctctccatgctagtaagaagaactgtgttatgaacatgctctggtttagatgataaaatccctttagactgactgttattttcactccatttagcaacacaacaattgtttagactgttcttcttgggatgagccttctcatatcccctccctagcatcaaacattggtggattgaatgaggctgaaacattctaacatttatttgagtatccaactgcaatcctttcaaatatgcattaaccaaggactcttcagataagttcactctagagctaatcaactcaaaacgagcatgatactcgtcaattccatctgtttcctgcaattgattcaactcaacaattggatcatttaaaacttcagcaaaacgttcctgcaacacaagcttatacgtttccaattactcaacaatttaaccccaaaatcagtgtccaacaacgattggtgccacttctttgcaactacatcaaaatgactcgatgcgactcgtactttcaactccttcggtgtaaaatcaagagagaagaactgttccagcttaaacaaccattctcttactcgatctccactaaatct

SEQ ID NO: 19172 - DNA, 616 bp, Arabidopsis thaliana landsberg
taatccgaactcgttttgagcctgtcttaagaatctttttaaggtctcttgggtttgtgatttttcctgcaaaaagaacacccaagttgttgggactatgcttcgtcgccgaaggtcttgtaggaagaagcggctttcggctgaagctgtttgtatgggatggccgaagttcctcctcatgaagcttcggtattacaaaccgacttaaagatagaatgaccttttagtccataagggtctgagtcaatgttgtaaacttttatgaggggcataattgtaattcttcacaggctgtgtcctgtgtctataaatagtgaacaatattcctttactgttcacgcattctgataattgcaatcgcatctttcgggaaccaatctttgccaaggcagaggtataactgtattcaatgattcaatatattaagtaaatataatatggttcgtttatgattcatttacctttttatactctatattttatgttatcttatacaatctattaaaattcaattacgaagatttaaccttcgtaatcgtattgtcatcaaccttcgtccaaggtccactaatccccaagggaataatgcttcgttggacgaaagacattaacattt

SEQ ID NO: 19173 - DNA, 803 bp, Arabidopsis thaliana landsberg
cccccacttgactgagccactaccataagtgagctcaccccttgctaaattttttatcagaagttgatgaggaagactttgacgaagatattgatgattactgagtctagctacgctccagtcatcttcttgtgggagattgtccatgttatttctgttgtactttgatgatgatactatttaacacttttatgtctacatgatgtaataaagttattatactctctttacgcctttattgcattgccttttgatatattacacttgacgtcaacatatgtttaacaccctgaatttgggggtataaaatttctttcttatgatcatccaaattcaggtgttactcttctctatctctctctagtttctctctctctctagtttttcctctctttctcttttaattagggttagttgaattagtgaaggattatttattttattttgcccaaaacttatgagtcatggaatgttggatcatattgagcctaaatattctttgaattgttgcatatatttgatttggtttgaatttgaaacttgatctgaatttgaattgaaaaccctagagaaaataaatagaaaagggaatagaaattccaggaaaaaaggaaaaaccaatttcagcccaaaccggcccacttagcccagcccgcgcccgctctctctctctctcttgtcggcgccgtgcgggccccgcttgtcagcgcaacgcatgagcgcgccctccctctctctctctctccgtcctgtgggccagagctgtcggcgccgttcttttcccggtgccactctctctctgt

SEQ ID NO: 19174 - DNA, 584 bp, Arabidopsis thaliana landsberg
atccccgtcgaaacagtggcactaattgataaacaataatattataaaattatagaaattgaaatggattggtttggagttcatatgaattttatatgaattaaacaagttctagggatttgtttttatattaaaaatcaatttctcaattagtttccctgttataaccaatatctggactgagcgcatgattagacagaaacccagggttacttctacaaaatttcggacctctctgtaatggacttactacggtcctggactgcgggtttaaacagagaaaacccagggactattgtgaaaagccaccggctgaagaggtatgggccgatcgtggccgcaggatatgaagtgaacggtccagattaaattatgaaatcctctgaatcagtacgcactactgaccgccagatccagatcggagggtcggtaggatgtccacgtacacaattgatcccggacgcacgccaccgatccaagggctcggattttatttggcgcacagggatactccaattcaatctaaaccacccacctggcgatcggacggccagggggccgttcttctctctcctctaatcgca

SEQ ID NO: 19175 - DNA, 2645 bp, Arabidopsis thaliana landsberg
ggttacgcttttcaaaatgcaagttatcatagtccctgatcagtatcccagaggcagtctctctgtgagggttcgcgaaatagaacgtgagagactttccttctctaatcccctcgacgtacctgcaattacaatgaatgtttcttttggtatcacatcaataaaacaaacccacgttggagtttagaaatatttacttatagagtaaagatctatagagagatccaaacataatcctctgttccccatcctctgttgtcaaaggaatcaaattttgaattcctgctgtagtaccagagctgcaaaacatttaacttccgttatatattcttcacttcaattttaatgtacatcattaaagattaacgactcaagtatcaacaagtttcaaaccaaatttcctatattaatcttttttgtaaacaagtggacggacttatgaaactccatgtgcatgtgtgtcaatctcattttatgatatataagccaagattccaagtctcttctggaaattctctaatctataaatttgtctatatccctccagatcttgcatatacaaagctttgaaattattttggttatcctgcacagatccaaaaaaaaaggcggatcgttttgaaggcacctcatcacaagtaaactgatgggtcgatcacagatgagatcagacgcctctccattagcgatacgattgatgtaaggcttaatatcttcataggtcacaatgggtacgttcttcttgaaggtttgcttatcaacttgaccgttgaggaaacctttaagatactcggtatgagcattacgtgaaagtactgcttccaagatggaatcttgaatctgcgttacgttggtggtcacatcctcaagaagagacaggctagcttttgggtctgttagatcaaactttggcaacatgcttgcttttgattgtctgccaacaacaaaaaaaaaaaaccttctaagtcgtatcacgaaattgtttacaaaagagtgaagagcaagcaaacctttgttctggcgaggtggatggatgagctttggcctgtgtctttctatgcttgaaagctttgtaaggagagattagaaaaagcagtcagtcaaatggtgtggtgtgacgatatgttcgttgccgtatgatttgttcttatttccataaataggattaactgacaaagcataagtaaagaaaatcccatttttagaaagataaatttattcattaaccctaattaattaggataaattttttttgaattaaaccgcaaacaaggtcggttcaacttgcgtctgtccggttaacaaaatattgaaccgatcgataaatcgtacgagagcagtcgcataaaaaagctccgaaagagagaaatcaatttgaccaatcaaataattgcggtggtgaaaatggctcgaaacgactcgcgatctaggtcgccgtctcaccgccgacggtactctcgctcgcctgtgactcatcgtagcagccgtcgtaccaggcgcgaccgcagccgctcaccctacacatcaaggtctgcaacaatcttccttgcttaatgtggagaaatcgaatctcgtatcttatggtgatgtgggggaattacgtttagatacttgggattagagaataggattagggcttagagaataggtttagggtttagcgattttgtcgagaacaaatttcaaatttgttacttcactttggatcgttgctgttttgcaaacgaatttctatggacattaatgttcgatgtccagctgctagtgaagaaggagctgctttagttcaacacattttcataagagtaggtttccaatttttgtaggcataagaagagcagatctcctgcaccaaggcaacaccaaagggatagaagtagttcattgtctccttccgagcatagaattgcgattgaagtgaagaaagaacaggaagacaaggcaaggtaattgattaaacattgtctttgtctttcagattgtattatactttattattttgtgtatgaagcaatatagttttccacattaggggaatgtattttgctagtgagcaagttgacatgcacgaaagggcaaaaatacatttcttgaattatcgcctttgtgattgttgatcaacctctttgtttccttatctaaattgaatactgtttggacatgaatagaagaataactgatcaatttgtgcgtttatatgatcttgaaaagtttttattggctagtgttatcagtcttatctcctttctaaatcttttttcccctactaaatgtagattgcagcatgaggcggagctcaagcgactagaagaagagactgcacagcggattgaggaagcagtaaggaaaaatgtagaggaaaggatgaaaaccaaagaagttaaagaagaaattgaaagacggacaaaggaagcttatgagaagatgtttcttgatgtggaaatacagctgaagaaagaaaaagaagctgctctaaacgaggcaagaagaaaagaagtaagtctagctagttgtttgttcaattttgccgctctatttgtttggttttctggctttggaatacttgctgaaactaaaaattttggaaattaattaaaaggaacaagctaggagagaaagaaaagaggtggagattatgttaaaag

SEQ ID NO: 19176 - DNA, 747 bp, Arabidopsis thaliana landsberg
agtgtcttttatcttatttcggatgaaactaataaaaatgttggtttagttaacttatttaacattgattttttttacttgtattgtttaaaccattttttctttaatggagtttaatgttaatgttatatatatgtatatgtatacatatccaaaacgtgtccaattcctaattttagaaaaaatcgtttttcgttttcgaaatgtttcgcatccacgtttccgtttccgtttacgtgcaacataaattaaaagtaaatttgaaaactaactaatcagaaaaggaatccaatcattatacgtttctataaaaccccattatccttcaccataagaaaacaacctaacaacaaatgaacaacttaaaatcgaatcttcttgatacggaacatggagataaagttgctgaacaaaagaatctagcttcaatggattgtcttccagataatctccttgtccaaatcttatacttccttcccacgaaagaagctatatcaacctctctttttttttttttttttgaaaacaatgttaaattatattcaaagaaaaaataacgtttgaacaactagttcgtcgtgagtttgatagaaacaaattaaggaaacactagttatttgagcttgaaaatgatcaagctcgactttggagccaactttggaagctaacgtccgatcgtcggtctttcatccctcgaatgggagataactgatttcgcatttgcttatcaatccactgaataagtat

SEQ ID NO: 19177 - DNA, 526 bp, Arabidopsis thaliana landsberg
atcacaaagttactacacaaagtttgcaagataacacaaatactcaaagtggcatgatttgttttttgttgttgccttgactttaatatagatcaaaagtcttgttcgcatttggatatcatatagattcttgccacacttatttctgtcgaaattctttttctcctctttatgtataattgattcttaaatttcgattgcagattaagttcacatcactgaaataatatgcgatcatacattaatactattaaaaagtactagaaaatttaacgtattaagaaaaacatattctaaacaactataaacattattttatttgaaaaacaggatgttttctacgtttctttaagggaatcttgcaaaatctgccatattccactctatttctttcaatctctgtcatattctgaaactcctttcaaaatctgccacattttggtccacgtggaattcagtggacgaaattacccttaagatggggtcagcgctaggggtgtcaacggactggcccgcgaccaaacgg

SEQ ID NO: 19178 - DNA, 765 bp, Arabidopsis thaliana landsberg
ggacttacttattaagtgaaagggaaatgtgcccttgggcatttctaagtattttggtgattaagtgtccaacacaaatggttatgtgttaaactatgacaaattgtggacaaagtgcaaatcaatacaaaggtatgattctagacttagtacattggttttttgtgtactaacatatttgtctaagtgctagaatcagagaaaagccaaatagaaaagacttggctcgagcagccaagtctctgctcagtctgggtgcaccggactgtccggtgcgccaggctggcgttggtcaactggccgctctcgggaactcgacggcggcgtacggctaaaaatcaccggactgtccggtggttcacggactgtctggtggtgcccggactgtccggtgagccaacggtcggccgagccaacggtcggctgcgcaatccgcgcgtgaccgtggccaggccaatggtctgatgggggcacggactatccggtgtgcaccggacagtgccgatgcgcatacggctccaaatcttcaacggtcggctgcgcaatttaggaaagcaatctgcaccggacactgaacaccggactgtccggtgcgatccccgacagaaggcaagaattgccttcctggattgctctcaacggctcctagctgctttagggctataaaagggacccctaggcgcatggaggagaacaccaagcatactctgaacattctaagactcccgcacgtcatcctcgcacactcgattgacattcttagtg

SEQ ID NO: 19179 - DNA, 462 bp, Arabidopsis thaliana landsberg
caagattttcgagacaagtaatttttctacatatttgggaacctatattttcatatggtaaacttgaaaagctaacaaagaaattaaaattaagaaaattttaatattttttttcttattgtttattataccaatattattatatacttcctctgttcgttattacttgatcttttagggaaaaaaaaatctttcaaaaaggttaatttttaaggttgtccatgtactatttattagttattattgatgaattttcaactttaagacaaataattgaattcattggtttaaaattatgaaaaatgtaaatcacaagaactaatatatttatgtaatatgtttatttaatatgtgtgtttttttctctagaaaatcaattaaaaatgaacagagggaggtttttttttaggattgttaaagttaaaaccagcgcttaaaaggtaaaacaaagcatctgaccag

SEQ ID NO: 19180 - DNA, 464 bp, Arabidopsis thaliana landsberg
accgggtttctcaggaccagaccaggttcacgccaaccgagagcacagatacaccaacatccagcctcttgccacggagggtacatgctactctcgtcatctctccactcccattgtgtgttggcctttctggtattggtctacccgaggcaaagcttacccatgacgaggcatgtggccagttaaaaggtcctcgatcatcaggcccacatcggcacggtccttaatcgactcagacggagacactacaccgagactcccttctcgtgcaagtcacccgcccggtctcagctttattatttaaaacccaaagtttggtacctggcagaggtacatcttttcagatgttgaacccatcaaggcctttgacggattcacatcataagtactttcttttgtaaaaattctcatccgctatgaagcgatcacttttgtattagacaaaacatcttgtttttctagag

SEQ ID NO: 19181 - DNA, 807 bp, Arabidopsis thaliana landsberg
cttggtctacgggactctctgagttgttgatctctgatactctgcctccaacattgaagaagttttgaagcagaattgcatatttttcggttcttgtgttttgtaagattctctagcctaaccatgagcttccttgtttccatagctcttgcgctgatggggaactccaagagcaaagcgagggtatctacgcacattgatgtttctacttcagacgcgaggattccctttgcgttggcaaaatcagcagattttttggcgatctcgaacagttccaacaaatccttgtcgttcttcttcaagacaggacaacctttagatgcgttcacaggtggcccatgttccccggatctagggtttttagaaagtttcattggtaaagctgatttcttcttcacctgaatagttctcgctgcaaaagacttgtaatcaccaggcttcttcaaattttgtttggtcttgccggtttcatgattagccgccctagatctctgatcttctgtcttgttcaagtttgaggatacttgaacaacatcaggcttctgtagcgttaggcgaaccttgtagcaagtactattatccctcacgctcttcatggatactttttctggaacatgattctgttcatcaatttgcttaacttctccggtttcatgagcgtgcgaactctgatgttctctcttcttcaaccccgaacatactttaacaacattatttttcttcagattcaaggtaagagctttgttgtaagtataagcgtctttttactggaagaagagtcttcttatcgataggagttgacaaacg

SEQ ID NO: 19182 - DNA, 1584 bp, Arabidopsis thaliana landsberg
aggcatatactctttgtaactagaactagatagatcttcctagattctctcttttggttgtacatcgactctatatatgttgtatggtgttcattgtcatcaataacacgaatctatttgatctctgaaatcctttagtcatgaaacctcatgtgtcggaacactgcaacaaaatggacgggtagaacgaaaacaccgacatctccttaatgtagctagagccatcatgtttgaaggacatcttcctatcgaattttggggagagtgtgctctcgcggctgcgtatttgatcaatagaacgccttctatgattttgcgtggaaaaacaccttacgaagttctttacggcgtaacgccatcctatgatcatctgcgtgtaataggatgtgtgtgtcatattcgaaatcgagatcacgatggagacaagtttgcaagtcgaagtagaaaatgtgttttcattggctatccgtatgggcagaaagggtggcgagtttatgatatagaaaaaggaatttttcccgtttcacggaatgtgatctttcgtgaagatatcttggcttacagtggtgaagaaggatcatagtttttggtggaagaaactgacccctttgtgaatgaataccgatattagctcatattttgacaacaaactcaactcccatacgaaaccaacctcacaaatcaaagaaggtttcaaaggagaagtcgactcttcctccaactgagataagtgaagcacgtgatgttattgaacgtgatgaagttgaaacacgtgatgaagttgaaacacgtgctgaaattgaaacaaatgattaaagatcatggagataatgtcgtcgagagagaacatggacaaaacgaagatgaagctgccgctgaaacagatcacgaagccaatattgaaacagaacatgatcaagataatctacctattgctatccgaaaaagtgttagagaaaagactcaaccacttcgtctcaaggattatgatacaacgttggtttgtttcacttctggttgtgtttatccaattaaagatgtgatgtccgatagtcgtttttcggtgcaacacaaagcttttctagttgctattacaacaggacgtgaacctaaaaatttctcagaagcaatgagagatccacattggacagaagcagttggaaaagaaatcgggtcacttgaatcaaacaagacatggacacttgaggatttgccgcaaggtaagaaggcaataggatgtcaatgggtgtttaggattaaacatcgctctaatggatcaatcgaacgctataaagcaagactggttgttttagggaatcgacaaattgagggtgttgattacggtgaaacgtttgctccagttgtgaaaatgacaacagttagatcttttttatcaatcgtttcagctcgaaattgggaagtgcatcagatggatgtgcacaacgcgtttcttcacggcgatctcgaagaggaagtttacatgaagcttcctcccgggttctctaagcaaaccgacggaaaggtatgtcgattacgcaagtcgttatacggattgaagcaagcaccacgttgttaagctagcga

SEQ ID NO: 19183 - DNA, 439 bp, Arabidopsis thaliana landsberg
tttagttttttaacaaaaaaatattaatattttattacaattttgttttatgattaaatttttattttagttataaaaattgaaccaaatgaaagtaaagaaatactataattgcaggtagagagtatctcatagtttctcacttgagaaactttctacattcttttttttattttttattttattagtcagaaactcaatattaagatactcctaatggagatggtcttattatctatgccggtttcactttttcgtttgcctaacattactcaaacaaaccaagaagcttaatccctaaataggtctatgcataattaggtttgctattgatagcctccacttggaaccacgtccgtcttcgtagattatcacgtgggttgtccagccaaagatatcactttaagatggttcacattgtatccattgtcaagtcttc

SEQ ID NO: 19184 - DNA, 890 bp, Arabidopsis thaliana landsberg
aatgaaaaagaaaattaaaaagaaaaacctgacccacatctctttctcacacgctatatctctttctctttctttctctcctcaaccaaaaggatcctttggtaatttccaaaactcccacactaccctaccacacaagctattacacgctcttctattagataggaaaagtgagttacctgtttccctaattataaatagtaacctgccctatttcataattaagttcagaaaagtgactattttgccaacataccctattttaaattgttaaggttcggaagcattaattttggtcgctttaagtggccaattggccatttacctgcacagtttttaggactttcctaagaaatagcgaactagcctaatagtaaaactgtatctatacttatatttatgaagtataaatttgaaatattttttcattatccaaataattacaatatacgtcattgcttatatccatatgcacacaacatgacaatgaattatatcgtcttttggaaaatctatcataatcgtcgacgacaaaccctaatactcatacgtgtcgatcgtttttgtcgagaacccactctttgatcgatataatactatattagaaagaatctagtattcttaaaccaaataagaaagaaagaaaaagtgacaatatattggtattataccatgatcatcccagaaggtgtttttaaatataaagataatgtgttaaatatgaaagattagtgaccgtggcactaagaaaacactctagatccccaaaataggttgtctttacatttattaatgagtcgtatgacaaattaggatggtagggttttaattgtcaaactgacccaaaaaagtgacatatttaaaacacgtacacttttatgttaaaacaa

SEQ ID NO: 19185 - DNA, 499 bp, Arabidopsis thaliana landsberg
  unsure (1)..(499): unsure at all n locations
tacgtcccctttctaaggatcaagccacctcgtagttcaagtttagtcacctttttttatatctgagtattttnnnnnnnnnnnnnnnnnnnnnnnncttggaacggctttgccgtttaaatcggcgagttcgtatactccgggtcgaacgaccctggagattacgtatggtccttcccaattcgacccaagcttcccagcgttcggttcggcggtgttttgaaagacttttcggagaactcgatctccttcatgaaaccttcactgtcgttgtagagtcgaaattcacacaatagaaattgtactaagggtttcttcaaagaacggatctttgtgagattctcaaagaacaacagaattgttggttaccgcggacggtgttcttgattatattattgagataatgatgattcgattgtacaagtgtttagagatatgaaatataagtgttttgccttcaaaatcagagcgtatttgattgcctcaagttgagagcgtt

SEQ ID NO: 19186 - DNA, 1492 bp, Arabidopsis thaliana landsberg
caccgggcctaaaccgtgaggtgatcatgctcatttctccgcctatatatcataatactctacaaacccaacaataatctctttgtattcataaataagactagagattgccacctttattaattatgatgaaagtgctactctttgtgtgatgtctattgttaaataaaataaatgcaataattacgactttaatagtctttttaaatgacgtccaaatatagaaaaaaggaagataatctatttgagctcctcatatctcttgtaacatgtaacatctcaaagtaaactgaattacatggtatttctatcgtagacgtatgatcctcctcttaaaaggatttgaaaacataaaatcgtccgttgcacacttattcttgcctcttttttcttgtgacttcttcctctctttctcgatatatcaccgttcgcgatactcacttatctcccaatcagtctcgtggatcacggttctcggtgagtgtttcgttcttaaatcttaacagctagctagtatcagagccacatgttcttggtgtgcgtgacgaaaaagaaaaatcaaaatagatcgatttgatggtaaaggcgattaattactgttgtagaaggtttgctcatttaggtgttggggctcaaggaaatcttgatagatgaaacgctggagactccatcatcaactttgttagatagaaagataagaatgaaacacctatggaaagggtcatatcttacttggagatgccgtaaatgtaaaatcgaaatgagtaggctccattcaacttgatattcatgttgggacagtgaatatgccgaagagttaatgttgggtatgtgcctaatcaatttgtaacacagtaggctagacgacatgacgacatgagtgactatcgtgttttagcaaaggccacaaaaaatcagtttagtcgggaaacataacacggataaggtttttagatatgtttatgaggatctgtagaattgagcttttcaaaaggaaaatgttttttttttttcttttccttttgtaattacgtaagacaatctctggttttatttatgaacaagaaagagattgtgagtttgtagtttttaggatattatttatatataggtttgaggaattcgcatgcatgagaatatgagatcacctcacgctcaatccttttttcctttgcccttcttcttctcagaggaacccttcacccttgatgccgaagctaccttaccatttgctcgtgcagcagcagctttgcgagtcactgcagctttagcatcacctttagcggtagaagcacttgcagaagaaactcttgccttgcgacccttggcaatgacttgtccgctggtacttgtgtagccattttcgtatgcatttgcgtctggacctttgggattgtcgaaaccagctgccgatcctttacacatcacttctgctggaagtttttccagcagctgaatgctgatctccattgcctttttttatttctttttt

SEQ ID NO: 19187 - DNA, 700 bp, Arabidopsis thaliana landsberg
  unsure (1)..(700): unsure at all n locations
taaaaatgtggtctcttctcaacactcactttactcttttttccctcttcaccacttctctctcaaactaaagacaaaagctcttctctcttccctctctcttctccggcgaacaaaagatgattacggcggcggacttctaccacgttatgacggctatggttccgttatacgtagctatgatcctcgcttacggctctgtcaaatggtggaaaatcttcacaccagaccaatgctccggcataaaccgtttcgtcgctctcttcgccgttcctctcctctcttttcacttcatcgccgctaacaacccttacgccatgaacctccgtttcctcgccgcagattctctccagaaagtcattgtcctctctctcctcttcctctggtgcaaactcagccgcaacggttctttagattggaccataactctcttctctctctcgacactccccaacactctagtcatggggatacctcttctcaaaggcatgtatggtaatttctccggcgacctcatggttcaaatcgttgttcttcagtgtatcatttggtacacactcatgctctttctctttgagtaccgtggagctaagcttttgatctccgagcagtttccagacaccgcaggatctattgtttcgattcatgtgatccngacatatgctttagatggagacaactttggaaactgactgagata

SEQ ID NO: 19188 - DNA, 1037 bp, Arabidopsis thaliana landsberg
agagcaaaaaccggagagcggagagtgagagctgtaatggcggccatcttcgtttttccgcctgttgaagataaatgacgataggtttttgagtcttttagatataaaacccaaatctgtccaaaattattatttcgtccttttaattgaattatatcttttatccttttaaatcattcttctgataaatactatttgtaaataaaaactaataatttttatatatatttttagcatttttatctatatatacatttttacagccattttgtgaaataaatcttggagttggaacttatttacaatggctgtcactggcttttaattattgattttttttcagcaataaattgattaacaaacaaaaaacattccaaatatattccaatctcatatatcacgcagatttttccaaaatttgaactagattttggaaactatttaaaacaaaaaatatttgacaaaccaaaatacaattgcaatcccttaaaatgagcaacatgcaactaaatacatttcttatcagttcactaaatcttatttctccaatatttgaactagatttcgacaactatttaaaacaaaaatttgtttgacaaactaaaatataattgcaatcctgtaaaatatttatttaattagcggtgtgccgtggatttttttaacggcacgggtttgacggaacgagtttgaaaagatgttacttaataacaattgtaagctataaaaaaatatttatttttatagataaatataatttgcagacttttatatatactaatttaaaaaaattaattgtctctacggtgtaccgcgggttataatctaattaatattaaaaatttactaatgatactctatcacctatgtacgtgctcttagttgcttcaccggttttgtcataaccggttttattcaacaaaaccagaatattaaacatagcttatggaaaccggttctagataacccgactttgcggtttcataaatcattggtttgccaattataagagagatgacaaatggagcctagactga

SEQ ID NO: 19189 - DNA, 576 bp, Arabidopsis thaliana landsberg
acaacgataaggtaaggagaaaataagaacactctttattattaatttgtgatgcgtcgtttgttttccaaacacaatttacgcatttgtattgcgtttacatttaaaaatatcataattttgaaatataattataacaaagtcaaaatgtcaacaaagaaactttctattttcaattttcatttaacaatacaattttttttttttctagtgagcttcttctatgtttgagtattgattcggaaaaatatgcaaaatgtaaaagtaaacaaccaattaatgcacattataaaacaacgtggcagatctaatgattggtaaaacatattgaaggcaggatatgctggagaagatgcaccaagtgttgtgtttccaagcactgtgggtcgtccaccacatacgggagggatggtaggaatgaatgagaacgatttatttgtgggagacgacgctgaaaccaggagcggtatacttacacttgactacccaatggagcacggtgtttgttagcaattgggatgacatggagaagatttggtaccatacgttttacagtgagctacgtgtggctcctga

SEQ ID NO: 19190 - DNA, 633 bp, Arabidopsis thaliana landsberg
catgccgcctgcatggctgctcgccccttctgcccgttggtctgggcggaaatggggggtcgcctgtaagcgctggacggtcgtgcgcaccatgccggcggtttggcttcttctgccctgagccggctttcatgacatgcaggacccagcgcccgagtcgcaggggagggccttggagcgtgttggagaagactcggcccgcgggcctgggggcgacgtagggggagttgcctttaaaaggagggaggctcctttcgtaaggcgaccatgtcttcttcctcccttaagcgccgggtcttcccgtcttccaagcccccggatggggatacgcgccgtctttccgccttgtcgtcgagggaacactacttcgtgggagtgggtacctttcggtcatcattcggcttcaaggattgtcatcacacagcccggttgcacccctccgctggtgtcacccaaaacggtgacctccagcccctggatggggagaggcaagccgggctgtgatcttggtcccgcccttagcctcgagggtgttcgtcatcctcgctggggcggggagcgaggcggccgaggctctacctcccacgcggccggcgggccacctcttcttccagcttctcaagaaacaccgtt

SEQ ID NO: 19191 - DNA, 499 bp, Arabidopsis thaliana landsberg
ccggcctcttcttttgcaaaatcaactaaataaagtttgccgtctagtacacccttaaaagctagtgaaccatcacatcttctaaagacagacacatctacatttgtaaataaacaattatatcccatttgacataattgactgacagatagcaaattatatccaagactctccactaagaatacatttgatatagaatgctcattagaaattgcaattttacctagcccttttaccttgccttgattcccatcgccgaatataattgaatcttgggaatccttatttttgacgtaggaggtgaacatcttcttctcccccgtcatatggtttgtgcatccgctgtcaataatccagcttgaacccccggatgcataaacctgcaagcataatttaggcttgggtcttaggtacccaactcatgttggtcctgcaaggttagcacaaatgtccttagggaccaaatgcaagtcctgtctcccttgcattttgccctaac

SEQ ID NO: 19192 - DNA, 613 bp, Arabidopsis thaliana landsberg
tttctgctattatgtaattctgctaaaaaactgggcaatggttcaaagtcatactataaaaagaattaaaatgattctgaatacgaatgagcagaaagcttagatttatcaggcatccaaaattaagaatgtcaaccggtttactctggtcttttttttgaaggattgaaactttaaagggtccgattggtgaccatttttaaggtaaggaatggacaggaaggacatgttccttattgttcccctttttttcaccattcaactaaatttttttttccaaattgtaacatgtggacccaacattattcctaatcattccttattttttgaggaatcgtagaagaaaattgtttcttcccaaatttgatgaggaacaaacaagaaacactaaacaagactataattataattaacaatcaaaatataattatacaattgtaaacactaaacaaaacaaataatattaacccaacaaatacaatttaaaattaaatataatctttagttataaaaatcgtcacaaggtgtatcatacttcaataacaatagactatatatataattatttaaagacaaaattcaaaaattttataaattaagaactatatgatct

SEQ ID NO: 19193 - DNA, 1749 bp, Arabidopsis thaliana landsberg
caatcagcttaatgagcatgctaaattgtccatgcttcgaaatgccacttggaccttgtcaaacttctgtcgtggcaagcttcagcctcactttgaccaggtctatttttttcccctccaagcttgtttcgtcaatgtttatgtctagtattcttctaacatatgaagcatgtttaacaggtcaaacctgctcttcccgcccttgaacgactaattcattcagatgatgaagaagtcttgacagatgcctgttgggctctttcttacctctctgatgggaccaatgacaaaatccagactgtcatccaggccggtgttgtcccaaaacttgttgaacttctcctgtcagtaccattttataattcccttatttcatgtccacttcacacatttgttgacaaataacttgataccttgctcttgatttttagccatcattctccatctgtgctaattcctgctcttcgcactgttggaaatatagttactggagatgatatacaaacacagtgtgtgatcgacagtggtgctttaccttgttttctcaacattctaactcacaactataagaaagatattaagaaggatgcttgttggacgatttcaaacatcactgcaggaacacaagaacagatccagatggtaatagaggctaatttgattgatccgttggttcatctgcttcaatatgctgaatttgacattaagaaagaagcagcatgggcaatttacaatgtaacttcaggttgtcatgatcaagtcaagtaccttgtggagcaaggatgcataacaccgttatgcgatcttttgttatgtgcagatccaaaaatcataattatctgccttaaaggattagaaaacattttgaaagtgggagaggcagagaagaacttaggtaatacaggggacatgaactattacacgtacctgattgatgatgcaggagggctagaaaatatgatggaacttcaggaccatgacaacagtgagatctatgaaaaagctgtaaaagttatggagacatattgggtgtagaagaagctgacgagacacatgccgggtttcagctcggtgtgaaccaagctccggctccttctgggggattcaacttcagctgaaggaatggtaatggaagcttgcagcttgagaattgtgaaagttcagagtcagttagaaagtgttcggtttcattgtccatggcttttcttttctttgtaatgactggtacacaccggtcctgagtctactttttgtgttgttttaaaaaatttatattggagtcttggtttcgtgttcataacaatttgttagttgtaacttgtatgtcaataatattgtcatattcataaaatttggagggttacaaattttcataatagagtatgtcaataattttagtcatattcctatattctccttatataatgggggagaatttgttatgaattttattgattataaatttttatgagtgatttaagttattttgagtttttttatgaatttgaagaatttttgtgaatttaaggaagttgttatgatttatttattgtaaagtcctctcaaagtccacataaaaccatgagatttaaaattctgtattttaactaaaaaaatccactaaaatccacttagatcacttaaagtcattaataatccaatctttaaaatgttttcaataacaggagattttaaagtagattttaaaatcacaagttcaatcctcttattattaaaagagaagtacaa

SEQ ID NO: 19194 - DNA, 518 bp, Arabidopsis thaliana landsberg
tatcagatatagcatcaagaaaggtagaagttaaaccagctgaatctaaagtctttgttacaagtgggatctttatgaatgagatcactcatgacagtggcagcaagcgagaatactccacccccgaaatcttttgctcttcggaagataatgcataagcattcaggcaacaagctctcctcggaaccatagaggttagtgttaccaggagcataagttccaagggatattgcacgtaacaacgcttttaacaacaatctcctgtgatacgaaatcaatgcttccgaatagggaagttgttcagtatcaggcccattgctatcagaactgcaatttttttctttcacatcgtcttcagtacgagagacttccagtttcaaccgaaagatagtatcatccaagccacccaaatctctgaacatagcagcagctggattgctgtaatccatgaaggcttctaatatatgcacagcggcactgaccaaaagccagtgctggggatctgtatctctgatgag

SEQ ID NO: 19195 - DNA, 671 bp, Arabidopsis thaliana landsberg
agattatgaatagtaaagtgactacttttctaattaagtttagaaaagtgagtaatttgcaacttaacccattattaatctatctccgaaatagcgtcgtgaaatagatttttccgaaatcttatctccgaaatgtatgaaatatgtttaaacgttaatatgttgggcttattttagatatagcccaaaaacagcccatgtatttagggccgttattattgagtcttttaaaacgacgtggtattaccgaacttaaacctcgtcgtcgagcttcgaaactctttttctcagttcacctggaaaacgatgcgtcgtcacaagcagacgccatgagagcttgcaggagtctctggagaaatttggagatttagatgaactccaatctatctgctgatgataatgataaggatttggaataactataagggtaaatacagattcttcctctcaaattgccgctctttctcgtcaatcaaacgaccccaaatcccagaaagcgaagagactagcctctcgatcacacaacgaagattcgacccagatttagctcctatcaagactagagtttacgtctctctcttccatactctctttcggctctatttaagctgtagagactcaaggagcaacaaggacgctctctcgatgtgcacttcggggttggccgtacc

SEQ ID NO: 19196 - DNA, 555 bp, Arabidopsis thaliana landsberg
tcattaccaatagtatcccaactagcatgtctggattacaaacaccggattcgtcccatgcattcgtgtcggtctgagaatcgagatccactcatacttcaaaatgaaatcaaattcagaacttcttgaaaagaattcttggtcattatgggcactattagacaaggacatattcttgctaagaacgtatccgcgtatacaatatgcacaaatctctacagctttaccctttttgaaggctttatgtttatgtagctcacatactaactccaagactttaccatgatttgaacacttctctggcccatcccacaactccaatttcgtcggtaaaacacccggtttccatacatgattagagttatcgaaattcaacgcatatttcacaccggtatcagctttgattactagagagagaaccttatcaaaacaacgcagttgaccacttttaattgaaatctttgaaccctttgatactacacgtactcctagctgcaacatcttttaaactcctcacacggaattagtaaattcctttgccagccttccttgatt

SEQ ID NO: 19197 - DNA, 610 bp, Arabidopsis thaliana landsberg
aaattacgatttggttcatgataaaatattggtgtcaaattggaaccaaaaaccaatttcaggtcggtttactgtaagagagagttcatatttttcaataattttaattaaacttaagataaaaattggtaacttcaattaaattagaataatcgtttggtaatttcagttcggtaactataaaccgaaccgagtactgaagtattactacagtaatttttattgagtttactcaataaacctaatcgactaatcctaaccgaattcatattcctaaattctaatttacattttttttgtctatagatgacactaaatttcactacttacaatcttttccactttgttaatttcaataaaggtttcccacttgatcaaatgatctttctaaatgtaaaaatataaagtgactttgtaaaattacttttagtacatatatttttgttttacaacaaagaaacctttcattttgtataccaacaattacaaccagaaaatctagtatgaactttgttatccaaatttcatattcatttgggcaaaaaattgtttttttttcccatgttacaaggttacatattaagatgatgggttatttattttgttgggc

SEQ ID NO: 19198 - DNA, 592 bp, Arabidopsis thaliana landsberg
  unsure (1)..(592): unsure at all n locations
gcagctagagaccgaggccccaattcaactcatactcgatttataccttttttcaatttttccaccttgaactaagtaactaacgcctaacggtagattagtgaaatatatcaatagaagttttaaatacaagaatagaatacccaatggtctctgtttcaatcttgtccttattttctaatttcatatgtaaacaacgattacttttaagttctaaataaagttataagttggaaaaaaagaaagaatagaatccatacagtttcgtgaatattacaacaccatccttttttttgtcaagcacaacaccatccttttaacatctatttttttatttgtatttgtatatccacatgttgaaatagatatatcgattatcatacaaaaatataacaaaagtgattttgaaatatagaaccgttcaatttatttgaaactagcagttgaacacgtacgaagttatacgttttgtgggaagtcgggcaagatcttaagttggagcaccaattgcatggntaaataacagttttcttataatataagcacagtcccaatgtacgatanacacataacgatacttaaacattggtcc

SEQ ID NO: 19199 - DNA, 2997 bp, Arabidopsis thaliana landsberg
ggtgagaaagaatgattgagaatgtttcatatggactctggaagatgcggcttgatgtggtatgtcacataccatatccaggcgtctatcattgttgatttgtgcgagtaaagacactaaaacagttgtgcttgagagatggagggacaagtggtaatacagctagagagagagagagagagagagagagagagagagagagagagagagagagagagaagccgacgaagaagggaaaaagtgtatgtaatcttatcgatcagatattaactaccacttccatccaacgactcatcatatgccaacatatttgttcttttgtaactcacaacaaactaaactcaaacgctggttatcttccttccttattattcagtggcaaattggtcacaatttcactcaaagagttggaaaagtgttctcttcctgagacgtgtcccaaacatataaactttcctttaagtgcctctttgtgcaactcacccttattaaaatgaaatgataaacaattacacaccaacacattatagacacaaaagacctaaagtatctacactcatgacatgagcaactcactcggaacagagtcatatatatgaaaacctaatggcaaagaacaagcaaatttggctaaccagtatgcgagacagttagtctgtcgacacatgatccattcagactatcaaattctttgatatgaagtcatgacataaccataccgagaatgacattgaatgagaatcacaaaggttatggttggcaaggaacattacactccaaaaaaacatgtgatattccaacatatgtttccaataatcgtattttgttgaaactatctaaccgatatcctctaaaattgcattaaatattttgtttattgaaaatttattgcaaatttccaattaattttgataatggtaaatttgtcacaaacgtagtaggaatattgttggaatttgccaacaaatatgatatttttgaaaattagcaataatttttaggttgttggaaattattaacaaaatatttgttagactaattctaacaatttgatgacaaaatatttgttgaaaagtggaaaaaaacaaaaaataaacaaaaacagggaaaatttagttagcatatatatgtacatatcaaaaaaaataaaaaaaaataatacacaaatcaaaaagaaaatggaatagaagaaaaggaaaaaaaaaagaaggaaaatattctaagttaaatatgattcatcgtcttctccttttatcttttttttttttttatgtgaagctttactttctctaaatcagaggaaaaattgaaaactgttttcaacgacaataccaaaaaacaaaaatcgtgagtggatggataattatatagatgaaggtaccagaaaattaacaaaggaatttaaagagctcttgttgactttatgcgttttgctgcaaatgatgagattccattagagtgtggtaagatgtattatccttattctacttgtggtaatgagaattttcttcccgtagattctatttggaagcacttatatagtcgaggatttacgcctcaatattacatatggttttctcatgaggaagattttgaaactttagcaaatagtaatgaagatgatgaaaatcatgggttggaacttggagataatcatatatatgaaagttggccaactctctccatatgattgacacatcatcactttagcatttgccatgtgtctattaaataattaatgtaagcttttcaacttctaatttataggttaattatatatttattatttaatttacatattattatattttatatatttaactgtagtattactaaatttattttaatattatatgatttttcaataaaaccattttaatagttttctcatactcgaatttttttttttcgtaatccaaactcaaagtatgagtatataatagtcgtagattacttaattatttgagtcagttattctcttaaattgatatttatattctcttaaattgatatttatataataaatcactgagggtgacgaatacgtaaggagcttcatcatcaaattcttaggtttctagaatccaacactaccttctgttaaattagtttaagataaacgttgtttatgaattatgtgtatgatgcattgttgagaatgttgttagaaaaaaatatttttaatactaaagtaattgcttattgcatcagtgaatgattagataataaaaattatatttaaattaaataatacaaaaaaatccaaaaataaaccgcgctgtagcgcgggtgatcaactagtgtaaagtaaaatttactcaaattgactctaatcttaacaaaagtaactagaatgactccatttagcaatgacgaactaaaatgactctaatcttaagtaaaaagactaattaaccttaatcaaaattaaactatatttttagcaaaaaaaaaagagaattttgaataaaaataaatacaaaaggataaattaaaaaataaataaagcatgtcgcggcattaggttttatttcccctttcagtcttattttttctctttgcatgtaccttctttttcgatttctaaaatcgaaaccctaaactaaattggcttgaatccaattttccgattaataactaggtccatacctagcaaccgattaacgtctagcttttttttaacaaggggtaaaccaattttttttttttaattgggcaaacaataacaaattactaaagagttaattttaaaacagtaaatttgttattactaaagagttcattttaaaacagtaaatttgaaaaaaggtttctctagagaagcatggaacttttaacgaaaagataatacagtattctttaaaaaacaaaacttttggaattttcccattcgaaaaaaagccaaacgtgaaaaatccacagagactcacttcaacattcacacacactctcgttcccaaaaccatttccacgacaatttcaaaacaaaacaaaatg

SEQ ID NO: 19200 - DNA, 1342 bp, Arabidopsis thaliana landsberg
actgccacaaaaacaccaattggcctagactagctatggtaccatttcttcttacgctgtgcttttaataatatttttctacttggagaaaatatgattatgtattgtttacattgaaactgtattatacaatggtaacaagtatattacgatcatttatttgtgaaccatatatatttattatacacaaatgaattgaagtatctactctttgtttctagtgatatgataaaatttgaaatgtttacagaccatggaatttgcattcgtgaacaactcaggaattaaagacataacattactcaacagcaaaatgggacactttaacttcttctctgtccatcgcttaacattaccggcgtcactataacagctcccggtgatagcccaaatactgacggtatcaaaatgggttcttgtagcaacattcacatctcaaacacaaacatcggtaccggagatgattgtattgccattctctctgggaccactaaccttgatatctctaacgtcaagtgtggtcctggacatgggatcagtgttggaagcttagggaagaacaaagacgagaaagacgtaaagcacttaacggtaagagacacagttttcaacggcacaagcgatggtattcggatcaagacttgggaatcttcggcttcaaaaatcgtagtttctaatttcatatacgagaatattcagatgattgacgttggaaaaccgatcaacattgatcagaagtattgctctcacccaccttgtgaacatgaaaaaaaggttaacattgtatgcatgaacaagcttggttatttttttcttcaatcacaatgaaatataaaacaaaagacaacttgtgtttccttgttcagggtgagtctcacgttcagatccaagacattaagttaaaaaacatatatgaaacgtcgaataacatagtggcagtgaatctacaatgtagcaagagctttccgtgcaagaatgttgaactaattgttattaacctaaagcatactggactcgagaaaggtcattccacagccatgtgcgagaatgttgacggttctgtacgtggtaagatggttcctcaacattttctagattgactcaatggtcaatcgaaaaaataaccttttgagttatacatgatatttttagttacatattattgcctaatttttgtatatattttatgttttatgttcttgtttatatgatatcatgatcacacatacaaattcttaatgaatagttctttctacaacaaaacaaatctacgacagaacggttaaatttttaacttctgatacaaggtttttttgtgtcaattccctaaatgcatcttatg

SEQ ID NO: 19201 - DNA, 625 bp, Arabidopsis thaliana landsberg
tattgttaaaatatttctgctaattcctcttacgttaccgacattaggagaaagtatgaaagctatttttaaacttctgactttgaaatatgagtatatgcaaacttccttcagagtctccttttggaaaatgttaaattcatctgcaatcaatatctgggatgcaaatgcctacatagctcatgctgctatcgtcttcttgaaaattatttgttcagcacttcttgcttatcaatgttgtacctgtattcttcttttctaattttgtgcaggaagaagagaacctcatagtattcaacaaacaacttggagaagatagaagaattgtgatgtcacggagcaatttaaatgagctacttaaggtacatagacatagactgaattccgttagagaaatggagtcaatttgcgatgttatcataaccattgtaacactttgagaacttttaacccaggcgcttgaggaaaacgagttattgtgcactgacttgtaccaagtgaacaccgatggcgtgatattgacaaagcaaagtgtgtaactcctatgaaatccctggtttattatggatgttattacccggtatgtcttaacattggtaaggttggtaaaattgctgattgagga

SEQ ID NO: 19202 - DNA, 715 bp, Arabidopsis thaliana landsberg
gtaatgtacaaaggttttacatagacacagttttcgcttttcaccgtaaagtaaagtacaaagtaactcaccgatgattggctgagttttgccgccgaatatgaagagagaatcagacaacaagagacaaaaagagaataggtttctatctacatgtcttggtttggattagataatttaggagtaacgaggactgcgttgtgtgtattactatatatagacaagttttctttaccgttgggtaaaatcactaacggatagttttcgaattctcagcttttgacgtcatagctaccgttctgacatcctcaacggctaactcacagtgaacctactacctagttcgctactttaaagtcgtattattcttgatgggctgtcgagatcggcccaacccaatgaaatgtttaaagatttacaagttcaatatataatgacaagcttaatggataaactggatttggttaaggtccattataataaatatgggcctcacatataaatggctttgatggaccaataagcctggaaatctgagaaaatctatgtaatatttcgaaaactgttgggaaaaatcaataaataagtagaacttttaggagggttagcaataaacaaaggttgcgggaaaatacgttaaataaaagctcatatattattggattcgttcagagttgaattcttaagttagagaaagggaattcgaattttaaat

SEQ ID NO: 19203 - DNA, 278 bp, Arabidopsis thaliana landsberg
caattatggtaaaacaataatacagtatatctccttgttaaagcatcatttttaaatgtattctcacatttttgtatttgtctctcattcctatatattttttgactttccttctcacgtttaaaattgtccaatattcgtcttcttctacatgagcttcatcttctctcactcttgacctcaaattgatctgctttacctacacctcctctgcttgctactaattcaaaatcaagatcagctatttcaaaactcatacaagagacaacgaaactaca

SEQ ID NO: 19204 - DNA, 1768 bp, Arabidopsis thaliana landsberg
ctgctttctttggacagttcttcaccgagtggttttgttctccacaatagaagcatgcatgacctcctacttgcgctggagctgcttggctattctggttggttgctagggcaggaaggcgagctgcctggttattctgaccctggtaatgatatcctcccggttgagcgttctgacggtactgctgctgctgctgctgaggaaactgcctctagtactggtgctgatgctgacgctggtgctagtgaccttgcttgaattgctggggtgggttgcctgagttgcgacgacacctgctactctcggcctgagatccagcaatcttgcgtttcctgtcctccttctcctggcgcttcctttcagtcatgattgctctgtcgatagtgtgctggaaggtggggaaagtgtgattcatcagctggtaatgaagggggtcaccaagcctctcaggaaacagtactgtcgcttggcgtcggtgttgacatcttcaggagcatagcgagacaactgcagaaacctgtcctggtactcactgacagacgatggcccttgcttgagggccaggaactcctccttcttcactgtcatcagacccgcaggcacatggtactgacgaaagctacctctgaactcttcccaggtgatggtgtcggggtgggcatgggtggcgaggtaagactcccaccatgactgggctgctcctctcaacagacggggaccatacaggactttctccctatcatcgcactgagcggtatgcaactcccgctccacagtgcgcacgcagtcttcagcatccatggggtcagaagaatgagcgaacgttggtggatgacctctcatgaattcaacacgtttgtctctgggcatctgaggcatctgaggctgaggtggggcctgctgctgttgctgctgctgctgctgaatggcggccaaagtctgaccgatggcttgaactgcctgagtctgcatcagaaacatctgctcgatcgacatcgggggcgggggcggcaggtgctgctgctggggcaactcctcctgttgagcggctcgcatcctgctgaggacgccttcctcctctgcgcctgttctctgacatctgcagaatgaaccacacatcagaacggatctggcaaatcttgcagcatgagaaaagagtatggaattcttcaacagcactgaacagatgagcatcttcactgatctccaacacagaccacacagcttctcagataaagaggaaagtggaataaaaggtttcccactatataactaactttattaacataactacaccaagttgcaggggatacccacaccttggtgacaatcattacaaagatccaacttcagtacatgtccatcataacaagcattcaacataagataaacaaactaactctaactaaaactgacttaggctaagacactgaactagcattattacagactctgactctgtcgatctagggatcaaaatctatccagatcctgtagtttggggtatcatagtcgaagcgaccacggggcggtgaacagtaagggtgctgaatcctgacaggggcgggagaaccacaatccagatagtggcgtctgcgcacttagcacgcaattccgcaacctccgcccgaaccttgcccaactcgtcaagggtgtggtccaactctgtgttgagcacgacaaccaagttgaccatgttgttcagcctgggattgccctcactaactggcgaggcaatcacacctccagcactaccggtcgaacgaca

SEQ ID NO: 19205 - DNA, 2741 bp, Arabidopsis thaliana landsberg
  unsure (1)..(2741): unsure at all n locations
tttgtaatggcaccttgagtgcggtgtttttgttcattgtggctatcaaggcctgaacacgtatgtaaatccggcacgagccatgttttttcccattttcgagcactaagactcgcctgttggttgtctgaaccgcttcaccaagcgcgagttgccccgtgtaaaggtgacgagtgaggtatccgtatcccggaggcgtaggagtccctcggctcggtcagccttgttgttcggggcttcctttgcttcgatgagccgaggccaggggtagcggtgccagcgcgaacagaggcagagtcggctcgaaaagaagaccaggtcggccggagcctggccgggtcgtccgctagtgggaccgacgccggaatcgacctgccgaggcctcgtgccgggctgatgtcctcgggggacagctagccgaggccccggggtgaccggccgagccgcctgctcgggacggattcttggagaagacctagcggcgatggccgggcttggtgatgatgttgtcttcagagcggggaccttggaccgtgtcgccgtccgaggctaggtcggacctcgccgaaggtgtcgttgatgccgagggtgctgctgctcccttccagcgtcaagacccgagcctgcaggatcggattgtcttgtagcgtgtgtttcctgtggccgccgaggccaaaacacaccctcgccgtgttgtaaagctgcgtctcttttcctcttgtttcgagtatctggacttttttgtcggtaacagaaatgtctgtgcgagtgagagttgcttctcgcggaaggtgatgagtgaggtatccgtatcccggaggcgtaggagtccctcggctcggtggccttgccgcttaaacgcacccttactagtccatggggctctgtcaccgacgcagtcgagaaggctcgaaggatcgcttcggaagaagagcttccgaacgtgaagacttgttcggtccgcggagtcacttatccgaacgtgagttacttatcgcagaaggtgatgagtgaggtatccgtatcctggaggcgtaggagtccctcggctcagtcagccttggctgcttacgtgtactccgtcgttttcaggatccacttttgaagtagtcgaagagcacgaaaggcattctggcagaaaagatttttttcttttttcgaggaaaattttgacgcagagggggttgccccttctagcccccgagggagggtcgggctttgcgaggcaaggctgacccttccttgacgaccagactcggtgtgtgaacgaggtatacgagcaacttgaaagcatcttaagggtagaatgcgacgcagctgttggatgttccaagcgttgccgtagacctcgccttgactgttggccagcttgtatgttctgggcttcagaaccttggcgatgacgaacgacccttcccagggaggcgtgagtttgtgcgccctcgggtgtcttgtcgcagccgaagcaccaggtcgcccacctggaggtctcgggaccggacccctcgggcgtggtagcgtcgcagggactgctggtaccgtgccgagtgtagcaaggacttgtcccgagcctcttccagctggtccagcgagtcttctcgactagcttggttgctttggtcggcataggccctcgtcctcgaggaaccgtattctaagtctgtgggcaagatggcctcgccccatagactagaaagaacggcgtgaagcccgtggctcggctcggcgttgtcctcaggctccagaccaccgaggggagttccttcatccatcgcttgccgaacttgttgaggtcgttgtagatccgaggcttgagtccttgtagaatcagtccgttggcacgctctacttgcccattcgtcatggggtgagccacggcggcctagtccacccggatgtggtgatcctcgcagaagtccaggaactttctgccggtgaactgggtgccattgtcggtgatgatggagttcaggaccccaaagcgatggatgatgnnnnnnnnnnnnnnnnnnnnnnnnnnngacctgatgctgtttaggggtttggacctcgatccacttggagaatttgtcgatggcgaccaacaggtgcgtgtagccccgggtgctttctgcaaagagccgacgaggtctagaccccacacagcaaacgaccaggtgatgggtatggtctgcagagcctgagcgggcaggtgtgtctgcttcgcatagaactcacacccttcacaggtgcggacaatcctagtggcgttggccaccgcggttggctagtagaaaccttgtcggaaggcgttccccacgagggctcgaggtgctgcgtggtgaccgcaagcccccgagtgtatttcttgcaatagctcctgntcttcggcgatggatatgcatcattggagaatgcccgaggggctacggtagtagagctccttttcatcacccagtaagacgaacgacttggcgcgccacaccagtcgccaagcttcggccttgtcgaggggtagctctcctcggaggagatattccaggtacggagtctgccagtttcggtttgacgcaaccccattccgctctccctcaatgcgcaaggcctcaccctcggcggccgaggatacctcgggctgggccgaggcctcctcgggctcgggcgtgtcgtcgatcttaacggagggttgatgtatggctctggagaagacgtcggggggaaccgttgtccgccctgaggctattttcgccagctcgtccgca

SEQ ID NO: 19206 - DNA, 2308 bp, Arabidopsis thaliana landsberg
ttgtaggacgccatctatcgaagttcggcaagatcgcatccttctgggtcttgaaacatcggaaaacgttaccctctgtttccatagctgaaaaagagagaaggggtcaagggttattgaggccacgaacaacgcagaagtcagaaaaggaaacttttttaccgaacctgaaagcgacttggcttgagaaacaagaacgattcttcgacttcggaggagtatctcgtgactcagaaccttcctgtcgaggagtcacacctcggtcagtcttctcgccactaagtcgaggagggggagatgtgaccacaggatggggaggacccatcgatcgaggtggaagagataacctaggggaacggtccgtccgagcctttgatttctctctcagtggggaagagctacctcgggctgatatgtctctcttcttgcgaattaagtcagcaactggttcgctactcagtccatttcagggagagtaacgaggagagttgcgatggggagatcggtttctccgaggcaaacggccaccacgacgttcaggacatggagttgatctaaaagcgtcagcagatccggccccctcagcactaccgtcgtcaactaacagggtccaactatactgtttttattcgatgacggaaatgaggaatgtcttatttgcctcacaggcctcggccatctgtttggatagcatcatgcgccgggaagcaagagcccgagctgatgttacttgaggtaaagggggaggcagcggaaggttctatccggatagattcattatgagtttgcgattagcttctataaaccaatcaagagtgaaggagttccaaagggtatccccttcaaggacgattttgaagaattcaataaatattttggtcgggagagtctgagcgatgaaatctgcaaagcgagacaatggatttggtcagtaaaaataaagataaatgaagaaggtgtatgtgacctaatttctaccgggctttgcaaaccacttcgatgggagtacatcgaaaagatttctgattgaagcaggggttttcttaatcaaaaaccaaggatgatgccagtttttatccttgtttaggagatgcgagatggttcttgttagcattcgagtatgccgagaaatatccagttttcttcaatgaacttctcatgctgagaagctcgttcagttcagggaccccgataacgaatccggcttcctccgcaatagttatgatcctaaaaatagttcggaggaggttgggggttagttggggtagggcaattatgagagcatctaagtaacagaccaaggccttgggaagagggaaggtcaacccgcaggccttgaaatagatctcgtaaacgcatatataaccagggcgatgctcttccggggactcaaaggggccaggcatctttgattccgccataatctcaggcagaatctggcagagatctttcagtcgttcgagggattgaagggtacagatggatgtgtagtgtggaccagcgataccgttaaggcgagtgcatatgtcattgctagaacccccctcgtcgaaagacggggattcgggtctttcagtatcaggattcatcgaggaaggtgaaaaaattaagcgttcgaagaagagaaagttggtagaagaaaaaggcgagaaattttgttctaaagaaaaagcggaaaagtaagaaagaggtaaatgaatttacctcacgcaagttggtggtgatgatgacaccgctcgggagtcgtggaggaagtggaagggttttcccgctttaatagtaataattaagatgcggtcataatggtgacagatgtcatacggataaatatggacattgccggaatcgaaggagtaactagcttttggcaggaaatcagaaagtcatctagcgcaatctttgcccattaagatgttagtcttctgaattcgaagaacacttcgaaagacttagggggctaattgttggtgtcggattctgcaccagagtccgggacctaccaaagattgccacgtagataaaaagtaatcccacaaggagtaaggcccgtaagattcctgggagaatggcagattacgggcgaagtgggggcaaagtcaaagtcaaggacggattgggctttatcggttaaagggcgaggcccatgaaggtcagagtcaattcaaatacgaacgtttaagcaatcaatttgaaagccaaaacggacacatttaagaaagaataatcctgtgtaattaagaattaaatatcatatgtgagtattagtagtagggccaagagccatgaaagacacacgcatttttgtcaa

SEQ ID NO: 19207 - DNA, 3067 bp, Arabidopsis thaliana landsberg
acaagagagccgtagacgaaaatctcaagctgataaataatggcttgctcgtctggtcacaagataaccagacgacttgttatacatataacaacacaaaatagcgatgaaatccaacgtgaggattttcaagcttcgtcgagagcgaggactcctggaagtggcttaccctcaagaagctccaaactagcaccgcctccggtagagatgtggctcatcttgtctgccaaaccaaccttctcgacggcagcaacagagtcacctcctccaatgattgtggttactccctttccgcttagttctgcaagctgctttgctacggcctgatggtgaaacaagacaagagattgggttagttaagttgggtttctccgattaacaaacatgttgaagacagatgattaacaaacatgttgaagacaaatggatttagacaaaagtgagactaaaacttgtgtttatatgtgtttagttgctcatacctcagttccagcagcaaacttatcgaattcaaacacacccatgggaccattccagatgatggttttggttgtgtccagagcttcgctgaatgtcttgatggagtctggaccaatatctagacccatccagccatcagggatggcagtggctggcactatctgcaagagtcatatgtgtcagctttaaagagaccagaccagacgcttaaatgttttactttcatacatggcccattgagagtcaaccacaatgactgtgatagttaccttgctgttagcatcgggagcaaacttgtcagcaataaccacatcggttgggagcaagagagagacacctttggcctttgctttctccatgagtgactttgccaagtcaagcttgtcctcctccacaagggaagatccgactgagagtccttgtgccttgtagaaagtaaaaatcatacctccaccgagcaggaggatgtcaactgtgttcaagagagactcaatgacaccaatctttgttgaaacctttgagcctccaacaatggcagcaaaaggcttcttggggtttgccacagctccgacaaggtaatcaagttcctgacacaataaaacaagtaatagtctgatcagtaaaataaagagactcatctaagaagatactctttatgctgcaaattttaaataccttctgcatgaggaaaccagcaactgaaggcttcaagaatttggcaactccctcagtggaagcatgagctctgtgagcagttccgaaggcatcattaacgtaaacatcggcaagagcagcaagcttctttgcaaattcaggatcattcttctcttcctcggcgtagaacctcacattctccaagagcaaaacaccaccttcaggtagtcctgcaaccaacttctggacttcctcaccaatagagtcatttgccattacaacctattaacacaaacagagtgagaacagtgttcttttaaaagctaatgttcagaaaccttgcaagtctagaagaggaagaggaacaaacctcaacaccaagaagttcagacaatctgggcacaagaggctttaagctgtacttaggagtaacaccttttgggcggacctgaaacataaattgagatcagatacatccattaattcaacagcatcatccaattgaacttgagtataaacatatccaagtaaacttactaaaacaattacccatacaacaccagaaaatcaaccgatagagtcaatgaacatattgaaaaacaagaatactatatctacatcctaacatgcaaagagactcttcttatacgcatggctctccggataaacagatcagatcaaaattcccacaccaaaattacaacagataagcaagtagtgaagtgagaactgagataagatatcataccaagtgactgcagagaacaaccctagatccattacccatcaagtacttgatggtgggaacagcggcacgaatcctggtgtcatcggtgatgttagagttatcatccaaaggaacgttgagatcaaccctcacgaacacactctttcccttcagatccgcttccttcaaagttccaacgcttctcttcgtcgccatagttgattcttcgtaaaacaaactaaaaacactgcaaacaacaagatgcacaccgcgagttcagattgacggagaaatcaaccaaatcggtgaaacagatctagagaatctagctcaaaacttaatcgaagaaaacaatcggaatctgaagaaagaatatacttacatgagtggttgaaatgaaatacaagatgatcgaacgttacagaggctggtataaagagttggtgaatggatctttcgagaagcgagagaacaatatcccttccttatataaaagcagcttggacaacaccccaagaaatgtccctataattaccctttttgccactgtgtctctccttggattccacggtttaaatatattatttttcggatagtgggctgatggaccttaatgggctagcccaattatataactaataggcttcgagcctctttgagtttaagcgtcatctttctccttcgaagtattaggacactctcaacgacggatcagtgtagataaacctccttaccggagagaagcgtaagtcttgccggagagtcgagtgagctgaatggttggtactcaccattttccttcagtaattttctcagagagagctctttaatcgggaaaaatcttcaaatgcgtctggttttgttctctttttaatttttttcttgtgatttcattcatggagattgcaatttcgtataaaccgaatccgcttatctcttcatcgactcagttgttgaaaagatcaaaaagttttggtcttgttcggtttcccgccaagtatggactgggagctacccggaaaaaacagctctttcgagtctatgcgtctgaaagtagtagtgggtcttcatctaatagcgatggaggcttttcgtgggtgagattggctcagtctattcgccttgcgcgccgcgcggattggggagaagattggagaaactaaaaagacagaaattgggtttgactcggaagaagcaagtgggaga

SEQ ID NO: 19208 - DNA, 1807 bp, Arabidopsis thaliana landsberg
cattagatgtggaatctcggagagtcattgagttggaacaagcttgatatgaacaacaacaagctaatgatgaaggaggaggctctaaaaagctgaaaagaaaactgagagatgaaacaggaacacctaaaactcagaggaaaaaatgtgtgaaccagaagcataaaaacccaaagcaaaagcaagggtgatgaagcttctgcctctaaaacagagagaagaaaaaagtctgaagctgaagtatctaaaaaactgaaaaatgtgtttgagattagttatgaagacgaagatgatgatgatgaagaagatgacgatgagtataatggagctgatgatgttgatgatgatgaggacaatggaaagttatcgaaaccaaagaagagaaggcaatactcaaaagtctggaacgatttcatagtgattaaaaaggtttatcatttgggaaaaagtgaagaaagagctatgtgcaagcattgcaaatcagattatgcgtacaatgcacacaaaaatggtacgaatacatatcgacgtcatttgcaaatatgtaagctcgtgcctagaaatggtgatattagacagatgatggtgaatgcagaagcaaaattgcaagctagaaagatagatcaatctgatttctgggaattggtagctaagacaattatccagcatgatcttccattttcttatgtggagtatgagagagttagagaaacgtggaagtatttaaatgcggatgtcaagttttttagtcggaacacagttgctgcagatgtttataagttttatgagactgagacggataagctgaagagagagttagctcaacttcctggaaggattagtttaactatagattagtttaactcatgaatgttatatgtgtcttacagcacattaaattgacagaaattgaaggactggggaattgagaagaaagttttctccattacggtagacaacgcgggtaacaatgacacaatgcaagaaattgtaaaatctcagcttgtactccgagatgatttgttgtgtaaaggagattttttccatgttagatgtgcagctcacattctcaacatcattgttcaaattgggctgaaagggattggtgatacattagaaaagattagagagagtatcaagtacgttaaaggatcagaacatcgtgagatcttatttgtaaagtgtgtggaaaacgttggtattgatctgaaagctgatttgttgttggatgtggcaactaggtggaattcaacattcaagatgcttgatagggctctgaagtatcgagctgcatttggtaatctcaaagtcattgatgccaaaaactacaaatttcatcctacagatgctgaatgacatcgactacagcaaatgagtgactttttagagtcgtttgatcaaataaccaatcttatatcaggttcgacatatccaacttcgaatttgtattttatgcaagtttggaagatccaaaactggttaacagtgaatgagtccagccaagatgaagttatcagaaacatgattgtcctaatgaaagagagtttgataagtattgggcagaagtaagtgatatctttgcaatcgctacggtattagatccaagggtgaagcttacacttgcagattattgttttgcagaactagatatcagtattcgtgagaaaagaatgaaacatttgcgtgctcaactacgtaaactttttgaagtttatgagaacaagtccaatgcggtatcacctacaactgagtctcgtgaagatgttacacatgatgatgaaactgcaaaggggaattttagcaatta

SEQ ID NO: 19209 - DNA, 547 bp, Arabidopsis thaliana landsberg
gactttggttatgatgactggtcactggcttgtttagggtttcaatctttacagatcttgtggcagtaaaaaatcaagtcaaagcaagaaaaatggttagaggaaagatagagatgaagaaaatagaaaacgcaacgagtagacaagtgactttctcaaaaagaagaaatggtttgttgaagaaagcttatgagctctcagtactctgcgatgctcaactctctctcatcatcttctcccagagaggaaggctttacgaattctctagctctgagtatgttttcttcaatttcttcttgattcttttaattcatcttcttttacttttccgatcgtactttttttggggggttaattaggcttttaggtcatgtgtttgtgtctggtctgatttattttctgaatcgtttttgactaaagcaaccttcttagattttggtacttgggagattcgatccttgtctgaatcctaaggatttctttcttctcttcccctatcagtcttattttcatttttctatttttaaaaatagcatttgggttagaa

SEQ ID NO: 19210 - DNA, 1100 bp, Arabidopsis thaliana landsberg
actcgataaattaattaacctctataaattaataaattctttcggtcgcgagttgggacctttcgaaaattttacacaaatcgataaattaatcaaataatatttttttgaaaatcctatataaacatatggtctcattaatatcataaattaataattatataaaaatatcgactatatatatatgttataattatatataataactttaatgaaatataattttagtattgtttctttttgcttaaactcacattagttatttttaatttaattttagtaatttttactatatcaaaaactgttcgtgttgttttctaaacatgataattgattttatttgtaattagttctagaaaaatatttcaaataatgaatggaagcttatattttcataaaaaagtttttaagaaacttaccaaattagaaaaatctctttataaattaataaatattaatttatcgattaattaatatatattaatttatcgataaattaatacttccataaattaataaaattttgcggtcccaacattatttatttattgaggttttactatatatatatccctatatattataaagaattttgatagatttaaaactttatttacaacccctgttagacgacaaagataggcttcacaaataggtagcaaatgaatggttaaattggcatgtagcatatggaccaaaaacatgcgaataagttactaataaaaactgaggaatatcgaatattttcaaataagaaaccacaatgtcactttaaaaaatagtattttagctaatgacttttaattttgcgactaatttgcaatatgtctatttttttaataaacaattaaccatttatatttttaaaatgggaacgatagaaaatgatacctatggtgattggttcaagctttgaaggctttaacttttttttggtaaagtctttaaagattgagtttttaccaatcacacttttttattttaaataatttaaaagcttttaaagtctgtctttatgaaaaaaatgattaaaaggtacttctttactcctttagaatttacaacactatactggattacttaaaaaaacataaaacttt

SEQ ID NO: 19211 - DNA, 1884 bp, Arabidopsis thaliana landsberg
aggagaacagtccggtcggtgtattcatacagagcgtggatggtgtctaaaggtacatggtcttctacatggaggagcgttgtcgtgggtctgaaggaggtggttttctcgggtttgagctgggttctaggggatggtgttgatatcctcttctggaaagataggtggatgtcgcagaccccgttatgtgaggtggtaacatgcgaattaccgacgaactgggaggcggttaaagttgtggatgtttggagagatggagtgggctgggatttacagaggcttacgccgtatatcacagaaggtatgaagctcaagttactatctttggtggtggataatgtgacaggggctagggatcgtttgtcttggggagggtgttccaatggtaaatttacagtcaagtcagcttattcttttttaagcttggactggagttcgaagcagcagatggcgcgttttttctctagaatttggcgtgttgtagctcatgaaagagttcgagtgttcatatggttggctgcaaatcaggtgttgatgacgaatgttgagagacacagacggcacttatgtgattcgagcttatgttcagtatgcaagagtggggaggagacaattctacacattttacgggactgtccggcgattgcgggaatttggacccgcttgttaccagcacggaaactctcttctttcttttcgaaatcgctgttagaatggatctatgcaaatttaggagaggagatagagattaatggttgtccatgggcggtcactttttcgcaggccatatggtgggggtggaaatggcgttgcggtaacatctttggcgagaacaggaagtgtcgggatcgggttcgttttattaaggatcgtgcgttggatgtttggaaggcgcatgtgcacaaaatgggagtgacgacgcggacagctagggaggagagattgattgcgtggtctccgccaagggtgggttggtttaagctcaatactgatggggcttcgcgtggtaacccgagactagctacagcaggtggagtagttcgagacggggatggaaattggtgttatgggttttcgttgaatattgggatttgttcggctccgcttgcggaactatggggagcatattacggcataaatatcgcttgggagcgcggtgtcacacagttggagatggagattgattcggagatggtagtgggttttcttcggacatggattgatgattcgcatccgctgtccttcctggtgcggttgtgccatggcttactttcaaaggactggtcagtccggatttcgcatgtttatagagaagctaatcgtctcgcggatgggttagctaactatgcttttcttttaccgttaggttttcatttgtttaattctactccggatagtgttatgtcgattgttcacgatgatgtagcggggtctgcgtacccccggaacgttcaagtgtaatttttttagttttttcagttttaataaaaatggggttcgcccccctcttctaccaaaaaaaaatatcactttcaaaaggacccattcgctacccaatttttctaaatcccaaaacgtttttttttgttccaaaacacaacagccacttggtctttgcaacaatgcaagtagtgtagtggcgtagctaggggtaacgagttaccaaaccggtttgacaatctggttcgatcaattggccgatcactcggtttgctctaatcttgcttcatttagtcccatcaacaacacttattaaactaagtcacatctaaactttttatatctttggtatcattttccccgaacacgttttttttgaacgagtcgtaagttttgaagcaacccacgaacgtattgattattatgggcctccgtgaaaggggc

SEQ ID NO: 19212 - DNA, 683 bp, Arabidopsis thaliana landsberg
tatgataactaagaccaatagggatatatagatgaccgtctcatactgcttctgatccatcggaagatcggcacccgcaacaggaagaggagctgcacccgcacccgcaactgaagtattaagtagaggaggaacggaagaagaagactcaccattgtttgtaaggatcttgaccctggaattaagctgattgatatagtgatcaatatgaaaacttaaatcttgaaggtcccttgcaccatactgatgctcacttatcttaccctcaacacaatcaaacataaaatgtgtaagctgagtttctcggttttcaagacgtagacgctccagtttctttgtttctttggtaatttggttctacaagtaggtctcatgactcatcatcagcttggaccgttctatcgccggccttttaataaacattaaaaccgcctcttaaacaccttcggttgacgaccacaccactggattctcgtacggactgtaggttaccacacatgctttgacttcgcagagagttgtcaactcatggagtttcttcgttatccgtcccttcctcatgggcatgcttgtgttagttagtttcgacactttttcccctatcaagcttactgcagttcgtgtctctatgtttgagttatgtatggttaagcttttcaattttcgaaacttgtacttcggat

SEQ ID NO: 19213 - DNA, 620 bp, Arabidopsis thaliana landsberg
acactgtttaatggtaaactagcaactaaaaggagtagaaacttttgaagttcaagagatgatatacttataaaagtcgcatacacaaatatatttccttttcaatggaagtcactaaaagtataagtataagaatgcagagacatagccactaactatcacaaccaacaaacagacacggacaatactgtaaacacacaaaattagcaacttaaagtagtaaaaacttttcaagtccaagaaaactaactaatttctaaattagtcacaatcatacataaaaactcaaaaattttatcaatgaaaggtgactaatttctgaattataagttcttacggtttcattagagaccactcacgtattggaagaccttgaaatgatcaacgaaaaacgtaactcttcccaaatcaaaggtcaaagcttcatctaacccatgaacaatcgcttccaattccgcaatttcagggcttttacactcttcagctcccaaaaccttcttcacttcccaaatcaaattatcagtcgaatcacaaatcgccacaccaacaccaccaaccatagccctagtatcttcaatcatctcttcactcaccaaacctttacaataaacccctaaagc

SEQ ID NO: 19214 - DNA, 955 bp, Arabidopsis thaliana landsberg
ataaagaaatagatatttatcttcgtcacataagccatcgtaactgaactgtataatgctcccgatatttccgtcgaggctagtttttaaccttggtagtgttctttcccactctggcttggacttcccccgcaaagcagagcctagaaccttcaatcccaaagggagttcaccagctaaagccataacttccctagcaatctcatcgaaaccttcatgtggttgtttctgaccaaaggcattcatacagaagatttgaaaagcctcgtcatttgatggatatttcactttgtaaacatgatttatcccatgagccttcaaaactcctagatcttctgttgtgataataatccgacttccaggaccaaaccatcgagtttctttcgccaaggcatctagttgtcctaattgatccacatcatcgagaacaagaaacactttcttgtctctcaaccgttcgtgtgctactcctaaatgaggaatcatgatgtctttctggttgatcatcttagacaacattttgttttgaagttgcaactgtacactatattcatcaagacaaggacttggataacattctttgatattcaccatgattgtgctcagttggaaactcttggagacttggcttaacagaaacctagcgatagtggtcttaccaatcccaggcggaccccatatcccaatcatcctcacgtcatctaaatctaggcgtaacaatgctcgcatattttccatatgagctcccattccaatcaatgcttcgaaatcccttgacggtgtagcattaatcaacttgtttgaaacatcggtggcaatattttcgatcatggccgcttcattatccctaacattggaggacatcaatatgtcagttaattagtcaagtcatgaaaagtatcatacgcatccaaaaacatatgtagttgcatgtcttgactctttaaaagcctga

SEQ ID NO: 19215 - DNA, 519 bp, Arabidopsis thaliana landsberg
ctgttggccagcttgtacgttccgggcttcaggaccttggcgatgacgaacgtcccttcccagggaggcgtgagtttgtgccgccctcgggcgtcttgtcgcagccgaagcaccaggtcgcccacctggaggtctcgggacctaacccctcgggcgtggtaccgtcgcagggactgctggtaccgcgccgagtgtagtaaggccatgtcccgagcctcctccagctggtccagtgagtcttctcagttggctcggttgctttggtcagtgtaggccctcgccctcggggaaccgtattccaagtctgtgggcaagatggcctcggccccatagactagaaagaacggtgtgaagcccatggctcggctcggcgttgtcctcagactccagaccaccgaggggagttccttcatccaccgcttgccgaacttgttgaggtcgttgtagatccggggcttgagtccttccaggatcatgccgttggccgctccacttgcccattcatcatggggtgtccac

SEQ ID NO: 19216 - DNA, 808 bp, Arabidopsis thaliana landsberg
  unsure (1)..(808): unsure at all n locations
acacctataactactctactttctattcacgtttgtaaaagtttcttcaaatttagtaataagagttctgtgttggggggggtttgtgtacagggaaatggaactattgcttgtgccatattggtctgaccctgatttggatcttatccggtggccaccttttctattggctagtaaggtgaaaattaatcttgtgacttatatctagttacattttccgtttttgtattcgattttttgacatattcatgattaaatgtcatagatcccaatagctttggatatggctaaagacagcaatggaaaagaccgtgaactgaaaaagagattagctgttgacagctacatgacttgtgcagttagagagtgctatgcctcttttaagaatctcatcaattatttggtggtcggagaacgagaaggacagtaagtttttaaaatcccttgcctgtgttccaccccaggatatatacattaccnnnnnnnnnnnnnnnnnnnnnnnnnnnnnnnnnnnnnnnncattttctccaagattgatgaacatattgagaaggaaacgctgataacagaattgaacctgagtgctcttcctgatctgtatggccagttcgttcggctaatcgaatatttggtacttactgtagcattaccatgatgaatttctctgctaagtttagcatgaatttaaggaaataactgaggttggtctacttgcaacagctagaaaacagggaggaggacanggatcaaattgtaattgtcttgctgaacatgttagaattggtgactagagacatcatggaagaag

SEQ ID NO: 19217 - DNA, 1235 bp, Arabidopsis thaliana landsberg
gtataactaaaaatggacaagaagagagggtattcttgaaaggaacgtttttggatggaattaactgaatttgtataatatttccaaatattcttttcaaataatgtttttaaaaatataaccaaatatgctgaaaacaaattacttattttattatcaatataaaaatcaatatcatatcaccaatgtttaaatattaggcctgggtttacggcaaaaaccgttcaaaccgaaccgatcaaaccgaaacattcggttatcggcgccgacatttaagaaaggagtaaaccggtcggcaaacttaatttgagatttcggttaacggttcggtacggttcggcagacactaaccgatcggtttattcggtttaaaggggaacacatataaaagccaaaaaaaccctagatgtaagtcattattctcccttcaaaaaaaaaaaaaaggctactcttcttcttctcaagatttttttcccctctttcctgtttcttcctcttctttgaccttctcccccttctcccgtctgttttcttcgatcattttttattatcttcttctccaccgccgcgacatcgattctccttgattctcccttgcgtcgatccaccttttctctacgccgatttcactctccggtgtcgtcaacacttcttaactccattcccgtctttacaaattttagttcatcaaatccgaatgagttgtttggcttcatgaatcacggcttggactgctttttcaactctcaagcttttctcatccacgatctcctctacaatcttaatttctcaagtggaccttgattaatgatttgatttaggtccaaaaataatacttttgggttttctattttgtgcttttaagcctataataaattttggttacccgaataaaacccgaataacctggaataaatttaattcggttaaagttcggaatcaattttaaagcctataaccgacccgaataacccgtgtaccgaccgacccgaaccgagatttatttcggtgagattcggtgaaattttttgtaaaccgaattttcccaaaaccgattaacccgacccgattaacccgacatgaccgaactcccaggcctattaaatataattgaaaaggtaagatagaatttgctgtgattttattttgacttcaaatctataataagacattaagtggaaggattgtgctatatttcatctttgactaggaaaaacaatttaatgtatatttgg

SEQ ID NO: 19218 - DNA, 2538 bp, Arabidopsis thaliana landsberg
  unsure (1)..(2538): unsure at all n locations
tagagtaagagatgaaaaaccaaatgtcattaagtcagaaaagataanctggttggtgcattggtgtttagagattcttttgaaagggttcgtgttgtagttaagatgtaaccactggaaaagtaaaggctaataactccttgaagttttcagattcctaagaaaaagttcttggtgttatacagttagtcatcaacgtaaagccatttctactttctagaggatacaagtaacaacttcatatcagattataagcggtgtactcagactcagtgtaagaaaacaaatatgaaacaaaatcaatgcatcaaaatatcacatttgtggattctgaaaatagaaaagaacaaaaaataaatcctcaaaacactaattcagaagagaagactttagagtcgatggaaaaatttggagagaataaagaaacttcttgtctctctagtaacgaccaataccccaaaccctgataactccatcagtgtatccactgaacaaagtgtttccatctgcactccagttcaagcttgtgcagtagatcacctgcattttacattccacattagaacgtatataaaccacctcagaccaaagagtaaccaacaaatcaatatggaatcacttcagacactacaatctaagaaatcagagactagagctaacttaaaaccaggtttctcaatctaatgttagctactctcttacgtaccaatcaaatcttgtgaactaacttcacatgagagtattcagaccttcctttatgaaaatctcatcttttaaggcaacggctaactaattcacagaacttagaactagacaattaaccataagatagagtgaggagaaatagataccttggtcttgtttccgattccagtagaaccatcagtcttttcagcctcagccttaagatcaaccttcaaatcctcaacaacagacttactctcgagatcccaaatcctaatgctattctctgttgctgcacacaaccagtacctattgggactgaagcaaagtgaatgaataatagagccagcttcaagagaatacaacttcttcccttcagccaaatcccaaagcaagatcacaccatctttgccaccactggcacacaacgaaccatcaggtgacacagccacagtgttcaagtaaccagagtgaccagcaagagtgttcctaagcttacaattctgaagattccagaccttcacagttttatcccaagaagcagatacaatagttggcacaagagtattaggactaaacctaacacaactaacccattccttgtgaccatcagcttcagagatggtatacttacactcaccaagcgtgttccaaagcttaatcgtacgatcacgagaagcagagacgatctgacggttatcggtagagaaagcaacagagagaacatctttcgtgtgaccaacgaaacgacgagtagattctccggtagcgagatcccagagacgaagctcaccgtcccaagatccggagagagcgaattgtccatcggaggagagaacaacgtcttgaacgaagtgagagtgaccagtcatcctccgctgagcaacaccgtatgacttgtcttcctttgtgagtttccagaggatgattgatttgtcacgcgacgaagttacaatcacgtcggagttatcgaccggtgtagcaatggcggtgaccatatcagtgtgggcacacattgtgcctttcaacacgagtccttcagccatggttcagggtttgaggtcgagatttagggtttcggcgacaaaaatgggagagggcaaaatggaggtaacgagaaaccgagagtatttatagttagagataattagggttctttgttttcatttgtcaatagtttgggtctcttcatttgggccagcattaaggcccggtattctacccaacttggtttcatgttgggacaattatggaaccgagatttatatctttctgtttggaacgcttaaccagaattggtatagcttgttacaagtcaatttgataaccacatgagtacatgacatgacaacttttttttctctcttttgggcaaaccccatgagaactctaccgagaagttattgtcaaaaattgaaatagactcaaaagtcggttcaattaaagtaaacaaaccgagtttggccatttcaacttttattgtaagaactaagaacacaacttcgactgtccctgtggaagatataattttacatgtccgaattccggagaagaaaaagatgaagtgattgattaaattgaaatcgataacatcaaccatctctttctctcgcctgcaaagttatctccttttcaaaccgaacgatcaattcgggaatcttcatctttctacgtgttttctcagctatgtatctctgggttcgacttcagtaaaagcttcaccagccatggatttcgttaggttcttgttcgcttcatctttctttgtaattgcttactggtttcgtgaaaattcgaaattagtgttttgcgttctctatctctctctctctagcacactaattccaattcctt

SEQ ID NO: 19219 - DNA, 3058 bp, Arabidopsis thaliana landsberg
gattttgcagatagtagacaccttatagaagattttgatattatagagtcgtcaaataataactacaaaaatttggtgctaaggttgcaacattgttttggtcttcagttatttagcacaaatgggagtgctttccacgaaacaaattttaatttgaaaacttcttttctttatttttgccttaaggacaaagactaaaaaagttgagaaaaatcagagaaaaatatttatatcaatattgttcaagatcctaaatggaagcagagagtgaagaatactatttgttgctaaacaaacaattactatcatatctagagtattatgttcgatatgtcacaaacgaaacaaaagccaacaaaacatagtaaaagagaaatcagtccttctgcagtaaatctctcaaccggctccaacctagacctcggtggcagcggcaacttcttcttgtgcttccacggaagcttccgtctctgcactggcttcctcctccggagtcttgccgttggtcacaggtggcaccaaagagtcaaacttgtctgacttgcccaacactatctcaatctgcaacaataacaaacccaaaaggagataaataaaacttcaaaagggtataaggaagtagtaaaaaagaaactcgcctttgccttctggaccatcttaccttttgtctcatctttcattcccacagacgatgttagcacctctgtcattcaacacataccagagatgaaacagtttcttcaatagaacgaacggctcaaagattgatggtaagaagggagagatctgactcactcttctctgttgcaagtccattgttcttcaagatctcagagattgttaccacagttgtgattgctatacacacattacagattatatacatatacacgcaaaagatgagaaaccgatcaaataaaaaagataaaggtaaaagaaagagtctatatacccattccaagtgcagaaagctcgacctcgttgtgttgctgaatgtacctctgcatcaaacaacgaaaagatccaattactctctaagtaatacaatcaaacacttggtggacacaaagtatcaaatagataaagatcgatcctgaatcaatactataagtatccaaaaacagatcggaaacaaaatccaggcgaatactgattgttcgtctcaagatactaaaacgatgtttcgttaactgaatctacaatcttaaaatcaagcggatctcgaactctagtaaacagaatcagtcaaaattgagaaaaaggaagactcgtttgatctgaaaaaccgtcgatccggtaatgaatttaggtttccgatcattaccttggcgagattaacgtagaagaacaatggcttcttggtgttggaaacttggatcctgttcttcttgtgagtctcaacagtggcggttgttgttgttgttgcaggcgcgagaacgatgttcctctccgatgggattggtgccggagccggtgttgctacttccatcgccatctttctccgatcgctcactcttctttcagtctctctgcgtaacttttcttcttcttcttcttcttcttctctctctctctagcgggaaaagttctttgatcgctttgtgttgttggtggctatctggtcattagataaccgttacgacgcttaacggcatttatatagcactcgttgcgcttctcgtaagtcctactaaaacgtgacacgtgttcgtcttcaaacggttcgttgaccgagtaaagagcgaatgacggagagagaccactatgtttgtgaggtataaaaatttagtggttgagccttttgtaaatctaaatgggcctgagttattttgtttgcaacctaaatgggcctaagtttcttttaaaaacccatctatatatttcttttcagcaccaaaacaatgtgagaggtaaactgattttggatcccattgatcatgtaagttaataaaaaaatttaaaccaaactttaataatataatttttttgatattaaaatcctgatttatataacttttagatgttgatatcatataatagtgttatggacaaaattatgatatattgtagagagagattttaacttcgttttcattgtgtgtagactgtgtggtatattataatatccacagaccacaatacatgagaccaatctcgttgaaggtggtagccatttttcataggcaatatctttttctctgggaccatttgttggaccaaccgaccgatttgccttttgttttctttgattatcctcgttaagaaattttgccgccaaaaaggatagatgaagattttgtgatttttgagttgcgacgtgggtcctacgttattccaaaagcaacgtgggtcctacgttattcaattgaataccattgttttgttctcatttcaataacaaaagttgtattcggtcggaattggacgtttctaggctaccaattagtattatatgttttcatctaactaaatttttgaaattaaaaaaacaaatatagaagaaatttcttgtatttttttttttctttttgtcaacgtataaactgttttacaattgtatgctattatactttcaaattttctacgtagtgtatatgtagatgcgttcacaagccaaaccatatttcgaaaaataatactacaacaaagctgcgaaaatttaaacaaagtagcgagggaaagtatataaaattacactcttgatgtttaaactcgtcatgaagcatttttaaagcttatagttctcttttacactatactccataaagtgatatacgtactctactacagccttcaaggttaaaaatactcaataggattacgtatttggataaaactcaaaaagcctgtgacgggttaaatactggtatcacgttagtcgagaggtggttattaaatagaagtaacttgtcacattggtgtatttatgattattattaaatgaggtatttttcacattcgtatccgtcttgtaactttaatggccacgatgattattgatgagtttgaatttccttctaagatactgctgcttaacaaatgattattgtgaaaaaaa

SEQ ID NO: 19220 - DNA, 1066 bp, Arabidopsis thaliana landsberg
tcacatgaaagatattagacaaaatacttaagaaaaaaagctcaatatggtaagcatagagactccaactttgcttctccacataacatgtaacgtcggataacttttcgcgacgatggctgtgcgtgtagttatcattttttagttaccgagtagacttcgccggagtttatcgcaatcgacgagataagcaaagccaaaagcgagattcattagcgtagcctcgtgaagctcctcattaaacgtcgcagtcgcgtccgtcgagaaaaaaaccctaaagcccttaacaaacgcttcacgcgccgttgtctcacagcacaagttcgtcatcactccgatcacgatcacctcctttactccgatcttttccaagttttcctggaggcgggtgttgttaaatgactgtacgtggtcttctccaccatctcgtctggtttggttacttggccttgtatctcctggatgatttcagaatcggtggttccgtcaaggattacatcgccgttacaccactcgccgagcatgccgtggtcggtaggggatttgtggttgtgacgcgtaaagaatacggggactgaggcgcgtcggcagatgtcgatcgtggtgagaacgttgttgaggatgggtctggccatggacgagtagtgattctgcatgtcgctaaccggatcagctgcgattttagagtttggatctcgctttcgtgtctcgtactttctcgatgatgaggaagccatttctggcggtgaagatgaatctcttgatcggtggagatatatttgggaacgaaaggatttagtcactcacttattgggccaatataaaatgggcctagcccacgtatgatgtaatcttgacctatgttggttatacaggcataattcaatgtgtatagtataatgttctttgttacatttgcaggtgaacacaagtacctgctctaaagagggatatgatgtacatatatatgatctatgaatcttatgtttctttatcttctagctagtgatgaacagctttcacaagttggagttacattgctccaatgatgtaccatgtaactcct

SEQ ID NO: 19221 - DNA, 1066 bp, Arabidopsis thaliana landsberg
agaaaacccccgatgaccttacgctttcgtttacttgttttacaccactctcttaattgttatttacttttattgcttttttttacagtcttttttattgctttcttatttctactacacgcaaaatccaaagagttcaaagtcaacaagctatggccgaacaaaggaatcgagacaaaggtctcccatgcgtatcagccacaataagtctcggctttacataagcacggacaacccctacacgatgaagatggcaaacccatatatgaggcagctgaagaacaactcgctccacaagaccgagagcatccggaagctcagccttcctaaatcacttctacacgaagtcaagatccaactctttgaggaacaagctggaaggattccaacaaggactggtcgaatccttctatgaagcatgggaaaaatttaaggactacgaatgtgattatcctcatcatggtttccccgaaggtaagctcataagcatattctataaaggactgcatgccaaattccaactgtcactcgatacggcgagcaagacttcacaactaagaacgtcgacgatgcacgtgccctcattcaaaatttggcaaccagcaacagtaatgcttccacggattttgataggaccgtccgttctaaggactccgactcaaaggagatgtctgagctaaagaacatgatggcccaacttctaaagaatcaaaaccgagctgtgaacgcatgcgagacgatcggcaacacggaagccttccaagggtacaatgacacatccgatcaagaagaagaagttaacgatgttgaaacccaaggattctagcagaaccgcagttacaacaataacttcaacaacaactttaaaggtaactctaatctctcttataggaattcgaatgttgagaaccctcatgattaatacctatccgccggtgaagcctttccaatgtcgatttccaaacgcaaactacaacaccaacaacttccagccaagagcccccttcaacaacaacaatacggcaccctttaaaactggaccgggcgaactcgcaccatccaacga

SEQ ID NO: 19222 - DNA, 2183 bp, Arabidopsis thaliana landsberg
aaaaacaaatttttatcaaactttcccatatttcaaaataaaattgggaactaaaattataaccgaaaatttaatcctacaagtacaaggctgatctatctcctctttatacataagtcgaaattctattctgggtaacaaagtgtatgattgatgccgacaaccaaaaaatagcttttttttacagattgttcagatttgatgaagatggtgtctttcccaagcgaatgaccagcattttcaacatatttgaaggagattcagaccgagaaggaagaattcactactttttctttatctttaatttctcgtaatgcaaatgtcaaagcggattatttggcacgaaaagtcgtgtaaaactgctacacattatttatgtaaacaggtttctgcaattttgactcctttaaatcctaaataatatctgataaaaaaaaaacaaaaacaaagctactacttgtaaatttatatcattgttgttttataaaattataaaataaaattatctattcaacaaaattataaaatttctacccatcattgcatgaaattttttaatgtacagatagttaaatgattactaagcccaacaatatcttaaaacaatttatagaaacaaacctcgctggagttaaaccctagggttatattaataaaagactcaatgaatcttttgcacatactttaaggatttcaattagctggtcgtgagctgtcaattagtagctatatatagcacaagacaagaaaaataaattaaaactggatttatgattccaaagagtacttattctataatgttgggttttcaaagttgttaattcatgtgataagatgttatcatgtgtcaaaatttaagtttgttaatatatttaaagatagaaatataaaagatatttaaccctatcaaatttaagtttgtttatattttcaaactttttaattaatatattaaactgctaacctagttctattaagatttgtttgttaatatattcaaaaagaaataaaagttccttatcatatcaaaaagtgttaatatattaaacaattaacctcagtctattacatttgctgctgttgatatattcacaaaaagaagtaaaagttctttatcatatccgaaaaaaatacaaaatttgttaatgttattatataaaatcttatcattctcattagagtgtggtatatggcaaactatgaacctattttttttatagttaatatattagaataatttctcatatcgcaaagaaaaggaatttgttaatgttattatagaaagttttaacattcttagcagaacatgacatgtggtaaaaccgaaattaacgaaagtataacatgttttaattaattgattatatttaatacatagtttaatattttattatattgtacggcaaaatatatctgtaattttcttttcttaattaaaaggataaaaaatatatcaacatgtctacattagaaagaaaacaaaaaaagatatattattaacttagagaataagcataactcaagttttaaaatagaaactcttacaaatatatattctttgctagtagagttttccttgtcacctaaaaattaagaagctaaactaaatgtctaaactcatgctgccgtttcatgagcatcctatgacaatttcgaacctatacaaccatgcttgcgatttttgccctggaagaccgaaacctggcaccatatttttttgcgaggagtgcgacttggatctgcacaagggatgtgccggcaaattcctcaacaactcatctcgctgtaatcactctctcaagattttccaaggtaggttcggacagttcggtgaagatgacgactaccaatgccattattgtcaacaaaatgtaggatttcattttgctcgttgcacgatatgcaacataagcatcgacgaaaagtgtctgcgaaatccaccaccactcactattttccaaccaaagcaccacaagcatagcctcttcctcttgggaagactagtcgcatttacttgtaatgcatgtggtgtggaaggcgaccgcaatccttatatatgtattgaatgcaatctgatgctccacaaagagtgtactgatctaccaagggtcataagcataaatcgtcatgagcatcgcatctctcatacctttcatcttggcaaaggagaggcgtttgggagt

SEQ ID NO: 19223 - DNA, 549 bp, Arabidopsis thaliana landsberg
tacgatggccatagcctcggcgacgagggttgcgacccaagccgcgagtgtttccacatcgatcagggggatcacggcgaggacaaccacctcggcatgctgcaagatgacaacgcccctgtgcctgcgtctcgcgttgacattccacgggagctagctgtggtcccagtccctgcggggggtcaggacacacagctcgagcaattccgcgagatgcaggccaagctcgacgaagaagcggggcggcttgtgcagctccgacaaaacatcgagcaggattgggcaggccgagcacttgccggaggagcgcctcatcgggcccaagacgtccagcgccgaatcgttgacgatgccagggcaaggctgcccccggccttcagcggggtcggccagaatctagcagcagcagcaatgctactccgagcgatgccggagccatccaccaccgagggcggcgtatccagggcaaactcaacggtctcctggaaaacgcagcggtccgacgagccgagagctctgcctcccgaaggcaagggtgccctcggagca

SEQ ID NO: 19224 - DNA, 1120 bp, Arabidopsis thaliana landsberg
agctaaaagcctaatatatcaaatttcatccgaaagtaaacgccatacggcaacttgcttagattattggttagctccattctacttgtgatgtttctccaaatggcaagagaagactacgagtaaacaaagaagaaccgttgttcggagctggtcggagtccgagaatctctgcaacagcattatagacctgaacattctcgaacgatggcacttttattcctctcctaaaccttggaccatatccaacaaagattgatctcatagaaaagaacatattatcgtatccatgagttccagaacattcttgaacgtatgttctgttctgtttaaccattagaccttctcccaccattccgatgatcggtggaatccgagactatcggaataatgcagcctttgcggtaaattctccttcaagtaaacctgcaaaaactctccgttggctactttccctgagctcaaagcttcgttcatcttccttacgagttctgcattcttctgtcctggattcttgacatctttgccccagcgcggattcatcgctagcaccggactataatcttggatccaatccgcgggtatcttgatccaatcggctaaatcatcaatgtaaatcactttcttgtcacagttagtaaccattccgtgatcaccaagcaatatcacatgaacatcactaaaaaccttcctcttctccaatcccatgatgatcctaccgatcattttatcgacctttgagacggcttccgtgacgcgaggatcatcagggccgtactcatggccttgtatgtccggttcatcgaaatacagagccatgaaatcagggatttctctctctggaagatcgaaatagttcaagatcgtatcgactctttcttctaaaggaactgaaacattgtaaggagctttacaaaagccttttgggcagttccaagaccctttgtggacgtcacgcctggccaaaagtaagcacagccttgagccttggtcactgcggcaccacaacggctcactaccaccattagggtttaggtctgttgatagtcgcacttacggatcggagattgtcatgattatacgtggaagctgatagatccgtacgatgagtatggttggg

SEQ ID NO: 19225 - DNA, 711 bp, Arabidopsis thaliana landsberg
gattcgagagagttaagtatattactgagataagcctcttctcttgttaacaacacaaggataagcttttgcaccaacgagattgtgattaatcacacccaatgctctcctgttctgtctcttcatctctacaccgaattttctgcttctcttatcatcatctgacaaaacccagaaacaaaacaacatcagactctctgttcgtcagacctataattctcagatttttcaaaggcgttttactactactaccttgaagaatctctgtaatgggtttgacaacgagattacgattgttctcctctggattaaccattgtttattttactcgatttgatagtgctcctggagaagaatctagaagaagaagaagagcatcaaacgaagaaggatctctcttctctctgtgactctgtgtatacgtctgatgcaattgaatgaatcagtaggagtcagagaaggggatgaaataagcgagagagagaaattaaatcaaatcaattaaaattaaagttgctacctttttttattttattttttttttattattgaaggaaatagcaacggctaggtgattaagatgaccgttggatcatgaaggaaacgatttgtttctaagtctgtctaaacccaacggtaacttttttggccatgtggtgtgtgtggtggctctctctctttctcatttcaaaatttattattccttttttt

SEQ ID NO: 19226 - DNA, 1081 bp, Arabidopsis thaliana landsberg
ttgcctctgcattgaccatcattgtaacaatatcagcattcctaagccaaatcttacacttttcctagtggcaattgtaagatttagtaccgtttttgtgtggatcatatgcataatcattcttgcagtgcttgcattgcgctctttctactgctttcccagtcttatctttcttccaaatcacagtaaaatgttcccaacaatctgcatactgctttctcttcttcggttccggatcttctggtgttgatgtcttttttcgtcgttgtcgcctttgatatcattatcattgacatcctcatccgaaatatcaattctttgtcttttacgagatttagatgtttctgctccatcaaatcttctttgtttgttttcatcaaatctattacggtggatttcagcctcgatgtctctttgagactctaagtcaattgatccaaactcaggaaaatcttcagaatcctataataattaataaagtacaaaacaatgaataactttcgataattttccaatcaaagtacaaaattgattcataatcaataaatcaacttaccattacgaatctatatctcagagactttgagattttggtttgaaattcttcagacatggagagtttgagaggctgagactttgagtcgttgatgtgatcagttttgtgtcaagcaaattatgctaaagtcgccaaagcttctaggtttttttttttaaatactaacttcaaagattctagatagtacaaaaggtttgattttttcatttagttaacgacgttagctaaacaagttcatttaagttaaacgattaagtcacaagcacttaacttgactgaaactagtttctaaagtaaaaaacattacaaagagttttatgacctcaagtcaattataagacaattcacaaacagaaatataattgtgatacaaagagctcgatgacattaccctggttcaaaaattccctgagtcttcttgcaccttctaatgatactaccctccaactggtcgagtcttctaggattttggaagactcataaagaggcctcgagactttatgaacacttgaaacctaccaaacc

SEQ ID NO: 19227 - DNA, 727 bp, Arabidopsis thaliana landsberg
tagcaaaaaacatgccgctgaggttataaagtacagtgcaagacaatgaacccacagcctgagagctttaaatgtaataagaaaaaatcagcactttacactctctgcatagagtaacatctttcaaagagacataggtagagataaaaaaaaacatttaccattttgagccttctttaagattttcaattgtaaacacttcggatgactccaaatggatttccttatgcaccatcggttgcccataataattaacaggcagcacaaaggcaatgcaaataacagcaactataaagaaaatacgaatgctgcagaacaaaaaacacaaagtaaaacaaacactacagaacaaaaccaagaagcagaacaaagaaaaagcatctgggagagtttattttcagtaacctgaaaatgaccatcctaaggaagacgacagcatcaagaccagcagcagctaataactcgtcttcactagtctcccatgctttcacaagccaacttggagacggcacaaacctctcataccaaaaaggatcataaccgtctagcaccaccacaaacaagcctttggccaaaatatacacagtaattgggtggctgtttcctaagtatggagtaaagtgataaaagaactatgcattatcgatatattaattcccgcagaagtaagaagagctgatatttccatcttaatcttatttcaactcctttctgacttaaaattgca

SEQ ID NO: 19228 - DNA, 488 bp, Arabidopsis thaliana landsberg
gcgccggaatgtgtggacgcgtacacaagtctccacgtggttggagatctgattggatcgatcgacgccgtggttggagatcgggaaaaggtgttcgtagtgggacatgattggggcgctattatcgcttggcatctctgtctttttcgaccggatagggttaaagctttggttaacatgagtgtggtgtttgatccttggaatcctaaacggaaaccaacctcgacgtttaaagctttctatggagatgactactacatctgcagattccaggtttatgaatcttgaatttgattctaatgaatctttggtgttcaacatttgaaatgtgtctggaatttggcgttaatcacgcttttgttagttaaacacagcagcaactagattggtgataaacatttgagtattgctgattttggatgtttgaagaagagattattcattagaaagagatcaatgcacttaaatcagtttcgaatgtatctttt

SEQ ID NO: 19229 - DNA, 2529 bp, Arabidopsis thaliana landsberg
  unsure (1)..(2529): unsure at all n locations
atcttcaactgtgttttttggtgtcaaggtccgccaaatatgccatgttgctctgaaacgggatcatgagttcatcaattgtgtccaagagggctctggggagacacatcaaaaggtaaaagatttctctttagcttaatttgagtgaatggcctgccatatgattggatgttatcagtttcttatgtttgttttatctccaggtcacacaaatgtacatgattgcatcactggatagacatttttcgcttctacatgtgcttcttaaagaacacatcgcagataatgtggactataaggtaacattatctctctagtgccattatgaataaccaatgtctgtatttctgaactatcccgatttcgttgctgttgtaggttatcattttctgtacaactgctatggtgacaagattggtggctgatctgcttagtcagctaagcctgaacgtcagagagatccattctagaaaaccgcagagttacagaaccagagtttctgatgagttccgcaagtccaaggctattatcctagtcacatctgatgtatctgctcgtggtgtggattaccctgatgtgtcattggtcgtacaggtaaccatagttttctgacatggaattgttctgcgactacaaattttatctcttttgtttaactgaagttgtttgcttttgcagatgggattgccatcagacagggagcagtatatacatagacttggcagaaccgggcggaaagggaaggaaggggaaggagtcttattgttggcaccatgggaagagtactttatgtcatctgttaaagacttgcccatcaccaagtctccactaccgccaatagacccagaggctgtgaaaagggtaagcattttcatataagcgcactcacatgaatttgtgattctactgaacttggcaagcctttcttaactcatatttgctggcaatccagaatgagtagggaacttgaaactgaacctgaatctcataacacaactctttgaagttaaaagctatgatttttgaagggtgtgagtatgagtgagtattgctgggtataataaacttgttgaattcaggtgcagaaagggctgagccaagtggaaatgaagaacaaggaggcggcgtatcaggcgtggttgggttactacaaatctcagaagatgattgcaagagacacgaccagactggtggagctggccaatgagtttagccgcagcatgggacttgacagcccaccagctatccccaaaaatgttcttggcaagatgggtctcaaaaacgttcctggtcttagaaccaagtagattttcttttttcctagtgatctgctttggttttaaaactttaatgttttgtaagtgtagacgtgtagtctcttgtcattcttgctacactcttaagacttcctaactaaaaaatcctataaaagttgccttcttataaaggtcttttgtttgtaatggcttgttaacatgagtatttcgattttcactaaaaaaacaaaaaaagtattaagttggattatacgtgtttgaagatttaacaaaacttttttctgatataaaacaacacgtttcaaagcaaagggagcaactacatgccgttttgtatatttgttgacattttgggccactcgcatctgtacccttaagccctaaattgtgtttcctacaaaaccttttaaaccctaaaataaccgacggcgggaatttggtagttgcagagccttacagttaaaggcatacgcttcaccgttctcttccgtcttttctccactcgttggcatgaattccgatggacccaaatccggtaagaagagacgagagattcgtgctaaacttgtgaagaagttgacgagtgacgaagatggctcgggaaagctagtcaaggacaacaataagagtctaaagaggggaagagaaggcaaatctgatgttgatgagcctcttattaagaaaccagcttctactacgcctctagtgactcaaattgctaaaacttcagattcttatttgtcaaagacaaggtacattttttgcgtttctttcggagatagcttcagagctattcttagtggtgtttgattcagatttctctttatggtaaaatggttcttacagatttgatcagttcccactgtctcccttaacgttaaaaggaattgnnnnnnnnnnnnnnnnnnnnnnnnnnnnnnnnnnggaggctactcttcctctcattctccaaggtgaacttgcctaaaaggcagaaacttttgcatctttcttcatgattccttatgttttgtcatgacttaaacattttgaagcttgactattcctctattaattattcttccttggttttccaggtaaagatatccttgcgaaggccaaaacaggcactgggaaaacagttgcatttttggtgagataccctttttgggttcatgttggtcatttaggattacaatcagtttgattaattggggtttgttattaatgttgatgtttctttttccaagcttccatcaattgaagctgttat

SEQ ID NO: 19230 - DNA, 547 bp, Arabidopsis thaliana landsberg
aggaatgctttgtctcacctcagccttgctctcagcgttcttgagcaaatcaagaacaaacttagcatgtcttggctggccaacgtccttgaccattagagtgcctgttcttagcttgagcagttctcccaacacctctgcagaaacgtgtgaagggaattgcttgcttgtgagctatcacatcctcaaggtacctcttcgccttgatcaatggtagcttcctgatggcgtgcgctgattccctagtgttctgtttcacacaatccgaagaaaacaaaacacaatgagaaccaaccaacaaattcagaaacacagtattaattatgtggaatcactaaccaaaacaacaagttactaaaattctacataggttcacataagaacaataacaaagctatactaagcgattaaccaaaagccctaaaaataaacaagccttaaaaagtgaaatggataatcaatgtaccatcatgtactgaatcttatagttttgagatatataaacattgattcacccaattacgatgacaatttcacttccctgaag

SEQ ID NO: 19231 - DNA, 435 bp, Arabidopsis thaliana landsberg
tgtattgtgttgcctgaacccatatttttagcaaaataatgttttgtgcaattttattttctgtgtggggaaatttccaaaataaatccgaactatttaaaatctgctagaaaactacctaaacttttttcggtgtcagaaagatacacaaattgatttgggttggagataaaaaaacacgacctattatttttttccgactacctcccttgaggggaacgggccgttaacgatgttaaccaaatcgtcaaaccctgttaattttatttacagaaaattcctcgaaaaaacctaacttaaatgattggttggacggtaggaaatttttaaagccactaaaaaatttacagccccaaaattgaaataatcatgctttagctttcctattttttctaacaggccaaatagtattttttttcaattattttggctgat

SEQ ID NO: 19232 - DNA, 563 bp, Arabidopsis thaliana landsberg
tgcgacttgggcataaccttttgccacaagccgagccttgttccttgtcaccaccccgtgctcgtcctgtttgttgcggaacacccacttggttcccacaacattttgcttggggcgaggcaccagtgtccaaacttcattgcgcttgaaattgttgagttcctcctgcatggccaacacccagtccggatctagcaaggcctcttctaccctgaaaggctcaatagaagagacaaaagagtaatgctcacaaaaattaactaatcttgaacgagtagttactcccttgctaatatcacccaatatctggtcgacgggatgatccctttgaatcgtcgctcgaacttgggttggaggtgcctgaggtgcttcttcctcttcaacttgaacatcctgtgctcccccttgatcatgcgcctccacttgaggtacctgttcgtcatcttgggttgggggatgcccatagttgaggaaacgattgatcttgctcaaatgtcctgaggccgtaatcccaatcgcatggtgcgtatgcggcgttggacgtctcttcactacacacaaga

SEQ ID NO: 19233 - DNA, 1969 bp, Arabidopsis thaliana landsberg
acaagtaaatatgattgatgtaaccaagttgattttggatgaaagatatataatgcaaaacggatatgagaggttcttacgcgttccatctattgaatatcataaccaacacaacggggactagtaaccgtggctggttagctgcacctctataaaatcaattcagtaagaccaaagaacaaaagagataagtgagtgagtgagtggtctcaacatagataactgataagaatttgaagagaaacatatagtacttggcaactcctctggctccatctgccatggcatctacagagttaccaagcatcctcatatatgcaagtgaacccaacaagccagcaccaaaactgtaacaaaatattcaacacaaattaagattgatttaaaaagtccttaacgagattttgatgttcattgcatgagaagacaaacctaagtgctatctctggggtgtatgagatataagctgagactaaaccaacaccaccaataccgagtgtgagaacctgaatcttatttttcagctgcagaaaacaatccaaaagtcaagagactaggaactgaatgcttcaaaagtaacggagttgcccatgaaggtaaagagtagtgcttatacaagctgccttttcatgagatagcaatacatgatatttgtcataccatgaaaggattagctaaccaaagaaggtaccttaaaatattgttccctgtctttagcagcttgtacttctgggtcaccacgtggccgtctcagctccctaaacatcacatcctgcagcacacattagaaatgaaggaaggaattaagaaccaagaagatccatttttgccaattctgatcaatgtttacaatgaaaatgacatttcaattggtatagaattaataaatcaaagcacaagtgatccatcaattgcaaagataaacttacactgccaccagttgcagccttcgttgctctatcccatttctcttgctcacgacgtgtaggtgccagcttccatttaggagacacaatagccttactctaatgatattgacaaaaaagagtaaacttcagagacataaagaaatagcaatgtggctttgtcaaattggcttctcaccatttgctttttagcttctgacttggaggtgtcaagacgatttttcacaacggatttagaagacgatgcaagctctttacttaaatcaacatccatactaattttccacagataacaacaacgagcaaatcaaccattaatcaaaatgcaagaaataaaaaactaatttttatcagtttaaaggagaatgaacctgtcaagactcataactctgctaaagctcagaaacccagaagacttttcctgtaagcaatcacaaaaccttaaagagatttagtgaaaccttaaagttgagctaatttggggggataaagattgaacctttgaaggagatgggtcgagagaagaatcattaggatcatcaaacaatttcttcatttgatccataaaatctctgttccagattaagtctgtggaagtaatgggatcttctttttcacctccccagtactttcggagcttggtggtagtcggaggaccaccgtactctccgggagcaactccggtggaccatttctcaggtttcttattgggtagaatgattttggttggtagacgagaattgggagattgatcttgaggaattggtggtgtggttgatgttgctgagatgtaactaagaatcgccatggatgagttttttgtggagcttatgacgcacctgatgtctgatgatgatgaatgatattgatgatgatgatgcaaaataaaataaaaatctcagcttgtggcaattttggacttcgtgatattttcattaaatattcccaccaaaaaaacaaacatttcatataaaaatttgaaaaaatgttcaaaaaaggaaattcggaaaaaaaaagatgcgaaaatggaatcttacgttcaa

SEQ ID NO: 19234 - DNA, 257 bp, Arabidopsis thaliana landsberg
atcttccgcgaaaatgaaacagtaaaaaaatggtactaagctgatgtgtcaatcagagaatgcatcagtttttgttaaaatgactggagatttagtattatatatagatttgagtcattctagttaactacaaaattagggtgttaatctagctattaatctgtatatttgtgtcaatcttggtaattttcagaacctttaaattggcatttctctacaaaaatattaaattagagtgcctcctttgttatcttata

SEQ ID NO: 19235 - DNA, 1416 bp, Arabidopsis thaliana landsberg
  unsure (1)..(1416): unsure at all n locations
atttttatttttattttcttgggtatgtgtgttttgtgtgtggaagttaaattttgtggtttgattaacgaatgatttttaatctatgatatggacactcttctcttccttcctttgtctctctatttatatgtggttgatatatacgtacacacgcttgacgcgtatgtaatgacttaatatctttaagtgtgcttcaaaaaagtcgtaacatatattattgttatttcctattggctaataataccaaagtcacatgcataaataattaaataacatgctataacttaaaaatgttagtttaatctgttttattaggctttattctaaactatttttagactgtttacacgccgcttttatatccaagttgcaaaagaagaaacagctaggaagattgtttgaagtttttatggtattttaacattttaggtggtattattagtttgggatttaaataaagttttaatgacttaaaatattatagagaatatattgttatttaatcaaattttttaaaaagtttggtattattaatttaaattttttataaatttagagttattgaattcatacttttataaagtcattcaaagttttgtgttattcaactaaaacaaaaaaatctttgaatatttatgaattaaattattgtgttattggtttataactttctacacattttttacaaaataaaattataaaaatctcattaaaatagagagattgtttgagaaattttacaaaattgctaaaaactaatcaataaaattatagaaaacactttagttataatttagaatcttttatttttttaccacctataattttatcaaaatcttcaaatttattgataaattagaaaccaatatatatcacttctttaatgtatttttatgtcgacaaatgttttatgttttatttatccacacgggcactttatacttattgtaaatttataactttgaaaagatgtctaactactaccctatacgtgattacgtgttacaagttttttttttttttttttttaaattataataataagtatgaagaaaagaggaaataggaaattttgtacgtcgatttttttttttgtaaaagttgagtaaaagtgaactaaacatcaacgatgtcccaaatcatagccttgactagtagacaaacacgtnnnnnnnnnnnnnnnnnnnnnnnnnnnnnnnnnnnnnnnnnnnactaacaaaatcactacctcttgatttacatttacatttaaatgattacattcataccaccttttgagtgtgattgtatgaaatttacattctttggtacaactaaattcagatttctttctataatctcttaaatgtctactataaatttacaaataaaaaataaaatggttctaaatatatttaaaatctcaaaatatat

SEQ ID NO: 19236 - DNA, 3900 bp, Arabidopsis thaliana landsberg
cttatccgacgttggactcatagcatccgtttcttcagccgtcttcgctcctcacaccctctcgttgttggactcgacgtccaatggacacccggtggttccgatcctccaccggatattctccaactatgtgttggtaaccgctgtctcatcatccagttgtctcactgtaaacgcattcctgaggtccttcgaagtttcttggaagatgagacaatcacttttgtcggcgtctggaacagccaagaccagggcaagctcgaaagattccgccatcagttggagatatggagacttctagacataaggcactatctgcctacgaggctcctcaatagttcgtttgagaagattgtagaggagtgtttggggtacaagggagtgaggaaagataaggagatatgtatgagtaattggggtgctcgtagcctttcccatgatcagattgttcaggcgtcagatgatgtctatgtttgctgcaagctcggtgttaaggaatgtatctggaaagagcgctcgaatgttaaagaacgtatctggaaagagagctcgaatgttaaggaacatatctggaaagagagctcgaaactttattttgttggggtatgtttctgaggaaagagcttttccttgaaaataatcaatgtcttttcttttagatgttttgaattttgataatgaacgttatctaggtcaaaatctttaatcgccaattctcatgttgtgttaatatttttttttgaatacaaatacaatgcatgcgttattgtcagagactatgaaataaaaagacttgtctatgttaacattcctatgaaaatatatatgttttaaaatattgcatattaaatgaactacagaagtcacatacatgttacatgtatgtcgatatcaaacacatgatcatagatattttgaccaacactgtgatttccaaaggctcagattaagggtaaaaaaataaattccttgctgagaagattaaatcgaaaaccaaaaaaaaaaaaaaagaagatgaaattggttgtgtgtggtcatgttggacaaggatgaaaaaagaatttgtgcaagtgtcgagtgatcgtgttttgatgcaacccacaagactatgatgggcctgtgctttctcttggaacactgctgaccccgaaggaagagatatgcccgcgagaccgcgattccttagttgatcttttaaggtgtgattaaaaaatcattaataaatatgatttgtgtaaaataaacatgtatggaaaattgaaaagtatatataaaataaaaagaaatagatatgcatttttgtttatgaagggtgaaattatattttagtatatcagtcaaagatatacatactatggattattgttagcagttttaattggtacattccgattataattttgcggtccttaactttatactttttgattttcctcttttttttttttgtatatgataagtttttaaactttatataagtgcttctatatctttcatgacaatcataagcctaaacccatttgtagaaattttaggaaagtattaaaggatccacttgtgaaacaaagtgaaatggttgggtccactttcatatgtaaaaaactacactttgcggccaactaaaacctgtcaatcaatcatctaaggtcggggcataacgcataaaccaccatgctatggttcggtttaaacacctctttaagcaatcctctcacatttcaattgatatttcagattagtttttgctttggtttagttaggttcggttagtttgatttccgtaaattgtaaataaaatttaatcaagtcattttgatccggttttggttcggtattgttagcgcttgttagattacggttgtcttttcttttatataacatgtgttagatttcatagcatagaataatgaattaatgtggttagttagatgattgattaacactgaatgagtgaggtatgtaagatgcttgtttgcaatgaaatttgttgcagttaaaatcaagctaaattgacataatatagtatacattgattgaccttaataaataaaaacattcatattcacgaaaaaggattaaaagataaattttcgtaattataaatcataaataagatttttgtgatgaaacttacctatttatttggttctactgtatttataaactcttaacagaaagagaataacaagtgggtatgtgattggaaagtattttcactctagtgttgctaatttgctggatggcacacttcattaccaatgccaaaacactaataatgagaatttcacatggccttttaattctaaataaaaaattcatcttttcttcttgataatgaaaaatgtatagacattaatctaaaaagacaactaactggaggtcatatatttgtgtaatcacgtttatatcatttgccttgtaaaattattagaggagcactaataaacaaaagttgttaggaattgattttaaattctgaaagttagtgtagacataggagtgagtcagatatccatagagaacaatatgataatatgtgaaaattaggtctgattcattatatttacagtaattagttgattgaatatgtcatttatgcaatatgggagacaaccaaacatacacacacaagtggctacttagtgattagtgatctgaaattagtagtgaattcgtatgttttatattcaatcacgcatatatatacgtgatacagtagtaaaaccccataaaccatatatgtggataaacgggaagtactgttgttaactagtggtcgatatcttattcaaacttcgtaagactttaactcacggatgattgaatatgttcatattgtagcttactagcttagtatctcactcatgcaccattccataatttttgttttctttgtaaccatctcattacaactctaagctgatcaaaactcgtttttaattaaaaatatacatgaatacaaattcagtctagtgatttatgttagtgtcgtccatgtgttaccaattgtatataaatctcatataatacattcttttaaaagaaaaaatgtactatcatatatatataaacgaaatgatattttgtagttaaaataccatttcatttcaaatttagcaaaaaaaaaaaaaaaacatttcagaggaaaacgtcccaagaacataaatatttagcactaacacacaaaccacaaacaacttattgttgttccaccgtgttgtgatttatccaccaaaaagtttaaaaccaatacctataacagtgtttgtagttgtatattacctataatcatgacattcctatagataaaaacacataagataaacaaatgaaattgataggttaggtgtgggcctcaacgtgtgaaattttggacatccatcctatttgcaacaaacgcggttgggtctcatgaaatgcctataaatacggacacattctcaagcaaactcatctcacaactaaatcttaagtagaaagagtgaaacatggctaatcacaaaaatctcttctttctatgtttcttaataggtttagggttatgttctgctagacgagcactactctcctcctctgaatccaaggctgaagtcgctgcctatggcgtgaatagtggtttaagtgctggtcttggtgttggtattggtggtggtcctggaggaggatctggttacggaggtggaagcggtgaaggcggtggagctggtgggcatggcgagggacatattggtgggggcggaggtggtggacatggtggtggtgctggcggaggaggaggtggtggccctggaggaggctacggaggtggaagcggtgaaggtggtggagctggatacggaggcggagaagctggtgggcatggcggaggtggaggaggcggagcaggcggcggtggaggtg

SEQ ID NO: 19237 - DNA, 1075 bp, Arabidopsis thaliana landsberg
aattatattagactttcattttactttctattaactggactatatgttattttattgaaggaattgagccacatgttacactacatcactacgattatcctcaatatctcgaggatgactatggaggctggactaaccgcaaaatcatgtagagcggcatttactttgcttcttccttcacatacgtctacataaacaaatctgaaaatttaaaaaacattgttatttgtcatcgcagcaaagactttacagcttatgcagatgtttgctttagagagtttgggaaccacgtcaaattctggaccacgatcaacgaggctaatatattcactattggaggttacaacgatgggaattcaccgcctggtcgttgctcctttccgggcagaaactgcacgttagggaactcttccactgaaacatatatcgtaggccataacttgctgcttgctcacgcctctgtttcaagactatataagcaaaagtacaaggtctattttcttaaaacatgcatctatatttagatcaacctctcgtcaatgtggaacttgatgacaaaggagcaagatagataaaaatgttataatgtgcaggatatacaaggaggttctgttggatttagtttatttgcaatgaattttactccttctacaaactccaaggatgatgaaatcgcaacgaaaagagccaacgatttctacctcggatggtaagtcaggcacactaacaaatttaggctacatatccaaggttttaaactaaaaacaaaagaaacaaatgtactctttgaaaacttaggatgcttgagcctcttatatatggagactatcctgatgtgatgaaaagaaccattggatcaagactgccagttttctcgaaggaagaatcagaacaagtgaaaggctcatctgacttcataggagtcattcactatctcacggctttggtcacaaacatcgatatcaacccttcactttcaggaattccagattttaactcagacatgggtgaatctattaatagtaggaaccaaataaatctatatatatatatattttgaaaaaaactcttagct

SEQ ID NO: 19238 - DNA, 130 bp, Arabidopsis thaliana landsberg
cacaggaagaggatcatgcaatggatcactgactgcttttgaattctttacgacgtcgatcacaggattggttaggcctgaggaatttgaattttgggagagagacgacaaggaagcgagtgacggaagt

SEQ ID NO: 19239 - DNA, 1444 bp, Arabidopsis thaliana landsberg
gtgtatccatcaccctctgtgtatatcacatcgaagaggcgtgcaaagtttaggcatcgcagcagaacctggcgcggtacacggtcatgtgagttcatgaactcctccacaaccacttttttgttgtatatgtacattttacgcaactcacgggatgcttcttccttggtgactccatattgtttcatgtaacagttgagcccattagccacctctcctctgtttatctcggtctacaaatatcatttgttcatgaaagactaaaagaagaggaaaacagaaaccactagaaaaccaatgagatctctaagatttgcggtgtacctcgtaggttcctacgtcatttgctatacggaacagtacattcagagcgtcgatgagtaggggattggaattgagccactcaaaagcttccttctcattgatatcttccattcctataaagcaatatcctgcataatcacccatcccagctgtcaccaatccaaccttcatgtactcatcaaaggttggtacgtggcctttccgtgcccactctgtcaactgtttgtacgccttcgcaatgatcttgaactgatgtttggaatcaaagaactaattagagtccactaactatacatgtacattggttagtttcatgttcagcttatacattaccctttccaacacttgtttcacgctgtatgatcttcctttcggtgacatttcttgttcaatctctcccataactttaaacacactttcgaggacgattctcaaatagcctgatagtttatcatcggcaccaatattcaacctggtcatgccaagatttttcacacgcttgaataaattttaaagatatgaataaacacacacacacatatatatagcacctctgaaaatattccgtaagaaccgtagcttcgggtatagttgcatgtgcatcatatgtgtcatccgcaacaacgattatcatgatggtcttagccactatgatcctcccaagagaatactgtggctcgaagtacggtcccagacccccgagatggctctctacagatctatccctaatgtaaggtagtttagatgcaagatctaagtccttccaccatctgcaaccataaaaagaaaatcaattgggagatcgagaccaatgttatgaacaaggttgaagatgagaatgtcacttggtgagagttttgatttcttggatgtaatgacactggcaaaagttgaagttaagttttgcaaactttagcaggatctcgttgtaaccttcttcttgttcgtagtaagatatatattctcttgctactagtacttctatgttacagtatcgaggtatgtacaatgagttttgtatatgcttcaagatgtggggacttgcactggatacgttaccacttgtcaaagactccaagtgattccgcgtaaacctcaatgcttcatccattatacgtat

SEQ ID NO: 19240 - DNA, 1156 bp, Arabidopsis thaliana landsberg
aaaaaaacatttcatttagatatatttgatctaagaatatttcgcactagatattgatatgcagtacactgcaaatggatatgtttgaaaagttacaaaaaaatttttatgaataatatatttttggcatagaatttttatgtatgtaaagcttgaatcattcatatttttatgttttgatatttgttgtatattagtttattattaaagttcagtattttttttatggtttgagtttttctatagataagaaagatttaaaacttgtactatgtagagattgacatgcggtacaccgtataactcaaaatttaagatttaaacctttatgttgatatcctttcaaaacggaaagagtaaagatgaatatgagacctcaaatattcaatacgtgacgagagtgttaggaattttatgtgtaacttgaacgaagttaaaaaattataatgtaaatatgatttttattattatattattattaagagataaacaaaacttataaaattaatggagacattgctggaggaggatcgctataaatacaaattaatctaaaggtagtaatagggaaagttttgccaggatagacaagcaaggcacaagtagtaggaagtgaaaacactgctctgcaacaatttcttgttaggcgactgtaatctttgttatatgctaattgcaatgcatggaaacatcccggtatatagtctatgttggttctcgaacaataatttttctgagctttcgattgttgcaatattaatgcagagattaggactaacaagaaaaacatcactttggtttgttttggtttcatttttgagacgattgaaagaacaaatttttgttgtgggtttggattgtatgtagttgagatctttttttggggatctatcgtgtcgaaaattatatatatagagaacctataagaatagtttggataggagattcacattctcaatttataccaatatactatattaataaaatagtctagtcaaccaaacaggtgggaaaaaatattagttttaaaataaaattaccaaaagttttacatatatcaatcttaaacataaattttcttggtaatcaaattattatattaataccaagccgctagttcaaacttccccaattagtaatgttcaaaaaatattcc

SEQ ID NO: 19241 - DNA, 596 bp, Arabidopsis thaliana landsberg
  unsure (1)..(596): unsure at all n locations
gggcctgatctaatggcttcttttaggcccctattgctttactntatggggagacttgatttgtttttggcgtttgtatctcagctattggtgccatatgtgctgcgacagactcagtgtgtacactgcacgtgatgtgttttttccaacatgacttagattacttacaaaccctgaaacataaaggaccgaaagcacctgttcccgcagagcagtgatacacgccactaataaggacaagcacagccttatatttacaaggttgtattctgccagggtgttgtgagcgtacgcatcatctgtagaaggcttgtatgctatacaaaacgtgaggaagactgacctgatccacttaccctgcttgctaattcttagagaacacaccgaccttgcttgttcttgttgccgctcgtggtgcacttaaaaactgactacttgatccagctccatgaacagccttgcttaaccccaagagcctcatatgctctattacctttttcttatcaggttgcacgcatatatcctcaaaagctgggtaacatatactggctaaatgctggttcatgtcaaaaagaatgctttcacggttctggtgg

SEQ ID NO: 19242 - DNA, 632 bp, Arabidopsis thaliana landsberg
cgaagacttttttctcttatgactttgttaaaatttgttgacattatcgataattgtaaaaatatgaatacaacattttagacaaaagaattttaatatactcacaaggcaatgtcaatctaagatatagataccatgaggcatgtcgatatatagccatattctcgcggcatcaatatcttaaaggtggagatgaaagaaaaatcaacaaataatttttcagtgtccataataatgagtccatttaaaaagtccatgtggaaactgttttactgagccatacctatttttttggaatcaatatcttgaaggtggagatgaaagaaaaatcaacaaataatttttcagtgtccataataacgaatccatttaaatgagtccatgtgaaaacttttttactgagccatgtttttggaatcaatatcttgaaagtgcagatgaaagaaaatcaacaaataatttttcagtgtccaataataacgagtgcatttaaatgagtccataaggaaaaatgtttactgagccatatccattttttcgaatcaatatcttgaaggtggagatgaaagaaaaatcaataaataattttcagtgttcataataacgagtccatacgaaaacgtttttactaa

SEQ ID NO: 19243 - DNA, 2681 bp, Arabidopsis thaliana landsberg
ttatattcttctagtgatagtaatatatgtgtgatcctgtcattattacttgtggagacacttgtgaaggtctgtgtagaaacattatcagtgattgaaaactctagctccaagactcagaagcagctcccacatctatttcctgactcgcaactactgtgttacaggtataagcgagctggtatcagcagaattggatcactacatcattttctgtccaaggtatttctgaactaccagaataatgcttcatcgaaataacgattgctgagggctgctaatattacaaaagaaaagaccaattattcacggcaaccactagtccagcagtaacatataacgatttggctgctacaaaaatggtaaaataggaggaacatctgtgtccctgtaatcttagatgggaagttctgactctgtaagttctgattcatgggccacagccattcgctccctcgcttcacgggcctagagttcaaaatgcatccaattgaacatcgatatgtttattccaaaatagaaacaagtcatgaaagacaaaaagcaaaggaaaggatctttgaaccccagaccgagcagacagtgacaagagccagcagaagagactgcagaacagcaccggcaagaattccaaaccaaaggccaacaactctcagaagaacccagaaggccaaagacgcagcaaggggacacccccagagatagaaagctccgaagtttatgtaagcccctatatgctgccacccgcatccgcttgcaacaccttccaaccatcaaacgagggttagaagaatggcagaaaagagtacaacatgaacaggcatgacaacttggagctgtatattcgacactagcttatgtttgagaaacgaaatgggaaaaaatctcgaacctgagagaaccccttgtaaactgtccagtatgatagaaatagagaccaacggagccatctttgcaacatattcgatggttttcttgtcactgctgaaaacatggccgaaaacatgcctgccggctaatagagacatactcaccatcaatgcatccattactgcaagagacattgccgcatagaccacaatatgtgctgctcgagagtttccagctcctaactcatttgagattcttgtgctgcacaatgtacttgcttatgaacatgaaaccataacagaaagtatacttcagcatttatgtactgggtagtggtgacaaaagctctaaccttgctgcagccgcgatcgctagtggtattgaataagttattgaaagtgtttcgaaactgtccgtagtatgaataacattatgattttgcaaattcaagattgtgacaggaaatggaaagatgcaaggatgagtaccagatagagagcacagaagtctccagctgtgggttgggtaacagaccagaaagtaatattatgagttcatatgaccaccactccaggctgcaacccatatataaaagagtttctaacaaaaaatgtggaggcaatgagaagtgaaaaaggaacagagaaaagtgatgtaccaaagcatagccgcagaaggaagagcatatttgataaactctctaacgccggcgaatatgtccatggtaagcggcgcgcgtgtctaagaacaggctgaggagtacaacaagaaagatccaaggaaaatggcatagagccagcatgacatgctgagagccaaggctcctccaatatgaccaagccctgacttataaaccaaaagccagcagagaggaacatggagacagaacacaacacaagaggtgataaggagaggtgttatcaagctctggtttttgaagtaacgagtaagcggctgtagaacagcgtaagcaaacagtcctgggatgagccaagcagcaaatcttccggcttcgtgtgcaattgaagggtcttggccaaggatcacgagaagctttcccatgttgaaccataggagagagagagggagacacactaatgtaagacagaacatagctgtgtaagcctgaacacctagtttccgatatagcttagctccataggcttgaccgctgagagtatctaaggcacatgacaatcccatctagcatcaaaaagtaacagtaaagtgatgagaggatacaatttccatggttctggtagctagtaagagagataagtgcgtcaattttagtggaaaaaaggaaaaggaaacaaacaatgaagctgaagccagtgacgttacagaaggagatggcgaaggaagcgctagcgagagagagtctgccgaggtgacccacaatcaccattgttatgatctgtaacatggactgagtgataaccacggcagccataggagccgcaaagcatataagcttcttgagttctgcggtgaaagatccgtcttgcagatctctccatgttactttctcaactctgtctacaggatctttggtggtgctctctgcgtcttccatggctagagagacactaaagagagagagttgaaatttgaaactgaaagtggtgtgagtgaagaactactgtctgctttttgtgctttagtacgtgttgttctttaagactatgtacattgccacattggtgtttttatacaaaaccatatttttcatttttgtaacacataatcgtcactttattccacctattaattcaacattttaatatgctctctgcgttttatttttgtgg

SEQ ID NO: 19244 - DNA, 693 bp, Arabidopsis thaliana landsberg
aaacgaagattccaactatgagattcttgcttcaatccataaatagaacgttaaagtttgcatactttcccaggattctcaggaaatgtgaaaccttaaggttgtttcatgtacacatcctcttccatgtttccattaaggagagctgttttcgcatctatttgccaaatctcataatcataataagcggcaatagctaggagaatccgaatagatttaaacattgcaactagagaataggtttcatcatagtcaatacaatgaatattataacctttagcaaccagtctagctttgtatatatgtatattatcatgcatgtcaattttcttcttgaaaacccatttacactcaatggcttttacaccattaggtaaatcaaccaaagtccatactttgttttgtgacatggagtccattttggatttagcggcctctaaccacttatcgaagtcggggcccatcattgcttccttgtaagacgtaagttcatcattttctataatcaatagatcatgatgatccgtcattcaaaccccatatctattaggttcgtgacgcgtcctttcagacctacgtacttcaggttccaagggtgtagattctacgactcttcttaaatctagttgatgcccttcctgaataggtgaagcaatctcctttgttctcaaacttcttcaagttgtaccttac

SEQ ID NO: 19245 - DNA, 304 bp, Arabidopsis thaliana landsberg
  unsure (1)..(304): unsure at all n locations
cgtcagttggtcctatcttactacaccctttcccgcttgatcgttagcatagcatccctcaggtctcctctccctttgattttgtgttctctctgttttcctcatacnnnnnnnnnnnnnnnnnnnnnnngaagaatgcgtgaatttggatgttgtcactgtggatcaagaagctaaaaaaatcgtatccactataatattgtctagggtcgcatcctacgttatatatcactgtactaccatctaaagtacatagggctgatatctttcgcctttttgatacgttagaactgaattcccagct

SEQ ID NO: 19246 - DNA, 3888 bp, Arabidopsis thaliana landsberg
  unsure (1)..(3888): unsure at all n locations
agcgttgtctaattatatttgcacacaaggatttaagctccagatgatccatcgaacatcatcattcatcgacagacaccattgtttttactttaaggtacgaaagaaaagcttgaagaccaccaatggagaagcccctcaaaggtaggctttgagagtattagaagaaagttccttcgggaggttgaacaagcttccggttatgcgatgcagccatctccttcttcaattgagtcagtatgtcctccattgtgtactgtctttgccagtttgcaagaaccccaaacttctttgaatccacctacgtatatgcaaattcacatttcagtcacctaattcaaaagcaacaaatctcaaaaaattcacactcttaccacgccggtatcatggttgacacaagtcatgttgatacgcgaatggaaccgaacagtcggaggtttctcagggtaatctttgtcacagaagagcttcaactgataaatccgaccctcatgtacagtctgcacaaacaaaattaccagtcagatcaaatcacatcacaatatcattccaacaccattcaagaagaagacacaaagtcctatcattcatagcaagtgaagaaaaaaaaacagagatataactacgttgtgaggaccgatgatagtgccagtccaagagcgcatataaatgtcatctccatcatccattccatagctcacagttccatctccaatacctttctctccacgttcaagctcctccagcaaccggaaattcctcggaactttacattaacaacatcaaacagctcaatttttagtgaaggaaactaacacaaataagctctatattctaagcaaagcactgagcttgaaaacaatctatcaccacaacagaacacacaactctgagaatctatataataccaattgttcatatcaatcaaaagacgaacatttcagagttaaagatacataaatatcaagtatggctcatatgcagaaaaatccagaaacaaatcacgaaaattatcggttgaaattatctaagataaacccaagctgcgtttcgtgtcaaatcaaaaaccctaggaaacttaaagaggaaccaaaaaaaaaaaaatcgaaaatttaccgacaacactcgatcctgagccaagagtcatgatttgattgatgaagtgagatttgagttcgagtcgattgattgtgagatctgatgacctaaattgagaagaactgagagattctctgatgcgaaagcacaaacgctaatccgagaataaaaagtcgagagcaatttggggcagttgaattactctattggtgcgacgagaattggagtgggctactatttattttccgctacccatatttttgttttctctcatatatttccatgaatttaagatattttcaagaataaccccaaacctattttatcattcacatgataaggctctgtatgggccatggatatgttgatgggccaagaggagtctggtttatggaagaaccccatgtcctctggcaaaacatggcagagtgtttgatcacaacacttgtgtgagcttaaggagatatatgaaggttttcttcctcttagagggacttggtgaagggtatgatttggttcatactacaaagtatcgtcctcctatccctcattaatgtacattgtatctcaactccaagcacttgaacgttaaaaagtgtagaccaaatgagtgtgtctgtgaacccactgtgttacagagagacactttgatgttcatatgattacaatggtgagtcgtcatatcagtatatagtaatggaaggcatggtggtcgaggaaaaggattctcaaactattctactagaccaaggagatgtttgtttctcaaaacttttcaacaacatgatttagaacagtaacttactgaacaatatctatggaaaggctcagggtactaatctgtcagaacatgagcaaaatatttgaattgagaactgtgatttacaaattcattaccaaatctagttctcttattttctaacgaaaggagtcattaccctttaagggatacaaacaaaacaacaaacttcgctaaacttgaaaaagacttgagatgtatttatatatttgtcaaaatttattcccctgaaacatgggaacccactccttccagagagaagaaaacgaaaaacaaaaaatctcgagtgaacaagattttgagtaaataatggtacattgcaaagagagagggcttagcttattataagttaaaagatgatgaagaattaaatgagagcttgaacacccgctctcaacatctctctgagcctccaaatgggataaatcgcatcttcccctaactcagctgcatccacttgttgcatagcccagtcgtagtacactgtgtgtattgtgtcctatatccaacacacaacaacaaattcttaaaaaagttgtggcattgcccatatgtttatgatcttgattcaatattcccttttttacctggcctccttctttgatttttccattctgatcacggacgcagaagatttcttgcgtttggaactgacatcacatcaaaaacgataaatccatcagacacaattcttagctaaaggatgacctcagaaggaaaacaaagatcattaccctgacgatgattactggagtagttcccatcatctttgtctcttgaatatcaacttcagatacatgcagaagctgcacatcacagccaaaacgattttactcaccacaaaacgaagcaagttactcagtgacttacatgatttcataagaaccaggatcccgtgggtgaaccaataataaagactttaccttgtgatcgaaaaaataaccttgactcgtgaaagctctgtgctctgccgtacaccgttcaatcaattccttgctgcaatacttcttcaaggtcttagcatctccctgtacaaggatgggaactaattagaggcaacaaaaacgagaatgggaggagatgatctattcaaaaacctgagatataccttactatatgcattcaagaccggtctgatggcttcctgaatttctgcaacaaagtccggcaaggagaatgatctgaccatgaaagagataagtatatgattaccagagtcatatcttcataccaataatcagcctctataacttacggatctcggcggcggatctccttgtaagtcgatgcagaacctgtttcctcaaagatcctctcattcatgctgccaaacaaaagaatgcatatgtctctaagctgctgtaaataagtaaaattttaagaaagatatagtaatagaacaattagcatactcctgaatcttgtgaacaatcggattatcactggtttcccacttttccctcacatcttctgcaatctacacggtccaaatgcattcccaatctacaataacaaagcagtatgagcgaacacagtaatgcaagataaggtatttgaacaaaatgagtaaaaagaagatgttcattacctcttggctcttgttgacaactggctcactcatcccgcttagacgtttaaatacaggatagccttgcatctaaaccaagtttaaggaaaacactcaacaagggcctgaaaaaaatcgcataagtagacaagacagagagggccatttaccttttctcttaatgattcccattttttttgccacttagactgttttgttgnnnnnnnnnnnnnnnnnnnnnncgtacttctctcacctgtaaatggcggcggaggtgtatactccaggtgcttccttttagatgggtttccacgcaattcatcctttacaatgtcaagtcccttctttgcaaagtcaagaggcttgtgaaacgcctcaaataagtttggtgaaaaaatgctggacttgaattttcaaaaaatgt

SEQ ID NO: 19247 - DNA, 1726 bp, Arabidopsis thaliana landsberg
gaaaaaccctgtctttcctcgatgcctactcagggtatcatcaaatcaggatgaaagagtccgaccagctcgcgacttcttttatcacacccttcggcatgtactgctacgtcaccatgtcgttcggcttgaggaatgtgagcgcgacgtaccagcggtgcatgaaccatgtgttcggcgaacacattggccgcacggtcgaggcctacgtcgatgacatcgtagtcaagacgaggaaagcttccgacctcctttccgaccttgaagcgacattccgatgtctcaaggcgaaaggcatcaagctcaatcccgagaagtgtgtcttcggggtgccccgaggcatgctcctggggttcattgtctccgagcggggcatcgaagccaaccctgagaagatcacggccatcaccagcatgggacccatcaaggacttaaaaggcgtacagagggtcatgggatgcctcgcggccctgagccgcttcatctcacgcctcggcgaaagaggtctgcctctgtaccgcctcttaaggaagaccgagtgtttcgcttagacccctgaggccgaggaagccctcgagaacctgaaggcgctccttacaaaggcgcctgtcttggtgcccccggcggatggagaagccctcttggtctacgtcgccgcgaccactcaggtggttagcgccgcgattgtggtcgagaggcaagaggaagggcatgcattgcccgttcagaggccggtctacttcgtcagcgaagtgctgtccgagaccaagatccgctacccacaagttcaaaagctgctgtatgctgtgatcctgacaaggcggaagttacgacactacttcgagtctcatccggtaactgtggtgtcatccttccccctgggggagatcatccagtgccgagagcgctcgggcaggatcgcaaagtgggcggtggaaatcatgggcgaaacgatctcgttcgcccctcggaaggccatcaagtcccaggtgttggcggatttcgtggccgaatgggtcgacacccagctgccaacgactccgattcaaccggagctctggaccatgtttttcgacgggtcgctgatgaagacgggggccggcgcgggcccgctcttcatctcgcccctcggaaagcacatgcgctacgtgctgcgcctccatttcccggcgtccaacaatgtggccgaatacgaagctctggtcaacggattgcggatcgccatcgagctaggggtcagacgcctcgacgcccgcggtgattcgcagctcgtcatcgaccaagtcatgaagaactcccactgccgcgacccgaagatggaggcctactgcgacgaggttcggcgcctggaagacaagttctacgggctcgagctcaaccacatcgctcggcgctacaacgaaaccgcagacgagctggctaaaatagcctcagggcgaacgacagtcccccggacgtcttctcccgagacctgcatcaacccaccgtcaagaccgacgacacgcccgagcccgagaaggcctcggccgagcctgaggcacccttggctcagtccgaggtaccctcggctcggcccgaggcaccctcggcccaacctgaggcaccctcggctcagtctgaggtaccctcggctcggtccaaggcaccctcggttcggcccgaggtaccctcggcccccgagggtgaggcactacgcatcgaggaggagcgaagcggggtcggagca

SEQ ID NO: 19248 - DNA, 1129 bp, Arabidopsis thaliana landsberg
gtatagaagagttcacaaggcgtcgtgaaaggctttctcaagtccaaggatggcttacgaatgtctcgaccgtcgataataaattcaatgaactgcttaccactaatgacgctgagcttcaaaggttgtgtctctttggattttgctctaaaaatgtgaaaatgagctatctttatgggaaaagggttgtcctgatgttgaaggagattgagagtcttagttctcaaggagattttgatactgtgactttagccactccaatagctaggattgaagagatgcctattcaacctacaatcgtaggtcaggaaacaatgctcgaaagggtatggactcgtctcacagaagacggagacgagattgtgggtctttatggcatgggtggagtaggcaaaaccacccttctcacacgaatcaacaacaagttttctgaaaaatgtagcgggtttggggttgtgatatgggtggtggtgtctaagagtccagatatccataggattcaaggagacatcgggaagagactagaccttggaggcgaagagtgggataatgtaaatgaaaaccagagagcccttgacatatacaatgtccttgggaaacaaaaatttgttttgttgttggatgatatatgggagaaagtgaatttagaagtgcttggtattcccttatccgagtgaagtaaataaatgcaaagtagcattcaccacccgagatcaaaaagtttgtgggcagatgggggatcataagccgatacaagtcaaatgtttggaaccagaggatgcatgggagttgttcaaaaacaaggtcggagacaacacattaagtagtgatcctgttattgtggggttggcaagagaggtggctcaaaaatgtcgtggtctaccattggcgctcagtgtcattggtgagacaatggcatctaaaactatggtacaagaatgggagcatgcaatcgatgttttgactagatccgctgcagagttttctgacatgcaaaacaaaattcttccgattctcaagtacagctacgatagcttgggggatgaacatatcaagtcgtgtttcctatattgtgctctgtttcctgaagatggtcagatatagaacgaaaagttgataaactactgga

SEQ ID NO: 19249 - DNA, 110 bp, Arabidopsis thaliana landsberg
gaaaaagtgataagaatgagaggtgtgtaagcttttcatcatcctggcgtcgagctatttttccgcaggatcttctctacagtatcgtcaccgcagaagagtttaaccac

SEQ ID NO: 19250 - DNA, 454 bp, Arabidopsis thaliana landsberg
cacctattacacaatataccgttttgtaagtttttgtatagcccgattgtatgttttaattttgtaaaaggttaagctttggaaacatattttatttttgataaactataaaaaaacataatatgtcatcaaactcatagacaagaatgttcgaaaccgcatcagcgcaatcaaagacttgggagatcatctatatgatgacggcaagagtttgtggttctctacttgatcaactccataaataagacctcgagactcacttccaataccttcttcacttttgatgttttttcctaatttttcaaacaaactaaagcattcattgtacacaacaagtctttttggttgaatatatttctacattcaattgaaataaaaaaacataatctgaaatttatactgcctatcggataaaaccaaaaaaaggccaccaagtgatagcgctccttatcct

SEQ ID NO: 19251 - DNA, 1894 bp, Arabidopsis thaliana landsberg
  unsure (1)..(1894): unsure at all n locations
ccatcttctcgatcatgtcctttgcttagcataatatttcttgttcggtttatcgatctcctaatttgcaacgtggtcactttgccacatcactttgaagatgaacaatctacaagctgacaaacgtatctaatgtgtttgtccgtatgttaagtttatttctgtaattttgaacacatgtgagaattttcaaactgatttaattccgattccaagctatacgtaagaaatttcaactaacgtggattacatacttttctttgagtccgaatacaaagacttcacattctattttgttttcttctttcgaaaccattaagggctactaacctctcgaatcgacaaacgtatccaatgtgtctgtcgttatgctacgtttatatctgtaattctgaacatatgtgagaagagaaattaccaacggatgcatgtgattccaatcccaagttatacgttaagggattttaagtaacgtagaaatcacttcatgattcgagtggcccttagctgcttgaccatacttttgttctagcccgaatacaaaagacttcacgtatagctttaacattttctgagtcaaattgtgcacaaccacatatctgtatttatacccttcttctctctcacatttcttaatccaaaatcattcttctaaaagatatttccagacaaccatgtcaaaggcgattttgcatttgcattttctttctctgctcttactctgttgtgtctggcattcaagtatttttactttaaattttcgttntactggtattgtggcctgtcgtccccaccagattcaagcctacactaagttcacgaacgagtttgacacttcgcgttgcaacaacagtgacacctttaattgagtttggtgcgataactcgacgggtccggtcgcagtgctacaactaaggaagtgtctcagtggaactttgaagtccaacagtagcctcttcgggtttcatcaacttcgttacgttgatctccaaaacaacaacttaacctcctcttcactcccttccgggtttggaaatctcaaaagattagagggcttgtttctttcctctaatggcttcctcggccaagttccttcctcattcagtaacctaacaatgcttgctcaattagacctttcttataacaagctcactggtagtttcccacttgtccggggtctaagaaagctcattgttttagatctttcatataatcacttctccggaactctgaatccaaacagtagcctctttgagttgcaccagctacgttaccttaatctcgcttttaacaactttagttcctcactcccttccaaatttggcaatctccatagattagagaacttgattctttcctctaatggcttttctggtcaagttccttccacaattagtaacctgacccggttaactaagttgtaccttgaccaaaacaagctcactagtagtttcccacttgtacaaaatctaaccaacctctccgaattagacctttcatataataagttctttggagtcatcccttcttctctcctcactctgcctttcttagcacatcttgctctacgtgaaaacaatcttgctggttctgttgaagtttcaaactcctctacctcatctaggctcgaaatcatgtatctcgggtctaaccattttgaaggacaaatcctagagcctatctcaaagctcatcaacctcaagcatcttgacctttctttcctaaacacaagctacccaatagacttaaaactcttctcctccctcaaatctttgcggactctggatctttctggaaacagtatatcttcggcccgtttaagttcagattcatacatcccattgaccctggaaatgttgaccttgaggcactgagacatcaacgagttccccaa

SEQ ID NO: 19252 - DNA, 1272 bp, Arabidopsis thaliana landsberg
  unsure (1)..(1272): unsure at all n locations
attcattttcaataattgacccgacttttggaattatgttccatattattaaaatccttatttggaatcacataaattgcaaattatacattcacatttaaattattcttggtgaattattacacaattttgcatactgcccaaaacctaaggagggtaatgttgatgaatgtgaccaccacccatctccactgcttcaaagtgatatatatactttgctgccgatattatatatgtctccctttggcttatatactcatcaatctcctccctacaagatgatatatattcattaatatttatataacgaatacgtaaaatagacaaatataaaatatcagaaacaaagtggaaaattatttttaacttaggaagtgatcaattattgatttattttaaagtgatgaattgtgagtaccgtattctgaccaccaccacctcgtctacttcttgatggtggtgtttctactgctgtattgggcttataattcgccatcattctcctcccttcattttagtcttaaagatatttattctttctttttgtgaaaataacaaaagtatttattctttatttaggtagacagatataacattattgatatacaaccaaattttatagaccacacattatagctgtcaaaagaacaaaaacaaaaattcacaataatattgattctttgtaattatattttttcaacaaattatatatatttttaaccagaattcatttactaaaatctagataaatactgtaagcttttacatttacatttcttttaactaattgttgatcacttcttttaaagatgaattgtcaacaaacttttacatttcttttaactaattgttgacaaaaaaacgtttattgacttataaaatctcaaatggccagaaatacatattttgttaatgttaattagattttatttttgaaaaaaaattagaagttactttgcaataataataaattagttttctatgtaattaaaatatatgtcgaattcattaccaaaatatatatatatatatatatatatatgtcgattttttttatagattaacagaatatgtcgttttgttcatctagtagaaagtgttttatggactctgagataatgatcaaattatataaagatgagattacatcgacaaacccagtatgtatgtacaattgaacaagtctatgtcattcatgagaacttatnnttctgtaatttagaatattttcatggaaccctctgtcaaatttacttttatctagaacttcat

SEQ ID NO: 19253 - DNA, 483 bp, Arabidopsis thaliana landsberg
tcatcctcggcctccgcaagctgagggccctcggagtcaccacctgcatcatcaaaacagactccaaggtagttgccggccaagtcgagaaagactatgcagcaaaggaccccgcgctcatgcagtacctcgcggccatccgaagtctcgagaggcaattcaaggggttcaccttgcagcatgtggatcgggccaagaatgaagaggccgacgcattggccaaggctgccgcaaggggcgaaattctgccctccgacgtgtcctttcaggtaatcggaaggcaagcgttcggaagcccgaaggtcccaaatatacaaacgacagcgagggccaccgcatagtcaaccttatcaggaccgaggactggcgagcaccaataaccctgttcctacaggggtattatcatccagccgacatcagtgaggccaagcgcctcaaacatcgaagccgagacttcgcactgattgaaggccgggtacgagc

SEQ ID NO: 19254 - DNA, 1495 bp, Arabidopsis thaliana landsberg
gcagattcatgggtaatccttatgctatgtgtgtttttaattagtagtacttcatgtcttctctctcattttaaatatatttttgtaggggtttcatttaataagagtttgattcatttatataaggggtttgtgcaaaaaaaatgcttctaactcatttatgttttgcaactttaccctccatctccaacaaatgcagattaatcttttgaagtctaaaacaatacgcaatatgacccttatacgtatattgtagacgtttttacgttcacatatattagatatttaaaattgtgaaggtagagttgaacacttcgtcaagagagctttgatttaacataatatatgtcaatattttacaaaattgatggtagcataagaagggcgaaaaaaggttacaataaatattattttagacttcatagtattaatttgcatttgttgaaggtggagggtaaagttgcaaaaatagatgagttagaggatcatctttccctttatataaccatgactttctccggcatcttgaggtggctcgcttgatccttaaacgatcatcttttccataaaaaattgacatttttattccatataacttatacaatcatttcctgtagattgaagctcatataggttctgtaactaacatagctttttcgcatccccacaaaaacaaccaagtatagttagttgtggagatgacaaactaatcaaggtgagacacgaacctaaaggtggtttggttatcctaatgttaacctgtcagttgtttaactatttggtgtaaaacaggtatggggatcttgagggttgggtttattatacttttcatggtcatgaagctcctgtataatgtatattcaatttgtctacatgaaagagaaaatttttaaggtatgtagaattgtactcatagtttagtgcttcttggatgagtcaaaattaatattcttctcttgatttcagttcattcgttcaactgataccaatgggaacataagggcgttgtattatgatacaaagtgttcaaaagaaaaatagaaatctccaagtggctgatgtacaacattgctctacaatgctgatgggaacaggctagagttgtgatttataagatttctcacttcaaactctttcaacaaacttcatatctatccacatgtaactataactattatgcattttctttggcaggttgttttgttgtgtaaccagtaaactgggagactcatccctcatgcagatcacagaaaagaaaggaacagtaaagagaatttatagtgggctgactaataacctgggaggcgtggttcagtttcagtcttcaaaagaccttcctagcagctggtcaagatggactgatcaagttttggcatatggacagcgtcgatcttctgagtacatcagatgccaatggtggactgcaggatttttcgagattgcggttcgacataggaggcaacattctagctgttccacgagggatggttttatg

SEQ ID NO: 19255 - DNA, 469 bp, Arabidopsis thaliana landsberg
catatattagtaatatttaaccgtttatcaaaaactccagtttgattaaaagagtttacaagaaataacaaagctgttttaatagtatcccatgctttttgaaaaaataaagctttcataccatctggacctggtgacttctccgggtgcattaaaaataagccgcacacacctcattattagtcgcggggcccgtcagaaaattatttctttgatctgttattaatgtctgaacctctgacaaggaatcctcaaaatcatgaggattagtcgaagtgaacaaattctcaaaataagacactgctatgtgctgaatctctttatcctctacagaccactttccattctcatcatgtaacccggttatccgattcctaccttgtctctgattagtcagagcatggaaatatttcgaattattgtcccctagagtcatccaaagacttcgacttttttgataccaatattg

SEQ ID NO: 19256 - DNA, 716 bp, Arabidopsis thaliana landsberg
attttttattcttatgttactagaatatttgcattaatttgtcattaaaataactaccacatattttcagtcaactatattaaccaaaattacaagttattacccaattaacaaaattgaacacctaataatcggaccttaccttaagtatttggaaaattagtcatactaattattattatctttattttctgtcgtatataaccaaaaagttgtatatatacaatttaaaacaaatatcttattgcatcatttcaaacatatataattttatgaaagattagtgaaataacatgcctaacataatcctaaaagtttaaattaattatatataaaaagaaaaaaattgtataaaactaaaactttggattctcctccgattttagtttttgatccaattattatttttatctaacaaactgcctaaatcaaaagatttcaaaaatattaaatcacttttttcaagttcaaatatttcacaaatggaacgtacttttacacgaaatatacgtaaatttaaataaaacaaaaaatttaattacatattttggtatatacaaataagtgtcagatcccacataataattttagatataatagtttaattcaatcgttttatcccgcactatgtgcggggtctttatctagcttcattatgggttaagaagcaaaaataattaattaaaccatatttttccccattatccttaattttc

SEQ ID NO: 19257 - DNA, 2245 bp, Arabidopsis thaliana landsberg
  unsure (1)..(2245): unsure at all n locations
ccttggagagctctatacggtcggcgatgaggcctcggattcgtacacgtgtcgctacgttgggcccgacatcttgagcttgagctaggtgtagttggagacgaccatgaacttggcgtagcgtggcgtccccgaccactgcgtggtaggttcctcggaacccgaccacctcgaacgtaagggtctcccgtcggaagttgcaaccaatcccaaagcagacgnnnnnnnnnnnnnnnnnnnnnnnnnnnnnnnnnnnnnnnnnnnnnnnccggtggaaaggcgcagacctgcccggaccaaggatagatcgacacgcaggagcccgagggtctcagcgtagatgatgttgaggttgctgcctccgtccatgaggaccttggtgagcctgacgttgccgatgacggggtcgaccacgagcgggtatttccccgggctcggcacgcggtcggggtggtcaccctggtcgaaggtgatgggcttgtcggaccagtctaggtagactggcgccgccacctttaccgagcagacctcccgacgctcttgcttgcggtgccgagccgacgcattcgccgcatgccctccgtagatcatgaagcagtcgcggacctcgggaactctcctgcttggcgatcttcccttttgtcgtcgttgcgggccctcgcaccctccgcgggtgcccaggcccggtggaagtggcgccgaagcatgacgcactcttcgagggtgtgcttgacgggcccctgatggtaggggcacgtctccttgagtgccttgtcgaagaggttagcacctccggggggcttccgagggttcttatgctcggtggcggcgacaaggtctgcgtcgggagcgtcgcgtttcgcttgcgacttcctcctgcctttcttcttggcgccgcgcggagcagacacctcgggagcatcttccgacgggcggccctggggctgcttgtcctttcggaagatggcctcgaccgcctcctggcaagaggcgaacttggtggcgatgtccatcagctcgctcgcctcttgcgacccaacttactcaccaggtcgcggcaggtggtgccggcaaggaacgtgccgatgacatccgagtcggtgatgttgggcagctcggtgcgctgcttcgagaatcgccggatgtagtcccgaagagactctcccggctgttgccggcagcttcggaggtcccaggaattcccggggcgcacgtacgtgccctggaaattgccggtgaaggcttggaccaaatcatcccagttggagatctgccccggaggcaggtgctccaaccaggcgcgagcagtgtcggagaggaacagggggaggttgcggatgatgaggttgtcatcgtccgttccacccagttggcaggccagccggtagtccgcgagccacaattccggtctcatctcccccgagtactttgtgatagtggtcggggttcggaaccgggtcgggaacggcgcccgtcgtatggcgcggctgaaagcctgcggaccgggtggttcgggcgagggactccgatcctccccgctgtcgtagcgtcccccacaccaggggtggtagcctcggcgcaccctctcgtcgaggtgggcccgacggtcgcggtgatggtgctcgttgccgaggcgacccggggccgcaggcgctgtgttggcgtgcgcccggtgtggaccgaggcttcccgcatgaatcgggaagtcgcggcgcggtgttccgaggggtacccctgcttcgggaggcggagctttcggcccgtcggaccgcggcgtcctctaggagattcttgagctctccctggattcgccgtccctcggtggttgatggctccggcgtcgcgcggaggagcattgctgctgcagccaagttctggccgaccccactagatgcgggtggcggcctgaccctgacatcgtcggtgatgcggtgctggaagccctggggtagatgacacatttctccggccggaggttggcccgcccatgcctgcccgacgtcccggcggattggctcaagcgctcctgctccctcgtcaagcccggcctgcaccccatggatttgctcgagctgtgggtcatggccccccgcctgaacggggaccacagctagctcccgtgggatgtcaacgcgaggcaccggcctagggagatcaccatcccccgacatgccgagatggttgcctttggagggaccccctagatcgacgtggaaacatgtccggcttgggcgcagtcctcgtc

SEQ ID NO: 19258 - DNA, 1545 bp, Arabidopsis thaliana landsberg
taaaataaacttatttgacttcataaatgttgggttgtgcgtataccgtgtcgttagttggcagcgcattaatcccataaaatatatttagttcaaacctataacggcggatattatatacttatgtatagattaatttcaatacaagaaaacagtcgttttgcgaggaacaattgcgagggaattgcagctttttgctacaccacggacgaacgttgctaaaccctcgcaaatattgcgagagacagcttcctcgcaaatttgcgaggaatgtacgagtactttgcaattaacaatatcaaccctcgcaaaccactcgcaaaaatctcgcaaatctttaccctaaaccctaaaatacatagaagtgatttgggatctttgatttttatttataaatgtaaatctaaatgactgtataatcatacaagttgattatatggtgatgcacaaaaacatattgtatatgtttcaatatcaacatttcataatgaagatgttaaacactctttcatcatattattgaaaacacataagttcatcattgatgtatttgggaaaaatgcacatttgaagtttttgagatgaaattagattctaatgtagatatttaacttcctaatgattcagaataactaatccgaataattttaattagtggtttcttgtattttttcaaattgactcaacattgcgaggtatttgcgagagatttgcaagtctgtcgtagcagttccctcgcaaatatttactataaaccttaaattatttaaaatatttactcatgtttttatttgctgagagtcttattcgaaataggagaatctaaatcagatctgattcaaacactgaatcaaaatggtgagttaattggttgaagaattgcgagggaattgctaggcccaaccgcacttccctcgcaaattttaccctaaaccctaaattataaaaaatcataaattgcgagggacttgctaggagttctggcaaatccctcgcagtatgtggtgcgttttaattggtttaaaaatcttcctcgcaatttcaaagcaatctatgcgagggttttgcgaggaaatatatatctatatatactcgaagacctagtttgagcaaagctcaaaccagccgcatcaaaccctaaccctaaaattcttcttcgattctctttttcttctctgatctcttcggcgccggatctcttcttctccgatctgatttcgtcagcgcatctcttcttcttctctaatctgttatactcattgccgcctctcttcttctgcgatcagtatgcaatcaccgtcgcgtctcttcttctctgactcgatctattttgcctcaaaggtaacctctgtttctccgatctaagttcttctctcaaatctaacttcttcttcttctccaatctttcttctttttcccaaatctaactcttgatttgttttttgtgcaagatgccatcggataatacttatgtacggtttagacaaacatcagcgtgactgtttgcatgtcaattcttctgttagtggtgggaatatctcagag

SEQ ID NO: 19259 - DNA, 1291 bp, Arabidopsis thaliana landsberg
gacccgcattactattcatcaccaagctatgaacttatccatgctctaatactactctttcaaaactattatttggtaagatcataaaacaggaatcatgagctcaagcaataactctaactactccacaagattatgttaccaaaccaaacaaacctattatcagatcatctataccggttccttcaagatctcatctttctcgatttctcttctaacttgtgcataattcgtaacaatcgaacactaaagatagagcattgagaagcaaaccaaccgaatactgcaacagaaagccagcgaagagctccttgggcatcgataaagcgccacgaagatcatcaagggtcaaagtcattcccattccaagcatagtggatcgtaagacctacaatggtccaatttggagtaacccaattgaaagtacttggtctcatcagtcccaacaagcatcccaaagaaacccatatcggaaacgccgtcgaaaccgcctcttccacaaactcaacccactccccaaagctcttctttttctcagtaggcaaatcgtttgacgcaatgccgcaacgaggaacgaagtcaaacctcttacgcctacacgtaataggaacagtagattgagttttgagagaaatttcgcgactcgagggagagtaagatagtctagaacaagagatagttcgaagatgaagtggagtgagtctagatttgtggagcgaattcgatttcaaaggcgttgctccgtttaagagagaaagagaaatcgccgacgccattttcttttctcaccggcgattctctctctctgatcggaccgatgaagaagaaaccaaaacaagtactcacgtggtctcacgtgccttttgtcaattaaacacgttgtttgctaaaatggtccctgaattaaatttgtttctctactctacccccgttaaactatttttcacacaaatcatccaaggcgtctttagatgttaatgatcaaagaaattaggaaaatcaaatcaattacaaatattttagttaatcattcactctcacaagatcacaagtgacaataatggaatgtgtcggtgatctctaattaagcatatgggcaagtgcaataaatgattacatatcccatattaaaagactattattaaaatatagtaagaatatcattacaaatacaaattcgattgctatctaatgacgaaaatgaccctagatcgtaaatgaaaggtttgagaagttgagagccacacatggtacctaacacgtataccacaatcgcaaacgtaaacgcact

SEQ ID NO: 19260 - DNA, 287 bp, Arabidopsis thaliana landsberg
tcaccatggcctgttcccggattctgtgtgccgcttgaggtaagtcacatgttttatcactgttacattttcgtaattgaagctaacaattaaatttaaatgtgttttgtgtagtttttagcatttgaggtcattccatcacttagggaaagattcatagaagaaaaagagggtgcacatgctagttgtccaaggatgtgcaaagtgaatttcaagaggatcgagatgaaaaggtttacccttgagcaaatcaaccatgtactgggaacaactgaggttagtatctc

SEQ ID NO: 19261 - DNA, 778 bp, Arabidopsis thaliana landsberg
taagaacaaaggttgatcaaaggagtggaatatcttgagagaatctattaaagccttgaaaggtcagtttacttctctcgtacgtctattacgtttctcgtacatttgaaatggcattttaaagtagaagtaattattattttcaaaaatgtaaattaattagatgctattttctaattttcaaaaatgctaactaattagatgttaaatatgttaactattgatgtggcagctctcgattggtcgttctaaatcctatgtagacgtctttaaaaacaaataacttcaacttttatgataataaatatatctttgatggatttttttttttgattagttaaattttgtttattgttaattattttgttaatatcaacaaagaaatatatatgatctgatataaatataattttatatataatttttttaaagtaaataagtataatatttagatgtatattaaatagatagtttatttaaatatctattttctttagttaaaattagcataatagtttttgacgactatttaaatatctattttattttactgccacgtgttataatcttgtgagttagtaacttttgaaaccttactttatataataagattgatatagtttttgacggctatgctcgacttaatttttgagattttttttttttttttttttgacgtttttgagatatctaaactcaagtttgttaataaaccaaaagtttggtgaaattaatacaaaaattttgttatcattgaagtaaagttaacaatgattcc

SEQ ID NO: 19262 - DNA, 704 bp, Arabidopsis thaliana landsberg
agcgaaagacaactactttgctgaatggtgtaaagactatgtaagtataattagaaaataaatattgttaattaatataatatgattacgtactttataattactacctataatgtggttcaatttcagattaacgatgccacaaaatcttatcaatttccattatggatgttggatttcgtgcaaggttctaaccgtaattatacaacttggcctatataccactcacgaggatattgtcttcacacgcataactatggaaaagataagaaaactcaaaattacggtgtctatgttcgtggaaccactaacacggattattatgggttgatagaagagataatgatgattcaatatcatggtgttgttgggttaaaggccttggttttcaaatgcaggtggtttgacacaactatagatagacgaataaggaaacatccatcacgtcagaattcaatcttcttaagagcttttgctctttgagatttatctatttggagatatctctctttgtctatgtcctcaatttcactccgtctctagggtttagatcttttgttcatgtgtttaagtttttcagggtttccatttcatgtatcattcattttttttgttattagtttatagtaacttttttaatctttcttttttcaagagctaaaccatcgaagggtacctcctggagccgtaccaaatggaactgt

SEQ ID NO: 19263 - DNA, 360 bp, Arabidopsis thaliana landsberg
ctgaagaatctcttaactatcaaccccacctgatcctcactcacagttggtggaacttcagcagccttttgagcctggctctttcctgatgaacgttccttcttcttcatttgcagttcatatgcttgcatcattcccacaacttgatcaaactttagagtatcagaatcaagtgacacatcgattgctgacttgtgagattgaaacttatcaggcagacttctgagaaacttcttgaccagcttcttgtccttgtacctttttcccaagacgacagcttactaggaaatttaactcagccgactcctgaattcctcaatcgactctttattcttcattgtcaaagttttcaattcagac

SEQ ID NO: 19264 - DNA, 1871 bp, Arabidopsis thaliana landsberg
  unsure (1)..(1871): unsure at all n locations
caaggtcaggagaagttatcctttttgctcttcaagatcctctgtttatgccctcgaactgaccttctgcaatctgtttcagggaaagttacaagatgggaaagaaattgctgtaaaacagctttctagcagctccggacagggaaaagaggagttcatgaatgaaatagtactgatatcaaaactccaacacagaaacttagtccgggttttgggatgttgcatcgaaggagaagagaaactactgatctatgagtttatgttgaacaaaagccttgatacttttgtctttggtgggtcacttcttggtctttctctttttgttttgcagctttttctccctataccggaatttcttatctgataacttgtatatggtagatgcaagaaaaaagctcgaggttgattggccaaagagatttgatatcgttcaaggtattgcacgtggacttctttatcttcaccgtgactcacgcctcaaggtaattcaccgagacctgaaggtcagcaacattcttctggatgagaaaatgaacccgaaaatatcagattttggattggctcggatgtatgagggaacccaatgtcaggacaaaactcgcagggttgtaggaactctgtaagaacctgtctttaataacatgcttggcaagattcattgtcatgttagtccaatattaaactaggtgatatgatactattttatttttgaccagaggatatatgtctcctgagtatgcatggaccggagtattctctgagaaatcagacatctacagcttcggagttctactgctagaaattatcatcggagagaagatctcaaggttcagctatggcgaagaaggaaaaacacttctcgcatatgtaagttaattctttatgttttcacacatttacaaaggatttcaaaagtggttcttgctctgatactctttaagatatgaaactaaacgtctaaacaacaggcatgggaatcttggggtgaaaccaaaggaattgatcttttggaccaagatcttgctgattcatgtcgggcgttagaagttgtaaggtgtgttcagattggtctgctctgagtacaacaccaacctgcatacaaaccaaacacacttgagttgctggctatccttaccacaacatcagatcttccatcaccaaaacaacccacatttgtagtgcactctagggatgatgaatcatctctgtctaaggatttgtttaccgtcaatgagatgacacaatctatgatccttgggcgttaagaaaccaccgtgatggaaattgtactactgatgttgataacttcaattttattatcatttttttttatgaatgttgaaatcttcagaactgatccattcttttattgcgtttttttttcgttctttaagaaaccatttagttggtgtattacccatggttctttaagaaaagctttaaagttgcgctttaggcttacaagttactgattctgaggctgacacagtgtttcaagctaaggattcatttcgttgggtccaactggtgaaaattgtttagaggtgcttattttagacgagtcatcactcatcactacttcattattgtctaagaaatgtctgattaattaaacattgatgtatctttcacagattaggtcaatcaatgcgtgattgattgggttaaatgtcgggttcttaaagtcagattgaccattcgattgatgcaagagtatatattcctatcattgacaagaacatgaaaatgacaatgttgctatgggagaaacagattgggtaaaaacgttggactttttcgtggccattacataagnattatatttattttctattactatattaagcaatgcagaattttcgacataagtc

SEQ ID NO: 19265 - DNA, 2619 bp, Arabidopsis thaliana landsberg
  unsure (1)..(2619): unsure at all n locations
acgtgtacaaagctggaattgaggttttacgtttgaaacggatctttgattggatcatctttttttctctatgaccgtttgaagaagaccgtttgaagaacaattataacgttccaagtctctctctctgatttctctcgttatttcgaatccctaaatttttattttcggcaaacatctgaagaagtttatgatcaccgacgattgttttctccggcgactattcgacgatcagacaatcgattccctaattaagatggttttgtttctaattttgtgtttctttctattaatttgattcgagtactattacgatgtctctctgttacttcgtttttccgaatcgtgacgttaatccatctgcttttatgagtccagaggttgattgattttgtatttcatctgatggatacttctgatttgtgattttttttttaaaaacttttaattaggttttgaaagatcattaacgatcgcgagactttacgattgaggggattttgtttggatggtcgtagcatcaccgacggtggaggatggcggtagatacggagggcggtggagagccgtgagggatgaagttacggaggaagcggtggtcgtggctggtaatcgtaacaaagtgggttttgtggctctgtttttggtctacatattgctcttgttcttgttctgattcttttggattactttttttttttgatgtaacagatcgttgaagtcttctttgcctgaaagaagaagaagaagacggtttatcttcgctctttgtgattcgagtttctcttggtaaattgaattcccaaagtcagaagttactttgaaattttagtggttttgttaattttgaaggtctaatcatctgtgatctctctactctaagagaagattatcaaagatatgagttccgcttctctgcatccctttttcctggttttgatctttctcagaaattttcttttatgtgaagattaactataatatggtgatgatatcatggtttgggaatcaaaacaaattcttttgtctgtatagaatgcatcaaagttgtatatttagtgctcttgttccttattggatacgttcatttgatcatattatatgtagaactttaggttcaatatcattcctattaacatttccggttcaaatttgattttctctagattgtttttggtaggatgtcaatctattcactttctggacggaggagacactaattgaggacaaatctttatcattttgcacttgtaatggagaaagatggagaagattgttttctttctacaaggtatcatctcgagtcactagccacatgcctgagactggttccgttttttctgtaaccaaccttatttacttataagtgctgtgttgcaggggattctttcaggttcatataattttagcaagctggctgtgtcagttgaagcacaacattctgcatgtcgtgttcaaattcagttgctgatgattcttatagaaacattggatatggagaatctgttacaaatggttcacgacggagtacctttcaggtttgtttaactaattggcgaggacactgcacaaatagtctcaaactttcttcaaataggatacaaaaccagcaatttgtcttatcctactttctcctgaatatctgtcgatgttgtctaaaggttctatatttcttataaggtctggcacttgtgtcttttccattgttgacgttcaagagatggatgcaacaatttcaagccttaacacttttgaagtaaaagaagcaggacctctcgtcctggcatgggcagtattcctgtgtcttatttcatctcttcctgggaaggaggaaagtcctttcctgatggtatgaaagtgagaatacttccattacctagtcagaggacacattgttcatatatgtgcattatactcggacttgattaccaggatattgatcacgtgagctatgttcatcaagcctttgaggcagcatccttgagctatttccttgaaatccttcaaagtaatctattgaatgatttcgatgtaagttcgagataaaaattctagatacgtgcttaactttgtctgttttcttgagattgacacttatttttctatcaaataatggtgtgagatctatttcaccaatcctctgcaaattttattcatggtatccttccctatgctgattctatcattatttttcactttcccagggaccaatttctggtcatcgtagtgtcgtgaggacttttatttcagcatttattgcatcttatgagatcaatcttcaggtaaaactctattatctagagatgataaattatctaattatgaagtgtttaaaagtcttagtcatctttacatttttggtagctggaagatggcacnnnnnnnnnnnnnnnnnnnnnnnnnnnnnnnnnnnnnnnnnnnnnggtaaaaatcatatatgcatgttgtccctagctttttcctctatgttagacatccataaatgctcattgtgtgcttaattattcaggagtccctctgttgtcagttttgggatcgaaaaagtttatattgatggccctatccggtgtctcctctttgatctggagagtgaatttccattcagaagtgctgaattca

SEQ ID NO: 19266 - DNA, 1926 bp, Arabidopsis thaliana landsberg
tcagacagtgacgctttttaccggtgaaattggtgataggtagagaaagagcagcaagagagtttctgttgcagattgaaagaggtatctctcctgagaaattattataacccgcagagaaggctttgatagagagtggtagattaggaagtgccccttgaatattgtttgaatgcataaataatatctccattgatgaatttactaaaacatctgttgaaccttcgaaaccgttgaaagaattatttgcaagactcattgatcttaggcgaggaagtctccataaccactcagggattttaccattgattctattgttggacatgtctatatactccaacttctgaagggtctttaagatgtttggaaactctatgatgccgcattgctccaatagcaacttctcaagggttagtgggatgtataaatctgaccttaaacttctcggagatatactgttaccggaaagatcgaggtatgttaaagatttgagagaggagaagaggtttaagtcgagtgggtagcttatgtttagacaagaaagttcaagacgctttaggtgtatgagctttgagataggctctatgatttgtttttcaaaaggtttaagcccaaggtaaaggatctcgagcttcgatgaggtagaaacttcaatggaaccggtgaaatggtttccatataaattaagatatgataaaaagggcatcatgaggagagaagaagggacggttccagagaatttattattttcaaagtctagatgggagaggttagttagattttgtacctgtgggaaaccaccagtgagctggttattggaaaggtgcaactcggttagctgacttaggttactaaatgaggaaggaacttggccagtgaagctattaaaggaaagatccaaaacctctactttgttgagattaccaaactcggaagggaatgaagtggaggtgaagttgttgtgagagagattaaggaaacggagctgatgaaaccagaataggctactgttgggattcagagttccactgagacaagcgttgagttgtagcttcgtgaccacacccatcgagtgatcgcaccagactccattagagtggtcactatggttgcaacgatgggtatcaaactcgttcttgaactgtgtaaaggcttgaatctgatgggaacgacaagcaacaagatcaagaacgggataactgaaagtgaataagcttgaagtcgaagaggagacacaacagagtaatagtagcgagagaaaacgcaaacgcagatgtgatcccgacatggttcatggaaactttttaacaaggatgatttagtttaaagaaaagcgagagtcaagattgatataaatataggcatatatagatacgtggttatgcataattggagcacaaattgacttataagaagttagagccgtgaagtctttgtattcgatcgggagtgaagaaaagtatggctaagtgggtaaaggctaggtgccactaaagtcatgaaatgaatccacgttagttgaaattcctaacgtataacttggattggaatcacatcagtttgaaacttctaaaacttacttttcaaaactacaaaaaataaacttaccataacgacaaacccatatacgtttgttgattaattgtgctatctgagtctttaatcattggtataaaactggtgaaaaatacgtgtttggtaattgataatgatgttatattccaaaaacatgaactacttgaatcttgatagacatctaaagaccaaatgtaaaacaaaatacgtcgacgtgtcttatcggcaacaaatagcatcatcgagtcatcattcataatcatatatatgggcaacaaatgaaaatttgatgcctcgcgtctttacatgagttataaaggggccatttgccacactttccagattttgtgt

SEQ ID NO: 19267 - DNA, 657 bp, Arabidopsis thaliana landsberg
ctcaggaagaatccagaactcagaccaagcgtacgcacatttttgtagcatttgtgatcatttaacctgagcagtataaacctgatgagtaacatgtctcttcttctgtgtaggcttctgatcttctcagacagccactacttcagccctacgttcaaaaggttcttctcaagctgagcttcagggaacacgatacattgccatctgaatccgaaaggagaagtagctatcctcagcagagaaagcgtacttctggcaaaagtgtgagcttcggtccaagcaggttcggtgttgaccaagaagattctgtttcttctgttaaacccgtgcacacgtatttacaccgtcacaggccagtggatttgtctgcaaatgacactagtagagtggttgttcgtagacccgctgtttcttcagtggtttctaacagttcaaaatatgtgccagtgagatcaaaccagcctaagagtggtggtctgctggtaagtggttcgtccaaatgctctttatcttactaactgctgattcagtctgattatatattcgatctgatgtatcagaaacctgcggtagtgactcgtagggcctccttacctatctcacagaaacctgcaaaaggaacaaaagactctctataccacccgaacatcggtatac

SEQ ID NO: 19268 - DNA, 527 bp, Arabidopsis thaliana landsberg
taaggtccacgtttaatgaagaacaacagtagtggtggtagccaacgacaacaacaacaacaacaaagagtcatgataacagatatcgtaagagacttgtttgggttctttccaatagaatctctcttatgttagtttagatttgtttgttatgtttgttatcctaattttattttaggaagaggtaagaaaaatgccatggcgtcatctgttgctcttatgactctgctggtatttttgttttcttttaaattttctcattttctttcgacagagtttttagggttttctaggcttaaattgatgctgttttccttttctggaaatgatttatgtatttgtagaaaatcaacaaaatgaaatcaatatttttttttcttaccatttttgtagcttaaatgaattttgtcagtcaagaatgagattcaaaagagcaccaatcctgagatggtaccagtacaaatttatcaaattctttacattccaggggcattacataacatgaacttgaggacttgagctcccat

SEQ ID NO: 19269 - DNA, 1627 bp, Arabidopsis thaliana landsberg
aaatatcaatttcaaaatcagttttccaaccaactctaaaatataccaaattatggttttttcaacaaatttcttcaccaacatatattgcattttatgtttctgaactttatttatcttcataatgaatatctatatattgtctttatatattatttggaaaagaaaataaaaatctaaaatttatatattattaactcttaattatttttattttattttatcgctaatcgttattaatatataattataaaagtagaaaacataaataaaaaggaatataaaataaaataaaataaaaatggtagagtgttgaaatttattaaacaaaactattgccctcgcccaccaaccagcacctgcaggtcctgaattcaaatggtcttcagaaatctggaatttgaaatcatcacctaaaacaaaattccttctgtggaaagctatgagaggggctttacctgcgggggaaaacctcgggttgcggggtttaagagtcgaggcaaattgtcctttttgtggtgaggcagaaactccctttcatttattcgttaagtgccagttcgcaacctggatttgggatcatgcacctttccagaaacatctagatccggctacctttacctcactccaagcctttatcgaaaaggcaaaaacccatacctgtcttcccccttgtggagtaaatgttggaccactatatccctggattatatggtcaatctggatcacccgtaaccaacggatcttcaatgacaaacgaaccaaccgaggcgaaacccttactcaagccatatccctggctcatgaatggaaccgttctcaagctcccaccagcctaacccctcaactctcacagcggcaacatcttccccaacaggacccaagagctgtagtctgtcacaccgatgcggcttggataggcgatctcaaagtggcaggccttggatggatcttctcaaactgcagcgcgggtccaagcaaccacagatctgtcagggtggactgtatcagatcgtcacttagattacacaaatgacacaacatctaaacttcttcacctcctcagcagtttcgttctacattagattacaaattcaaaacaaaaacataagcatcgttctcccaagagaaaaagcatgatccaatatcttaacatattattatcgtatactcaacaaagttaacacactgatccatcgaaactaaaacaggagatatcagttgaattagaattaaaattctataccatatgcattagagtccattgctacaaataatgaacaaatccttagatcttaagaaaacccaaacatttctaagctcaaaacaaaacccacaaacgctttatctaataaagcaataaactttgtaattagagggaagaaagattgatacccatgtcgtcaaacagatcaatcttgagacactcgatatctcttctcgtttagggatatggaaacactcgatctctcttctctttgaagcgaaagtagcaaaaatgaagacgaaaactttaactctaatcaatgtgaacgatagagagaagaagcacataacactcaatctctcttcttgatctctcctcttgtttaaacatttggaaaatttccttaaattaaatctttga

SEQ ID NO: 19270 - DNA, 376 bp, Arabidopsis thaliana landsberg
  unsure (1)..(376): unsure at all n locations
agtctaaaagtcgggaattttggtcttntgcttaatagatttgaacgtcgggtcgatgttgagctcgtgtgacacgatgtcaacacttactccgagcaaatcttcttgggaccaggcgaacgtattgtcattttccctgaggaaagcggtgagctcaggtgttaattcttctcctagatctccgccgatttctacgcatcgctcgggttttttatcgtcaaggcagatggagattaccggataaggagttggtgttgtagattctcgagcctcctcgatctttagttgcaataactgcttagaaattgctttttcttcagctcggccaagcttggccttcttgtgattcgcgtcggccgttgattcactgacaggg

SEQ ID NO: 19271 - DNA, 1861 bp, Arabidopsis thaliana landsberg
gaattgctgaatgtttatctataaagatctaagaggcaaatatatgggaatatatggaaaattttgttacctgttattctgagataaataagtaaatattgaaaaaatcttttataagattctctttgggaaaatagaatatcgcatgataataatcgggagacattaaagtagaaatacaaatacgtagacacaaaaaccctagaacaaaagatgatgcttcgtgtgtaacgtattagagaaggaaccttaaaaacgtcagtgatattcacattaaattgggatgacttgagtttggtgttacatccaaatccggttatatataggttaaattgttgtgtgcgaatcaacagagagagagaaaagggcacatcaaataggtgagtctcctaaacatgccttccttcaactcctccggcaatctcgcggtggccgttgctcttctctttgcgggcgccttatatttctatttctcatcaattacggtttctgatcctatgtccgatctactacacaatgtcgaaactgtaagttactttataatagaatcggaatttgagagtaaatataggaagattttaaatgttttgtgttaaatagagatggacagagtatcctgtggacgagctagaggcggtcctagacaaggcagcaatgggaaacaacaaaacggtgattatagcaatggtgaacaaagcttacgtggaggaggttgaaggagggaggacaatgctggatctgtttttggagagtttttgggaaggagagggtactcggccgcttcttgaccatctgatgctagtggcagcggatcagacttcctacgatcgttgcctcttcaggaggctccactgctacaagatggataccgatggggttgacttggagggagagaaggtatatatgtcaaaagatttcattgagatgatgtggcggaggactcacttgctcctagacgtcctcagccgcggctacaatcttactttcacggttaggtccgtcccttggttttggaatgtataacaaaacacctaatttgtttctctataagtagtgtatgtatatgtcaggacacggacgtgatgtggctaaggagcccttttccccgactaagctacaacgagagcttggatatgcagataagcgtggacagtattggcctggttggaggacacttgatcaacacgggattctaccacgtcaggtccaacaacaagaccatctccctcttccagaaatggtacgacatgaggctcaagtcgacgggcatgaaggaacaagatgtccttaagagtctcctagactctggtttctttaaccagcttggcctcaacgttggcttcctcaacactaccgaattcagtggcttctgccaagacagccatgacatgggcgttgtcaccaccgtccatgccaactgttgccgccacatccttgctaagatctctgatctaactcttgttcttcgtgactggaaacgctacaaagcctcccatgtcaacagcaattggagcccccatgttgagtgcgggcgttcatggagtgacgctcactatatccccaagctctgaccttcttcgttcatatatgccaattaatgagattgctatagtatacacaacttcatcatctattaactgcatatgttcttcagattaatcctagctagctagaggaacaattctcttttgacacggaattacaaaacatcatatatgttgtgttacaaccagattggttttcgctcttcgttacagctacccaaataattgctgataattctactacctagctagctacttgattcaaagaacacatagacgaccgagttttaaattcatggccaagttggtgggtaaaa

SEQ ID NO: 19272 - DNA, 633 bp, Arabidopsis thaliana landsberg
tatactatctttttcaaaagcaattttaaatggtgtctttttgcggtagaaggttcgccttcttgattttttttctctttgcagcacaatatgagcgtgtctacgctggtagctttcacaaggacgttcagatacattggggtgatggccgtggaaaaattctcgacaatgtcggaaatcttctttctctctcgctcgacaaattctctggttccggttttcagtcccatcaagagtttctttatggcaaagtagaggttcaaatgaaacttgtacctggtaactctgctggaacagtgacaacattctatgtaagtaatatacatatctcgatcaaaccattcttgtcatctttagctatttactagatttcatatatttatactacttgctttatgatgactttgtgtagctaaaatctcctggaactacatgggatgaaatagattttgagttcttgggaaacataagtggtcatccatatactcttcatactaatgtttacacaaaaggcacaggagacaaagaacaacagtttcatctatggtttgacccaactgttgactttcacacttattgattatatggaatccccaaagggtcattgtagagcaacttttttttattagttaa

SEQ ID NO: 19273 - DNA, 1029 bp, Arabidopsis thaliana landsberg
aactgaatcttatcgtcacatagttcaccttagtcatggaaattctcccacgagggtgatccgtagctcgttggggttggtgtcccctccaccttttcggggggccgggaagttcattctccggaaccctcacctcttccgtatgatcttccttcaggttcagctggtgctccacatgttgctcttcgttcgccggctcgccttgaggctgtttgaagtcgcccttgcgtttgtttttcccattcttgggatattaggccgcctctacttctccagatttatacttcccgaggaggatgttcaagagatgtttgcactcttccgtggaatgtcctccgaactgattgaattcgagttgtttgacttggccggctgctgggagtccgtatccactgcggcgaagatcgttcctcgtttgttcgcctttgggtcatagtgttcacgcggctcctagtaaacttcccgcgcttttttcttgggttacggcggttgagactttcctgccagcttggcgtcttcctcttcaaggaaggcatattgtgaagctctatgcagggcgtcgtcgagatctcgcggttctcttattgcgagatccttccttagttgggatccttgggacagtcccttcctgaaggcagccatcgcggcttcgtttgtaatggtaactctagacagtatttctttgaagcgtcttagatagacgttcaatggttcgccgttctcctgagtcatactctagaggtcggaactagaagctcatggttgaataaacacccggtactgtttaaagaaagcagttgacaattgggtgaagttatcaattgagctcgcctctaatctggaaaagcaggttaaggcgtttccaacaaggccgtcgacaaagagctggcagcagccgacatctctgagttcgtcggggaagtgagccttggtgactgttgtcatgaaggaggtcatgtatagattgggatcgcttccgccctcgtagactggaattctaagctttacttgagggattcgtgtgagtgt

SEQ ID NO: 19274 - DNA, 235 bp, Arabidopsis thaliana landsberg
agatggagtcaatataacagcaaattctcttcatccaggagcattatgactaacctcgggcgctacttcaacccctatttggctggtaacttcttttctcttattccactatcatcaccccatacttcacaaggttacacacaagtaaacaaacgcatacatatacttcttctgatcctctctggcattggcttgatgcagtagcggttggtgcagtggctaaatatatactcaa

SEQ ID NO: 19275 - DNA, 464 bp, Arabidopsis thaliana landsberg
aaccgttacgttatttaaccgagttattatatgattactagtatttgtcaaatggtaacaatataaaaagaaaagtcagttactttggtttgctacatctcttgccgcttggatgctaacagaagagaaaagaagccataaaaggaagcgaggaggaaaaataagcattcatgaaaaattgtatcttcttctttgaatctcttgttgtcgctaggtttctctcatcgagagctagcgtattgatcatttggtgttttatgaacatcggattgattctatgggttacggattaaacaatccgagttgttttgaagtgaatcgggaacgttactgtaacaatccaatagcataactttactatagaagattacaaggagcgagacgaacaattcaagaccaacggagagaatggaaacactatcgactttttggagacctatctgggcaccaaagacaattatggg

SEQ ID NO: 19276 - DNA, 2759 bp, Arabidopsis thaliana landsberg
  unsure (1)..(2759): unsure at all n locations
tttgaggaatcgaagatcatgcagtcttttaaaagcgtcatcacttatagtcacttcactgatgtctgatgtcacaaagaacaaaaaaaatgtcattacaaaggtcttgtaagggaaaaatgaataaaacagaacaagaaaatacaacttactttcccatatcgaaggacatcgcaaatctcacgagcatcaatcaagattctccgttgcgtgggctcttgtctttgaatagcttctctacccactcgttgtagtaacttgtgcatcactatatttccttccgccgatatttgtatgagagatttatacgcgagcgttttcaacccgagtttgacatccaaactatcttcaacgagcattgctttcacatgatcatcgtcgacgtagttgaagaagaatgcaatgaggagatatagaaactgatcgtcctcacataaatggtcgtatccgactctaagaactccatcgatctttcgatcaaggctattttctagcctacgcaatataccttcccagtcatcttctttctttccgcgtaaagttgaacccatgacacggagacctagaggaaggttgctacaaagccatgttactctttctgcaagcttctcaaaaccatatggtgcaaagctccttctgaaagcatatgtacaaaagatcttacaagcttcttctctagttggaaaatcaacatgatatttattgttaatatcatgttgctccaaaagctcttgatcctccgtggttacaataatcctgcttccaggaccaaaccagttagtttcattagccaaagcctcaagttgctgcaaatcctccacatcatcaagaatgataagaactttttggtcacataacctttctggaatcgcacctaaatggtttatccttataccatcttggtttagaactttggaaagaagttgttcttgtaatcgcagcttcaaaccatactcgtcaagaccactattatagcttcccctaatattctccataaaacaagtaagctgaaaactgctagagagtccgctatgcaaagctctcgcaatagttgtcttaccaatacctgcaggaccaaagattcctacaatcttaactccatcataatcaaagtctagcaaaacctccatctccttcaaatgagcttcaatcccaaccatgccatcaaaatcactagacggtgtcatattcagtttttccgatacatctcttgcaattttctcgatcatctccgcttcattgtccctaacaaaagagaaacataaatattgttcccatcaaatcatagaagtatcatttttgattaatcacaaaccagttaaggaagtgttctccggctatgtttcccacaacattcaaagcttggctccaatttcgcctctctttctctgttctacgagcacaagttttattgaaaactgttccaaattcaccggtttgtttgcggacatcagatggatctactccgtagaatacagtcatcacaatttgcccaatatcttccctgcacttcaaaatctccaggagctcattcaaacaccaagtagaagaagcatagttcttggagagaatgacgatcgagatcttcgattctctaatcccttgcgtgagtgaaggagcgatggtttgacttctcacgatcttttgatcatcgaacattgtaatcccattgcagatgaactgtttgcgaaaatgactcagaaagcttttacggacgtctggtccgtggaagctcgcaaagactcggtaattccaggtgcgagacgatgaagaagaagccatgagatagagagcagcgagaaaagttgaagctcagaagatgtacaaaaatggagatggcctattcattgaccgttgacgtttgagaaagaacgatgaagttctgtttcgagaaaataattctcaattggaacccaagttcggtttaaaaaacaatatcggtttatgtgggtaatttcggtttatgtttggtagttttgatatatttcggtagtttttggagaatttgtcacggttaggctcgattttaaacccaaaaatggaaacaattcaccaaaattataaaaaaattcggtaacccgatcggtccagccttccgaaccggtcaccgattacaaaaaaggaattcagatcgtttttttctctcttttgttgtcagtaaaatattatacgtacgagtacacgacattttgaaagtttcctgatatgttaatacacaattttttaatcaatctaaacataataatcatcatcatcacataaaaactacattacaatgtctttctgtaacaagtaataagtatgctttgagaaaatcgaaatacaaaaaagaaaccacaaaaaaggagtttctccttcaactagtgtaagatctagaatgctcctttaatcttcctctactacaaagttcatctattacatctgaataagcaatagcttcagtgttaagttcctcctttgattcacttgttgctggatttttctctgtctctacctgtaaatcccgcttcatcgatccaaactttccggaaaatttctttaacaattcatctgcttcactcagcttaccatcttccataagcaaactgataatactgttgtatgtaaaccgatcaggctctagtcctttctcctccatttctgatagaaggtcatatgcttctgttaacttcttgtccttgcagaaagccgagatcatcgtgtngtatgtaactgtatcaacctctctctcctctattagcgtgttgaagaaattgaga

SEQ ID NO: 19277 - DNA, 2146 bp, Arabidopsis thaliana landsberg
  unsure (1)..(2146): unsure at all n locations
cgatggtttattatatatatatatatatatataaatatatataanatagggaattgtaatgatgcctacatgcaaagaggccaactccacgagcacatagagagagtcacgctttaaaccaaacaaaacaaatttgttgacttaaaccaaatccactctctcattttttttgcctttgagtttctgactactgacaaactctttcaacgccctagaaaattatgcttttggtttcacattgtttgttttttgttgtattcttttatttattagtaattgcgtccacagatccaaaaccaaagccattatcatcaattcatccactaacttaactatttatattatactatattttatttcaaaaccccagaataaaacaaaagttgtatattggagtgggcaggcacctccacaaaaatgaaaacttcccgttaaaattcaccgttctgttttacggtttttatttatttacatgacttagtatcatagattcatttagtagtaatataagactgcgtaagagtgtctgcagaattttcacaatcagtttcaatgtttcatccaaaattgtatcatacagttggatcatacggtccttgaaagagctaatagtgaggtgggcttgtgatgattaaataggcccagtgattataaaaggcctcgttacagaccattactaacacgtgtgatgcgcggatgcggcataagatactgttaaacagagccgatgccgacaaaaatgaaataaactatttaagctttttaattaatgatttaattaattggttttggcagtaattgaggaggaacattcaaaagacagacactttttgtcatgttaataacagtaaagggagcgtggatcatggccgacggtgtttgtaatggcagtatggtggggatggaaatggaggtgtggcaacatctttggcgggaatggtaagtgtagggaccgtgttaagtttattaaggatttggcggaggaagtggcgatagcgaatgcttctgtgaaggggaatgaggtgcgggtgagtagagtggagcggtcggtgtcttgggtatcaccgggagacggttgggtaaagttgaacacggatggggcttcgcggggtaatccggggtttgcaacggcgggtggggttttacgggatcataatggagcgtggattggaggttttgcggttaatataggtgtttgttctgcacccttgactaagttgtggggtgtctactatgggttattcatcgcttgggggaggggagctagacgggttgagttggaggtggactctcagatcgtggttggtttcctaacgacagggattagcgattctcatcctctgtcattcctagtacgtttgtgctatggctttttatcaaaggattggatagtccaagtttctcatgtgtatagggaagctaatcgtcttgcggacgggttagctaactatgcgtttactttacctcttggttttcatttatttgactctgcaccggattgtgtaaccccaattttgctggaggacgcaaacggtgtgtcgagaatacgtaatgtgcggttgtaatttttagttttgaagtaataaaaagaatgtctccccccagctcaccaaaaaaaaaaatcaattaaaagcataaaattcggttcttagatatgcagtaattccatttacctcaaacaaacacacaatatactatgtgatcttaaatttggaatacctagatatatttttagaatatacttgattcatacttaagcatcttcctaatatagatattctgttataaatctttaccaactacaatattctccatctactttaaaatgtaaagcaatcttaccttccaaagatattttgagtttgaatcgcatcatcaactcctgccattcctaattatgcgcatttcagtttcctgtttcacacatagcacaaatcaattcttaaaacagttatggtatgccattaaaatgtaaccaaaaaaagatcttattagctagaatatcttccaaattttgcttgagaatcaaagcaaaatctaaatacagcaacttatttatgagtattactcgagcatattcctcttttgaaaccattccaaatcctttctgtttctattgagctgcgcttagaatcttctatacagt

SEQ ID NO: 19278 - DNA, 914 bp, Arabidopsis thaliana landsberg
aaacatccagaaactaaacatagttcataggacatagtagaatgactgtatcaacatttccattatagtaaagaaattacaaatgggactctacactccatgaaaatgtcatcatcttcatcttctgatccagcaaagttacgcctacgaaacagataacaaaaatccaacaaagttaatatatatatactacatatttgtatagacgatgtttacataataaggcagtagattatagatagttgttcttgtctattcctcgaaaatttggatcaatgtgaacttttgaacaacataaacgcttatcaagcacggatttcctgtttaacaatcacatgatatagttaatcataaatctcatgaaattgcattggaaaaatcatactaagaattaaaaagaatataaccttcaaactcagaaattttccaaaaacgcagaataattatcacaggctccatcttaaaatccacatcacttattttcttgtaccattttctttcaaactcattacatgtatctcctacagcaacacaattcatgtactgggacctataatatgaaatgaactaaataaataaaccaagagatatatagatcatacggacaattcatgtctaaataaataaataattcatgtagtgtagtattttaaacttacagagtatctttaattgtgaaagtaaggtatctactctcatagtcactttccaattccctagcaacaggaatgttcccaatcggtgagattgactcaatgacccccatagcatctgaaaatttatagtagccaagtattaaattataaagcattgtctgtacttagcagaatataaaacagaaaaaactaaaatactcacctataacaaatttcttttcaacaggagctgcattttttatccgataaaaatcaaaa

SEQ ID NO: 19279 - DNA, 501 bp, Arabidopsis thaliana landsberg
cttgactttgaattcatagagatgacgagggagaatattcgatggatgagtgacattagctctggctccggcttgagtttcaatgtttgatcaatgagtggcatgaactgaaacacctggtcttggtccggctccaaatccgaatctatggagttgacgagagaaaatctttgagaaataaatgatatgagcttccttagcggcttcggttgggaatccaaatccatagagttgaagagatagattgatcgagtagtgagtgacatgagctccgactctggctttggctgcgaatccaaatccactgagttgagcagagcgattagttgacaagtaagtgctatcaactttgacttcagctgtggtgtatgtgtgtcttccccaccgcctaagatagataacagctgagaaataagagatatcatgagctcccactcggaatccatagagaaagggattgttagaatattgatgagtggtatgagagatgattattttgag

SEQ ID NO: 19280 - DNA, 2084 bp, Arabidopsis thaliana landsberg
aattattacaagcactcaacggatatgttatgataacattctgatatactgaaatatatatatttgaaagtaattaaaaataaccgaactataaaaacaataactaaacatgtaaaaatattaaatacacctgccattaatatatattctcaaataacaatgtaaaattttttattaaacgtattgaattaaatatatatatatatatatatatatatatatatatatatatattcaagctaacaaccaaatatttatcttatatttatacgagaaggatcgcaataattctttttttggttgtttgggtaaatatttgggaaaaattacatcatttgccatatttttcaaaatccttatgcaatctgctatatttttcagggtcttacaactcatgccacatttggttggaaaatgtccattttgtcctcatcatttcttctctattttatctctctttcctcgatatccgtgcattttgactatacaccattatctttccgaagacaaaacgaaacgtttttgtctctctatcactttccctgacaacctgcacagattctctacatgtaactttcaattaaatttgtctcccaattttattcatcataaattctctgttgtatctagatcttgtccccgattttatcatctttcaaaattatcatataagatggcaaaaatagatggcaaaaaatagatggtttcagtttcagcatctctgtgaagacaataacgctcaactaatctgtggaccaaaatagatggcgaaaatctaaataaaattctaaattcttaaatgagaacaattgcatataagatgtaggattcataataatagagcaaaatgatgaaatcgaggacaaaacgtagatgcaacagagaatttctattccgggacaagatctggagactaaaacaaaagtcttgctccaattgttctctgctaacaggtaatcatgtcccttaatgcattatatattatgttgtccccgctatcaggtaatcatgtctaatgtattatatattacgttgtcccgcagaattttggataaccaatttgtttaaacaagccgtttttaaatacccaataacaacagtagaagccagttgttctccactattttgtccgttaatcctttatgcttctaccatgattttttgtcctgtatcatcacatcagccaaaagttgttatgtcaccatcttcgttagagcgctgacccactttaaggggtactttcgtccactgaattccacgtggaccaaaatgaggcagattttgaaaagagtttcagaatatagctgggattgaaagaaataaagtggaatatggcagattttacaagattcccttatataaatggcttaaatttagtagaaagattattttgttctgtctttttatatgtaaatttttgtaagctgtttcgttaacctcaaaagatcaatatatggattctagttgacaaaaaaaaaagataaattgcaaatgatgtaacgggattatatgaattgattaacaactaagaaaagtgatcaacatattattgacacaatgtttaattattacttcctcttttttgttttttcagaaaaatttacagttaactttgattcaaactctaaattacttttagtaaaaatattgaaatatatatactttgagttattatttcgcttattgtcgacggataaattaaaagccagtaaaattgtttttcatttggcgtactaattaattaaactaatcgcgtagattgtatgtatattattatctatggacacgaactgggcacgtgtatatattatttttttgggggtcaaaagcacgtataaatgttagatgatctgatatttatctttaagatattttaaaagcatttttagtcttttagatacttaagtaaaatatctttatagatatttttaaaggcatgacagttaattacttgtatttaaccaaaaaaaaacagttttcttgtggaagcaaataataaatggatcaacatgctacatacatcaaagtcaacggaatcttgccacgtttcaaatcctaccattttaggactataataagttaaa

SEQ ID NO: 19281 - DNA, 954 bp, Arabidopsis thaliana landsberg
atatcatttttgtttaagattctgttcatgtaaaagaatttcataataatgttttaaaaaaaaaaattcataacgtattatgaaatagcatgtttttaaactaaatataacatgtgaaattttaatgttacatgatattttgaaaaattacacggatgtgtttcgtttacttttcatcttacaacaaataaaggatagctttattatttcctttcttccgacaacgtgggtccatggttattttgtaacaaaaaactttatctctgctagtttcttaatttgtatgttttatttggttatctactaatattacctttaattttattattttttaaatttaaaaatatagaatgatatatgtcaaacttttgtgtgatgcttttgtgtgatggtgtgtcattcatatggagagtgttgaccaattttcatatatatatgattatatattaagaaactatatattacgttgtctttttcaaacaggtaaaaatgttatgagatttatttgatttttaagtaattatttaatttaaaataaataaaaatatatattattttaataataggggctaaatagaaattatgtggaggagaggggctgcgtagattaaaatccaaaaaataccgcaaacaaaaaaaaatattcccttgcgagagagggaagattgacttattggcacgcagccctaggcattttcgtattcgtctccacacgcctctctctctctctcgcttcttcaatcattcatcactccgacgtcagatgcataatcctccatgatcgatcccaattgatcaatcgataaccttatcttcttcatcttctctggcaggatctgaatctgcatctggaagcgtgatttcatgatcatgtatttaaccgcttgatcttccgcttcttactccatcatgcgagctgcttattctcgctcttcttctcttttctctttccga

SEQ ID NO: 19282 - DNA, 141 bp, Arabidopsis thaliana landsberg
tccctataaattacctctctaggtttttcttcattcctcactattatatcgctcttttcttgtgcagttatgtcctttaacctccgatgttcggaatccatgtcagacttttcgaggatcgggatgatcgatgaggacatt

SEQ ID NO: 19283 - DNA, 575 bp, Arabidopsis thaliana landsberg
agctatacatgttattatttttgaaagggaatatgacacgtttatgcactttcagagaatattatttcttttgaggcttttttcgaggatgaggcactttcccttgtttatggaggataaaaggacaattatatccttttcaaactaaaccatcaattgcttaattggttagcatagttttgtttgaattggtatctaataaaacgacaattgagatttggagatgagaaagggagttaccttcacaattacaggatattatctcacaatattgatgtcgatggctgatatttcttccagccaaggaattcttctggcaagtggattctgaatctccgggttgggtatgagccttgaagtagttgatattccctgtgcaatgctctctctctcccatcccaaaaatctccttcaacgatctctttcaattgagttgcctccgccttaaccggcaatggtttgggaacgatgtgtatacatcgccttaaccgccagtgggatgggaaagatgacatagaagtcgattcggaatcttcgactcttttgtattgacctgccagagcgatgttttatca

SEQ ID NO: 19284 - DNA, 529 bp, Arabidopsis thaliana landsberg
aaaagacacatgcaactacttacgccaaggcgggactattattttaaaagctttcatgaaaaaaaactcaccagcgatcggttctgcaccatcttgaccttctagtgcatacactcgaggtcccactgcttgcctctttggtggtggtggcaaaattcccatgttctgaattccttgttgtcctcctccgaggtgcattgtgcaatcccgagcaaagtgacctcgatgaccacacctcctacagttgttaaatccctctgaacaattctgctggttatgtcctatctgtccacacttgtaacacttgcctgtattagcccaacaagctcccccatgcttcttaccgcaagtggtacacaatgaaaatcgtgtctgagctggtcctccttcacggttatcccaagtgcgcttctgagactccactccttttgttgtcttggcttgagtatttctcaagtgcttagctttcagaacaagtccactctttatccttgcagccttttcaaccaagtctatcatgctgaaaaat

SEQ ID NO: 19285 - DNA, 631 bp, Arabidopsis thaliana landsberg
agaagaaacccccgcatcaccctctgtcgctgacgttgaggaaattctgaaggtaatgactgaatccttacctgcgaagctaagtccactggggccccaactgacaaagttttttcagaaggacaaggagcccaaaaaatcgaagaaaataatcaaagcaaagagacaaagaattatcactgtgacagaagtaattgacaagacaccgccaagagcttcagctcagaaaacacccgcggctgcggaagggacagatattgaaattgcaccttcggaggtcgcagctgccgaagctgcctcggctaaagatttgaacctggagagcacaatcgaacacattgacaaaatactgctagacatggctgcagaagaagctaccaccgccgccgaagaggccgcgaccgcagcgtcggagaaagggaaagaaattgctgatgaagcttcagaaaacgaagccttcatgttccagaatttagttggagaaaaactgtcaaaagctgaaagagaagagcttagagaatatgcaaaatcctgcggacacaaacctggagcactcctcttcgaggcgttgatgatgaaaaattagattgtattcgagatcaaaccggagccaaagttatcggtactctgt

SEQ ID NO: 19286 - DNA, 516 bp, Arabidopsis thaliana landsberg
tggagagggatatgtgctgtttacctgcttaggagtgccttcaaagagtttaccacatgataagctaaacatcgtgtccccggtgaagatcgctcgtgatcctggaaagtataagctgatatggcctgcaagtataattaagaagataagagacaaagactaaaacatgggacaacaacgcttaagaggtatataacgggatggttttcgcagaaaccgtcaaaaccacagatagatgttggccatatgcatatctaatttgaagaagagaagaacagaactgttctggttacataatttatggtagaactctcatgtttcctcaatacaatgcatgtacaaactttaaaacccaaggatcataagagagaaaccccaacttttccagacaaaattccccataatccacaagtctgttgaaaaatagtcaaactcctgtacgtttagatgtgcatttggcttctttgaacaagacatacaattctatcttcggcggcaagtaagagttacgaccac

SEQ ID NO: 19287 - DNA, 1022 bp, Arabidopsis thaliana landsberg
tgtccctttctatgtgctgttgatgacgatgattgtagcacattttccttttatttctcctgcttctaatccacgatttctcaaaaaatctcaaaattagcttcgtagataggtcacatcgacagatgagggaaacattccccatcttttctctttatggatgatgcaaaatgatgcatgatggtatgatgccaaattatgcgatgatatgatgcaaaagatacttgggataaaaatatgatataaaacatattaaaataagactctgcatccccttaggaatgactttggagtctcttcacctttctaggtggtatcttagctctgcatccccttaggaacgactttggagcttcttcacctttactaggtcgtattttagccctgcatcccctttggaacaactttggagcttcttcacctttactaggtggtattttagctctgcatccccttaggaacgactttggaccttattcacctttactaggtggtattttagtttgagatccccttaggaacgactttggagtctcttcaccttttacttagttggtatttcagctctgcatccccttaggaacgactttggagctaagctctgcatccccttaggaacaactttggagcttcttcaccttttacttaggtgacatttaagctttgcattcccttaggaacgactttggagcttcttcacattttatttaggtgggatcttagctgtgcattcccttatgaacgacttttgagcttcataacttactctacgctcccttaggaacgtctttggagcttcggaacatactctgcactcccttaggaacgtctttggagcttcgaaatttggttttgtcacactcgatggtgtaaccacaggtttattacatcgagttgaaggttaaaccttcctgtgttgtttttttgcgacagagatgtaaaagcataaaatagtaggaatagaacatatcagagcttttcttttgcccaaacttgtgtcatcttcaatagatatgcctgga

SEQ ID NO: 19288 - DNA, 443 bp, Arabidopsis thaliana landsberg
acacctaggatcaaaggcctcttctttacaggaaatgcttttatttccgaagagacgcaagcacatgaagcggcggaacacgggatcccgaggcaagaccgggtggtgcatctaggtgcttatctgctgctgtggctgatcggagtgcaggaggggcagaatgcacgggagatactagggcaggatacgaaggacatccttcattagctgtagggacgctcgaaacaatctcagatgcacaacgaggaagagcaaagcctggggctactgcatcacaagcaagagatgaagcgggtccagagtgcggggtgggggaacagacggaaccgcgcacaggagcctaagactgaagatgacgcaagcggagacaagcgcgcaggtgcgtcacggaccgccgccggtgaaaggcgaaggagcaagagatgctggcaccgatcgaaaac

SEQ ID NO: 19289 - DNA, 555 bp, Arabidopsis thaliana landsberg
cacaactgataatagtaaaaatgaggaataatattaaaaatggaatatttataagtacctcgtagaacaatttcttatggagtagggacactttagaagatacgctgtgagtgcttttctgaaagaacagtgaaataaagaggcaaaatttattaataagattcaaagtatagagcatctttgcaattaagttcaatgaactagcaagtaaatctttgaaatctccatcttaggattaagataagtcattcaaaacaaggaatgattaagcatcaaagttccaagtatttcaaacgatagcgacaagtgagttattgtctatagagggttatataaaacatagaaaaagggttatcttcaagctatcttcacgtggtaagtggagccatttcctcacccactgcactagatagaaagtaagtaacaaacacggggaagaaaaggacttgagataacacgaaaagacatctaaatgacttagaaatattgagcagacaagatttaggaaccagaagtagtagaagaagttgaagagcaagtcttagtgggctgagc

SEQ ID NO: 19290 - DNA, 1933 bp, Arabidopsis thaliana landsberg
gtgtaactatgcaagtcataagtaagatcattgttcgaagaaaataagatcgtgaatccagtaaatatcccatcatacaagcgttcacgtgcagaaagataatcactacctaaatgatttaaatgggagtgtcaatagaatcggataacgagtgttgtggcaaaaaaatgctcaatcatacaccaaaaaattgtaatgttaaaataagatattgggctttaggcttttggagtcggcccacctaaactccaacgccgtaattctgtcggtccatctaaaaagaatcaaatcaattatggaaaggagcctaggatccacgcgacttcaaccctagtcagatccgattcaaccacggttaatttccatatcatcacagctctacacgtgtcataaatcaacggtcaccaacataatttccattttcagattcaccgttttagaaattaaatcctctctataagaacctctccaaaaaccctaatttgtcatcatcactttcacaatcttcttcatcgatttctctcttccaaatctcccaaaagatgtcgaaccctagagttttcttcgacatgagtctcagcggtactcccatcggacggatcgagatggagcttttcgctgatacaaccccaaacacggcggagaatttccgtgctctctgtaccggcgagaaaggaatgggaaagctaggtaagccacttcacttcaaaggatcgatcttccaccgtgtgattcccggattcatgtgtcaaggaggtgatttcaccgccaagaacggaaccggtggtgaatcgatctacggtgctaagttcaaggacgagaactttatcaagaagcatacaggagctgggattctctcaatggctaactctggtcctaacactaacggatctcagttcttcatctgtaccgataagacgtcgtggttagatggtaagcacgttgtgtttggacaagttgttaaaggcttggacgtcgtgaaggcgattgagaaagttggatctgattctggaaagacttccaaagtcgttaccatcactgattgtggtcagctttcttagatctgagtgagaaagtgagagactttgatctttatgagtaataatggtgtcttttgctttcggttgttcttcctcttaccttaatggattattctgtttagggtttgagttttcgtttcagagtttgtaacaaaacccttttgtgttttctggggtttgaaataattatgagcttacccaattgcttctttgtgtttttgcttctatgaacaagtagtaactgattcgtcttctgattcttcaactgaatcgtgaatcttgtaagactgactagaaaaaagaagactttgttacacgcaaatctgtttaacaggaaaaaaatacaatctttttgaggagatgattgataaaccttagcacaactctcaatcttaaattcaatcgtttcgtctcacaaaagctacataaatgaacgtcaaattttcatacttgtatgagttaaaaaatgtaatgcaagtaaagtacactcaaatatgtaacacagtttggttgattttcgttaacgatgttatcaaatctcgtttagtaaagcaatcgagttattggcgttgaccattttcctttctctttctctagccatggttgctctgcgtttcttcttcttctcatctcttcttattcttcttattctttctcaagctcttattatgtcagttggatctgcctctcagatcaggcttagctcaacgttctcgatccaagaagctaccattgaagacattagagttgctttcaacgagaaacgactaacatcaaagcagcttgtggagttgtatctcgaagcaatctacaaacttaatccaatactccacgcaggcatcgagacgaatcctgatgcgttgatccaagcagagatcgcagactgagaacgt

SEQ ID NO: 19291 - DNA, 604 bp, Arabidopsis thaliana landsberg
gactacgacgacgttttgagagagatccagataatgcatcacttgtctgaataccccaacgttgtccgtattttatgtgcctacgaggactccaaaaacgtgcatcttgtgatggagctttgtgaaggaggtgagttgtttgatagaattgtgaagagaggtcattacagtgaaagagaagctgctaagcttatcaagaccattgttggggttgttgaggcgtgtcactctcttggtgttgttcatagagatcttaagcctgagaatttcttgttttcttcttctgatgaagatgcttctcttaaatctactgactttggcctctctgttttctgcacaccaggtgtgaatttgttcttgttcttctctaattttgttccgtgactgtgttggggatgtttatgagtatcaatttcgttacttgatgagtcagtttgtctattagtagtactttaaaagagcacattgaccccttgcttaagatcccatctttcaaatgcagtgactgtgtgtggtttagctgaattagtttgataaggagctcttgtttggacacacaaatctttgtctttcaagaaaagcattttcggaactcgttggtagt

SEQ ID NO: 19292 - DNA, 243 bp, Arabidopsis thaliana landsberg
gcgtcaacaagggaggatttcccaggttggcatttcataaaatccggaaactatacagttaaatccggctaccagacaacacagatggaaaacttggcaaataattcatctttcattggcctagagatcaaatttttgaaagcccatgtttggaaagtacaatgtccgcctaagttacaacattttttatggcaaatattatcaggttgtgtgctggtaacagagaatttacgaaaaagaggt

SEQ ID NO: 19293 - DNA, 3211 bp, Arabidopsis thaliana landsberg
tgccagaccttgctggtgcaaaactgacacctaaactccatggccgagttgcagaagcctttgtgagtaaatatggtgaatatgctggttgggctcaaacattgcttttcattgccgagttacctgcacaaaaaactctcttgcaatcgttttcccagcccattaacaaactggatgagtctgcagaagttaatgaaactagctgtgatacgttgaagccatgactatgtgtctacctaagctacgaggaatcgttttcacaacccattcttgatgcgtcaagtccagaaacttgaccttggaagagctaagaaaattctgaagctgatgcagtatttggctccctggcaaatgagcgtagttatttgttatgatcattgtttactaaggaaccaatcttgatatgtacttgtaactttacattcaaacttccaaattaaattctaattgtttgttccctttgcaattctcttgatttgaaatgagaattttttccttttatctatttcttttgtcaaaaaacataactaaatttcgtcgaaattaaatttctataagaagcccaataaagcgaggcctaaattaggcccaaaatactattggaggcgaaaaagaaagtccggctggattttcctccaagccaccgtcgactttacttagtactccctctctctcccctcctccttcccagatttcgtctccgttctgaaaaaaactccaaattctactctgaaaccctaagtttccgatgtcggtaagtttgataattcccagttaattttaatttcggagacctcagctctattagtcttacgcatcaatggtttaatagtgactgaacgataaaattgattgatatttgtggcgatgcagatcttcgagtacaatggaagtgctgttgttgctatggtaggtaagaattgtttcgccatcgccagtgatcggagactcggtgttcagctacagacaatcgccactgatttccagagaatctccaagatccacgatcgtgtcttcatcggtctttctggtctcgccaccgatgttcaaacactgtaaactatcgtgcaagcttctaaatttttcatatttgtttgtttttacattttgaagtgaactgagaagattttttttcctctttgttttgtcttttgatgtttgaagataccagcgcttggtgtttcgtcataagctttaccagcttagggaagagagagacatgaagcctgaaactttcgctagtcttgtctcagccattctttacgagaagaggtcagtgtgcttgtgttgtttacttatgtagctgtattagttacctgttgatttgcgatgctgcttctgactctagttttaattctggttaggaatgatttgcttagtttgtctctgaatcatgatttagaaagataatcagattggttgctttatttcagatttggtccttacttatgccaacctgtgattgctggcttgggagatgatgacaagcctttcatttgcacgatggactctatcggagccaagtatgttcacatctattcttggttataatctctgatttgtatggacgattttcgctcttacatgttaatgtcattagcttggttagtgtggtctgtatagtctgtatagtccttgagctagatgtcttgtgtatgttatttattttgcttttggttttggacttgttgtacttaagaagtactgttgcattttattttattttattttgttgatataacagggaacatctaataatagttgttctcttcgaaatgcagagagttagctaaagattttgttgtatctggaactgcttcagaatcactctatggagcttgtgaggcaatgtacaagccagatatggtttgcccgctaacaacctcatcatctcttgttatatttctaaatcccgacaatgaaaatgcttaaattaccacatctaggcgttgcagtttggtaggttcaaggtttagtgttactatgtagaaaagttgaatcttgaattggtgtgaacattaaggtgcataatgcccgtaggaatcacgatagccattagttttctctttgatatcttcaattatccctctctggcatgaggtgtttaatagtctgagcttgttagccatactccattgtactactctagacttatgtatcgagactctggcttaacacatgaggattttcaggaagctgaggaattgttcgagacaatatcgcaagcacttctctcatctgttgaccgtgattgtctgagtggttggggagggcatgtttacattgtgtaagttctcatttcttctcttcttttccacacatttgttatccaaaattagttcttaaaacaaacttccatggtgatgtgttgtacagaacaccaacagagattaaggagaggatcctaaagggaaggatggattgatctgcttcttctattcaagttgttttccgctgtaatccggttttaagtagtgtaaccttcacatcccggtttaattatatgatcattccttggctgaaattatgggttatgtatgaagtttgattttcctcttggataatggattatatgattttaattcgtagagttatcgaagaataacacttttaactcaattgtttccaactaaataagaaaaaacaggggaaactaaaatatcacagtaaccgccagatcttagagcagttacagcgactaactcctcaaaggcctctctaatttcctgtcctaattcgatcggcttgttatgtctgttaatccgcataataactaatctagaataatccaaaatcggaagttggtcgtgatgggtaacgtaatggactcattcttcaccggattctctcattctatcggaaacttctttggttctccacttgactttttatctggaaaatcttgcaggtaattatacacaaaaccatcacttatattacaataatcttcaaagtttattggtttgcttaacggaaacttaaaactaatcttacttggaacagttcggtttgtccatcaccgtgggatttcatatgctacgttgagaatttctgcgtggctaatcttgcgaaaaccgccttaatcctaatcttatcctacttctttctattcttcatctacatgctatacaaagttggtttttggcattgtatcatccacggtttcttcaacttctatgggttatggtctcttgttggttctacatgctta

SEQ ID NO: 19294 - DNA, 514 bp, Arabidopsis thaliana landsberg
tattactactttattttttcaataaaaccacaatttttatataaaatctattcagccaaaataaatttgaaataaatttaaaatataaaatttggatattctatttctaatttagggtatatatttcaaccatttaaaagaaattttgattcatttgaatattagtttatggtattatatttggtttctaattttcaatttagggtatatatttttactatttttctaaaaaattgactcaatttaatattaaattagtgtttgctcttaattttattttctattttatattttcattaaatttaattaaagtttatagtgttagtttgtgaaattttaaaaatattgtgttgattttggaagaaaacctttttggtgctatatttgtcaatagctctattttatattagtcataaaaaataaaataaaaatatctcaaatattttgactccaaaaatattaaattaatgacatttctttgttcattcacacctgagagtaaagaagtgagaag

SEQ ID NO: 19295 - DNA, 741 bp, Arabidopsis thaliana landsberg
gatcttgcttgggccactgaagaagaagaatattgaggaattggacttagcattctatctaatgctttgatccatataagcccattaacaagcagtgtgctttgttttttaaagaagcaagctagaggagagggggcttttgggataattatgatactgagcccaatggaaaagcctccgagtccaaaatggaattactggggaaacgaatccaagaaagcccaaaaacaaaagtggtcgtggagaaggggacttattgtactgaaaaagttattgctagtgctcatttactctatacgcgtcttagtggactgacagagtgagctggaaaggttccgtctttccggggaaattcaagagagctagcttcggtcttagctcacctaagaaaggacggagctgtcgagtaaggattggccgagggctgttatgtacctgggaatcagccaatcaaaaatagacaaagaaaagcgagctctgagcaggcagagctaatgcaagtagggccaacgaggactctggtcaggagctgtcgagtaaggagtgctctgggctttgcgagaaacgcgggggagtactctctactgtgcgttctattattgcctctttctttctgagggagtgatcggtattaagccgcgtggcaatacccgccaaaaagaactttttgatggatggggccctttaaaagtctctagcggactttaattaaatttctttaagcgggactaaagggttgat

SEQ ID NO: 19296 - DNA, 469 bp, Arabidopsis thaliana landsberg
cgtagtggctaatttccttatgccctcagtttgaagtagaacttgtgaaaggaaaattccttgtggtgggaaaattcaagtggaggagcaaagaaaaggggaagtgtaaccccggaaaccggaaggtattaaggttaagaaaaggagcagagattactcatttcttttgccggaattgcactggataggaacatgaagtgtgtgacaaggcaccacttgaggtcaaacatcctcttcatccaagacactctcttcaacttgttatatggtgggtggcggacttccaagaaggaaaatgctactgtagagatgaagaactcccatggatagtgtattattgctcgggttgcgaatgggggatgaatatagattgtgtggagaaaaaaccactcttatcgatagaccatccggagtggtatgaacttacactttctatgttttcaagacatgctaccttaccttgcaatgt

SEQ ID NO: 19297 - DNA, 582 bp, Arabidopsis thaliana landsberg
gaggtttatccgatatatcttatgtaaaatatttttcagagaagcaaatagagaaattagaacttcaaagacctttttgcttctatctctcctcttctttgattgtggcttctcctttgattgtggcttctccttcgattgtagcttctccttctccaactcgtttaaaagatctgcttctgctgcatctgacttggctttggattccatattcacaatttcgttctggatgagaagagacataataacatatgagaaacaatttaaaggcaaaatttgacggataataaaatctctctgtatataacagtttcaaaccaaccagcaagaaaggtttaagcagttgaaggatataagtgcggttgtcaaaagcagaaagccttgtgaggttgttcagcaaactcatccttgaattatcaatcagcaagatctttgtatccattaaaagaacctgcaagtcatatagacacttttagatggacaatttcatgttattctgttgttaatgaatattaaaagatgaaccttttgggtgaccactgatttcagaggtctatggcctgcaacactttatcgtcactg

SEQ ID NO: 19298 - DNA, 596 bp, Arabidopsis thaliana landsberg
actgaagtccccttgttggtctatgaattcatttcttgtggctcccttttcgatcacttgcacggttccttgtttgcttcttctcttacatgggaacaccgcctggagatagcaatagaagtcgctggagctatagcatatcttcactccggtgcttctattccaatcatccatctcgatatcaaaactgaaaatattctcttggatgaaaacttaactgcaaaagtagctgactttggcgcttcaaatatgccaatggataaagagcagctcacaacaatagtgcaaggcactctcggatatttagacccagaatattacaacacagggttgttaaacgaaaagagcgatgtttatagttttggggtcgtcctaatggaactgctctcaggtcaaaaggcattgtgtttcgaaagaccacattgcccaaaaaatctagtgagttgttttgcttctgccacaaagaataataggttccatgaaattattgatgggcaagtgatgaatgaggataaccagagagagatccaggaagctgcaagaattgctgcagagtgtacaaggctaatgggagaggaaaggccaaggatgaaaga

SEQ ID NO: 19299 - DNA, 1327 bp, Arabidopsis thaliana landsberg
  unsure (1)..(1327): unsure at all n locations
atgctagtctaaagggtgaacaggtacaacaacagctacttctttctttgaattgaatcatttgtttcctccaaaaatggtaaatttttaaaacatctgttttatgtaggttgctgcaagagtcacagccgaggatgccgagaaggatgaatggtttgtggtgaaagttattcacttcgacagagaaacannnnnnnnnnnnnnnnnnnnnnnnnnnnnntccccacattggttaggagagggaacaatcatcattatcaagcaatcttatgtatatgtgtatgctaaaagatagatcttgagaacttttcatgaatctgatggttaatagtcaagtatccatatatttggatttaactggtagatagccgttatgacacagttatggtaaatattttgctcttctgtagagtcatatatgggtttaaataaagtttcaaactttcacagagttgaagtacttgatgaagaaccaggagatgatgaagaaggaggtggccagaggtaactaagaactcttaataactcaaaaacatttgcaatgacattgcgtaacttgctgattattctcttgtaatctgtaggacgtataaactatcaatgtcatgtattttaccgtttccaaaacggaatgatccttcaagcacacaagagtttataccagggaaacatgtgttagctgtatatccaggaaccacagccctctacaaggcaactgtaataagcaccccacgaaaggttagcttttttctgcaccatttcaagctcgtttcaacaatgtattagaaaccaataagaactaacctcaagctattcaaacctgcatgatgcatatccggttccagaggaaatctgacgagtaagttcctccacacctttattcgtatcgaatcatcaactagttaaacatttctggctaagatttaagaatcccaaagtgtttaattatgataatttctgattatattaggtacttgctagaatttgatgacgatgaagaagacggagcattacctcaaagaacagtgccattccacaaagtggtagctttaccagaaggccatcgccagtaattttagatggatacaatgaaataagagacgatttctttgggccaaagtgtaagataagagttgctgcctttgtttgtgatgatgactttgaagaataaaaaggtatgttttaactttttattatttcaatttgtggcaaaactactctagcaacatttgaaacatttaaatgtgtatatatgaatggaaccatgggtatgtatatcatattgagacacaatctaaaaaaaaattaccttttgataagattttgc

SEQ ID NO: 19300 - DNA, 590 bp, Arabidopsis thaliana landsberg
  unsure (1)..(590): unsure at all n locations
atttgtgaagatagcatttaatcatttagttagctagctatatccataagttatttatttgccactgaaggtagatgccccaattaacaatcacgattagatcatttcataaaattattacagaacatgaattatatataatgtcctatgacacatattttatttattaaagaacttaatcatctatgtgtaacactacctttcattgtttcaagtcaaacttttggtgtatattttcgtttttctttggcaatgttaattgaaacatttgcgattaatcgggtggcgtcacgaaatccgattgtgaaccgggtaatagccggataagacgttaatttggtgacgctatcacacgtaaaaagccaacaaacagtcgaattttaaccggtccaactagttctacttgattagatcatttgaagtccaccttttgcaagattntcttcgtgtaatttacttatctttaaatcgaacatatatatatatatatatattatatatttttgagtactaatatattgcctttataatttgataaatatacttgtatgtaattaaatcttccttctcactatataaattcatgactt

SEQ ID NO: 19301 - DNA, 521 bp, Arabidopsis thaliana landsberg
  unsure (1)..(521): unsure at all n locations
ggctattgcagactgtttatcgtcttcaaggtgttttgctctaaggagccttgcccatgactctgggattccaccgggcaattcaaattccaacagcttcccgcgtttcttgtagaattcctccactggttgagtctgtgaacgaggaaaaacatataaacattgttaattctacgagaatttgaatcatggaaaaagatcgaagaagtatttttaccattttgttgtaaatcctgagtctttccttgacaacttcttcagtgtcatcagctcggcttataagcttcgattcacagtttggcggaggaagaagaggaggcatatacattctgggagtatcatcatcacctttgatatcaatgcaggcaacgttatagtttccaccacactcgctgcaaattcttcttactaaacatttcgcaagcnnnnnnnnnnnnnnnnnnnnnnnnnnnnnnnnnnnnnngatattagttactccctcagtctcttctagaagacaaaagagaaacagagctgtcaaa

SEQ ID NO: 19302 - DNA, 971 bp, Arabidopsis thaliana landsberg
ggagcctcataaccttccagatcaatgttacaaggcacttaaattgagtgatacaacaacgtatttggtagccgaagtttcagtagaccaaagcagtcacaaaatgacataagttcagttaacttccaagaagacctctaactttgaaacaaagggagaaactaaagatatcataacaccaatagcataagaactgaaatgatcaaacaacatcatcgaatgacagcggagatctggtaaccgacaactcgtccttcttcttcaccactagatcatcaagatctgaacagctttgcttcagtttcagtaaatggtcctccatttcttgtagctgaaccatatcagacagttctttctccttcttttcttttacttggtccagcttcttctccaaccaatccaccttaaatcctgcatctttcacatatgtcaatgcaatgtctgcttccacaagatcttcatttgagagctcttcaagtgactggcacagtgtctcaattaaactaagcagaaaaatcatgcatgatgtcctcagatgttggttctttgctcggaactctactgcaatgtcagggtgtctttcaaatattgatctcacatattccacctgcgagcgaaaaacaaagcaagtataaagattcgaagagaaatcttgtaaagtaataacaagaagtttgcgccattcttaagtttcttacctgtgaaggaagaacttgaaagccattgacatctacctttccctgggtagaggaatcctcaaatacatctgatgcaccaataacttcaacaataatcatgagatcttcgtttaccagaaatccaccatcttccacaaggagttcataagggaatgtataacccaaggtaggattctgctcatcaaagcagtgctctgattctgtaacatcaatttcacctcatgagtggatatgaaatctattttggcagcttggcaagaaacttgaaaacta

SEQ ID NO: 19303 - DNA, 767 bp, Arabidopsis thaliana landsberg
attaaacaaattatccataacaacatatccacatagagttacataatttatccctataatttaatggtgttcgtaaatagtaaaggctatatagtcaaatcaaattaaacatatacctaaacctagactctaagccatataccttaatgactatacattaaaccctaaaccctaaaccttaaaccctaaacactcaactcctaacacttaaccctaaacactataacctaaaccccaaactctatacaccattcccttaaccctaaacctaaatgcataacccaaataactataacatcacactaaacatattcctaactctagcctctcgtgcaaataccataaactgtataccctaaagactatacaattaaccctaaacactaaatcttaaaccttaaacactatacactaaaccctaaatcccaatcctaaaccatattcttaatatgatgttacatagttgtgaatgacatattttaattaaattcgttatatcaaaaacaatttaatgaatcagtcatcaaaatcttaagctattaaacacattatccataactacatatccacagagagttacataatttatccctataattcaatggtgttcgtaaatagtaaaggctatatagtcaaatcaaaataaacatatacctaaacctagactctaatccatctaccttaataaatattcaataaaccctaaaccctaaacattaaaaccctaacactcaactcttaacacttaaccctaaacactataacgt

SEQ ID NO: 19304 - DNA, 1486 bp, Arabidopsis thaliana landsberg
acttgacatgactcgatgtttgtaattttttaacattcatataattttgtttctaatttatacaaagaatcaatgacaaattttggtaaatccagaaactcttttagaatctctctacttttaaattcaacaaactctacacaaattcatctcccaataagtccctataattgattgtctctatgacacattgaaagataagagctgagtaattggttattgtaacgtttggattaaaacaaaacttaattgcatgcagttatttctcataaacaaatatactatgaccgaatcgtctggtaacatgtaacgtggttttgactaattgaatagtccacaagataaagagccgagcatttgaaatggtggattaaaaccaaaacttatttgcatgcttcttttttctgatttttgtttattcatgcatgtgaatctattattctaagtttttaactgaaattgaattctttaatttttccaacataatgtttccaaaaatttaataattgaaataaggaagtttcaactgagcccaaaagtagaaagtaaaacggttattaaattaaaatattggacatacgatcttataatgtatatgtttaaattattttgtagtcaaatagtttcatatatctttatttttgctttaaattatattaagaaaataaaaatctaaataatgaaaaatgtatattgtataatttgtctttttaaaatcaatgcatttaaatttattaattattataataaatagattggactaaatttttaaaagtgacaaatatcgaaagaattcttttgtactctcacagttttttgtttttgctttaaactttattaacaaaataaaatgtaaataatggaaaatgttttgcccaaaaaaataataatgaaaaatgtatattgtgtaaattgtctttttaaaatgaatgcatttaaatttattaattgtgataataaatagattggactaaaatttaaaaagtgacaaatgtcgaaaagaattttttgtaatcacacagtttcatatattttatattttttgctttatattatttcaaaaaaataaatatctaattaatgaaaaatgtatgttgtgtaatgataacactgtattttactcattttaggtatatgtttatcatcatttagctttacatttgctcattgtatcattacattttgcaccattttaacttaatttgcatatttaggcatctaggatcatcttgcattcgcattgcatgttttggtatgttttcaggtgcagaaagagctaaaaaggactctactcgatccattcactcgatccaggcagctacaaaagaggcatcattctactcgacctctttactctatcgaggatgctacaaaggatgttgtagtttactcgaccctcctactcgatcaaggcaaccttagatcaagcagcagattgatcaactcgcaactcctatcgatccacactcgatccattactgccagg

SEQ ID NO: 19305 - DNA, 708 bp, Arabidopsis thaliana landsberg
  unsure (1)..(708): unsure at all n locations
tgatttatggtttagtgaatgcattaatcagattataattcgctagattttgaatggtctatttttctatttttacgggaagggactattagggcatctccgtcatggagaaaccaaaaagtttatcaaacaaaaaaaatattagtattttattaattttttattatatgattaaatttttattttaataaaaaattgaaccaattgaaaggagaaaaatataatgatggcttgtagagagtatctcatagtttctcacttgagaaactttctactctctctcttctctttttattatttttattattttaatagtgaaaaactctcttcaaagactaccaatggatggtcttaaactttaaaatatttacttttaaacgttttatgcgctacgttgatttgcatatccacaatatttcgtagtcgactgtgtgttgatatttcgtaatctattttctaccaaacaactttgaggttatgaatcttttgatattaatatgtatattattcattaatttcttcatatcataattcaccaaatattttgagttaaggtattgtccactcttggtcgtgtatttcaaccccacatcttaaaaagtngnatatatatatatatatatatgcataatttccaacccattttctaattagatttagtaaagtttaaaatttggagacaataaaaattcatatgtatacgatacg

SEQ ID NO: 19306 - DNA, 597 bp, Arabidopsis thaliana landsberg
cctggaagatgcttgcctatcaatgcaagggaaatcacgaatcttgttctccagatggtgagctgctacataactgtcttagagacaattctaatattatgttcattgcagtacttttacaagcaattccataaccggtttgtatttgtcaattttgaggtccacacttcagagcatgttgatgctgttgatactacaagccagcttctctataggtttgaattttaaaccatttgttacttttttttttgtgttcaccgtgcatatccttgcttgttaatctgactgttcaaacttgaattgaaatttcctttaccttcgctgctcctcatttatctctttttactcttgatcccgttcttttaccactgtctggcagctacttcacctctgacacatatgctaatgagtattcagcacgtgctgctagacttgcagcaggtttgtgcgctgatctagctacagatattttcactggccgtgtaaaaaatggttttgctttggtatgtctaattcaccataatttttaaatttaaagatgcaactacacaattgctttaaattgaaattacaccatattagtttgaaaaaaaaaaa

SEQ ID NO: 19307 - DNA, 3633 bp, Arabidopsis thaliana landsberg
cgtctccattgttacgggcatgaatctctggatcagcggttcgaccagtagaagaagatagtctcttttcatgatgacgacgaccgagagtagaacgtgctgcagcaaaagctggtgaagacagcattatatctggctatgttgttgttcttgttgtctgttggatataaaacaatgagagtgttttaaatacacgaattagtcacatagcctaaaccctaatttctcgcatatagaaattatgaccatgataataaccacttaatcaccactaatctctcctatttgtaattagacaccaaagtacccaataaaaactccacatgcgtatattgctcttgaagttttgaccgttgcctcaaacctccacaagcgtatattactatttctagcttctctgttttctaaaattgcgagtaaaaatgattaactattgaataaaaatgtttctggtttagttaaggcataacccccattttgtaatggcactaatatatgaaaaaagggaactttgttgaaagacgagatgatggctaacacagaataattgtttctcttccccaaatgatttagttattgagacagacttccaaaaagaaaagaaaatcgaactattgttcttcatagttcatgtccacgagttaaggagtgggcctgaagagatagagaagattgatattttatctttgtgatgttaccactttcgttcgatatgtggcttacttaaaagtccaagcaacttctatgacttaattcttctattttacctttcaaataaagttgaattgaccaggaggaacattggtgcttccgaactggaaaccagattgtggagcatgattctcgtcgttgccttcttcttcattgtcttcagtccaaaatgtttcgaggatcttcacggctttgtcgtagatatcattgttgtcgtgactctgaagattctcaatcttctctaacccttctgcttcgtcaatcatttgagcgtagaggttgtcttctcctgtgtgacctaagttcttctctgcttctccaaccacgagaatgttctctagtgcttctaagcaaaccgttacaactttcagatctgggcaagtaaggagatcgcatagaggtttgatacagccttggctcaccataaacctgagaagaaacatacaataaacacagacgtgtttttagaaatgaccattctttgttaaggaaacatttcgtttcggtttttatggttttacttgatttgatcatgagtgccaccagaagtagcatttgagattccccaagcagcttctttttttacttcgaactctgcactttgaagcacccaaacaagagactggattatacctgcatcaatcactgcctgcacatacgggttcgaataaaatcagacacaggaaacttcaattttcgactttcttgttaaatgccatatattataaacaaaactcacttgtatctgatctgcatttccagctgtaatgttggagatagtccagcaagcttccttcttgatactcttcttgtaattgttttttagaaggttcaaaagacaaggaagcgcttgctggtcgagaaccatctgtgttaggaaaataagttagagacatttgcttctgaaaactcgaaatcgaatggtgaatgtattatatgcacctgagtctgtagatcatccccggttacaatatttccaatggtacgaagagcaggaatcagcactgatggcgacgaatgactatacggagaaagaggaagcacataaatcagataacataatcatgcctggcaataaaaattaaaatgatcactatcagatgcttaccctaagagctggatgaggcgagggatgacaccagcgtcgataacagtttgtattttgtcgtttgtaccatcagagagatatgacagagcccagcatgcatctgtgagaacttcttcatccattgaatgcagaaggcgctcaagaactggtaaagctggttgtgtctgctcgaaaaatgttttaagtaacaaaatatcagaagcatgttaaaaaatattgtggagattcaataaagtgtgtatatttaaggaaacctgttcaaatgcaggtgggggcttccctctgcagaaatttgataatgtccatgtagcattcctcagcattgaaagctttgtattctcattgaattgagacagaagaggtgtcatggcaccgtaacttaggactaaatcccggcattttggtgagtctccagcaacatttcccaatgcccaaacagcctatactcagtcagggaaagaccagaactcagaatggtaagagtctcaatgaatttccacttgatcctaatgtctaagtgtttcttctgtgacaataacgataacagtgaggatttaaacatatacctgttcgcggacatcttcactagcagagctgagaagttggatgaatatcgggacagctccactttcaatgatgacatttgtgttctctgatgtccctgaagcaatgttggtgagcgcccaagctgcctcaaactaaaacacattgcagaagtaaacagcaaaagcaagttaacaaatacatcaaactagtaactatcaatatatccaaaaaaaaacgactgcagctgcgactcacctgaagtttggggaagtcatccctggaaagaaacttcacaacacgaggaacaacaccagattgtacaacttcattgataggaggattttgttctacaaaagaaaaaacaactgctaaagactctaaccaaaacactgattgttatgtactactagtaacgatcaataacataaatcacaaaccaatagaaagcagtttccgcaagagatttgttgcctccaattgtgaattgctatcctctgaccagattccagcaaccatagcaggtagattatcttttaactgtaacacgaagagacactatcatagtcaaaaatctcctctagctaaagtaaatttgatgatctccgttgagatatcaaccctaattctctttacatgtcaaattcaacaccgctcaaattcccagtcaattaaacagacattagtaacaaatactctcaccaaacaacacatacacatcgcaagtttttgcaatcaaatacaaaatctatgaccaaaaacaaagaaacatcgcaaaaacttcaaatctagaacaaatcgatctccaatttaattttctagaaacaaagaaagttttttaaacccgagattgagggcttgtcgttggcgagaaagagggtcattgcttctgccagcaaaggggaatcgacgtttgtagcagcaaagcttccttggatctccactcgtgagaggtgattcgagaaaaactatccaaggcccgtcgagttagagtttgaatgccagaccgcatccaaaaaacataagattgtgtcagttgaaacgctgatcggagaagggctgcttgtttgggagcgtatgattggggattgatgttgagcttcgatgcactctcgggcttgtgctatagcttgagagagggaatcacagggcgagatctgattctgttcaaagatcttcttgttccggcatgtccaaatagttcataagagccagtgtgcagacgctttgatccttcaattcccactttcagacttgtaattcttatggga

SEQ ID NO: 19308 - DNA, 716 bp, Arabidopsis thaliana landsberg
agaaaacattgaatacttaaactaaagattaagacaacagacatacaagtcatattgaacttaaagtaaagacaacagacatacaagttatctcagctaaaaccacttagagatatacgagagagagaaagaaaaaaatagtttgggaataggcaaagaaaaaaaatacgggaaaagaaacaaaacttgttttattgtcatccaataagatacagccacgtcagcgcacctaatatacccaaaaataccttaaacaaggttcacaccttggtttatttcactattctgatttaattttttgcttttattcataaggattttctttaaaaacttgcaaggtccctgcaatggacatgctcttacttgccttgttaacaacgcgtaccaaatagctagtataggacgagtaatagtacttgtgcccagccctactaattcataatccaaaaaaggggacataggttgaggaaggagagagactgagaaagccagagcctcactcatgtagagaaaagactaatcaaactctctagcttataagcaaactacattataatatcttgatagaggaaaacgatccattggtcaatagactgaaataacttcttccaccttgtcgatttattgcattcagtcccaaccttctaaagagatgttactaatccatgccaggaaatgctttctctcctctaactctcaccaaataaaagattata

SEQ ID NO: 19309 - DNA, 514 bp, Arabidopsis thaliana landsberg
  unsure (1)..(514): unsure at all n locations
gaaaatatttaacaatcgacagctacaaacttgagaagctctcctccaagtcatcatcattcagtgccgtgtgaatggaaaatctgcacgaggaagaacaaacaaagagtcaacaccttcatcttggttatcaattggactagacacgataagannnnnnnnnnnnnnnnnnnttttggttggatctatcgaacagagatggttgtgagaggaaggatctttcgcagcagaccgcctctaagaaattatgtttcagaaaccaagaaaaaaaggacaaggttctaaatcacatgtcctttttcatacttaaatgatgacaatgaaaagtctctttcagcttttaagatgatgaaaaaatgaaaagtttatcattgactcggatgtagnnnnnnnnnnnnnnnnnnnnnnnnnnnnnnnnnnnnnnnnnnnnnaacattttcgttttttttgccaatcatgcttgatgcttccattcttttggataggtctattctatagagtggaactgaccaat

SEQ ID NO: 19310 - DNA, 3051 bp, Arabidopsis thaliana landsberg
  unsure (1)..(3051): unsure at all n locations
aaagccctgcatcatcttcagtggatagaattctgtntctggctaacctcgattntgttgcagaatagaaatattttgtatttctgtctccaaaattcttccaattgtttctgctctttaatctccaatacaaatcttcatcacgatacgccttgctcagctcttgccggatataatgtatatcttgtgttgtgaaacccgtgtttgagagggcaaaatctaatcttcgttttagtacttcgatttgtactgcagaatttgtacggtttctccttttccatgtagccattgattgacgacatcttgcaatttttctgttaagagattcagtcgctgtgtccgcattccaactctccatggccttttcttgaaaaccatctttaaaaaacagtctcttatcataacgaaatgtaccatagcgccgacttaacaaactggtaatgttggtgatcannnnnnnnnnnnnnnnnnnnnnnnaaggtaggaattcagtttgtgttgacggatatgaagctagccattctgtatttgccatggaacgatcgaggcagcaccaaatatcatgagagtatcgctttcctttccaagagaatcaatcaccaaatgattttaagtcatggagatcacaaactgttatcattttcctgaagtctcggaagctgctttcaggtcttgaatgaccgcctctcttctcctcattacttcgaatttcattgaagtcgcccatgagtaaccaaggtgaatgtcttgttgttgagattcgttctagtctttcccaaagtagatgtctgttactaggttctggatatccgtaaacaaaagacaagtagaaacagattccattactattaacaagacaatctacaagattagaactttgggacattacagaaagaaaaacatgtgaattccaaaagacagcaacaccaccacttaaaccaacaggttgaactgaaatgcttctgtcatatccgagttcagcgcacacatctctgatcttatcatctccttgctttgtttccaaaaggcataaaatgtccgggaaatactttcgttgtatttccttaaggcgtcgaactgtaaggtctatgccgagaccttgacagttccagcaggctgtattcatggcagttgtggtggtttagggcccaccgcgcctctacactggttgctcctgcttgaggaaccgctaccttcacccatttctctgatcaccatctttgatttagcactctcatcattttggtccagataatcctctcgtttccccttgcctcgatctgctaccattgcttcttgagttttcattgtctgctccatgatatcaagtcgcggatgaatgacagcggagtatcgactataaaggtcgcgttggttgtctccgagatcagcatcctcctccaaagcattgtgcaaaggatcaatatcttcaaggggatgtgtctcttcatcaggttcagcaatcactggctgcaaaccaggtcccccattctcctcatcctctgcaatttccgtataacaacaccttgattctgatttggtgggtcagcattaggcatgtcgtcatcatcatcaccttcagaattggaatcaggaccaccgttttgaataaggcaagcccctgagtcatgagtcagcatgccacatacctcgcaaaatccccgaagtctttcataccgaaaccgtaacaacgtgttaaccccaacagtgaattgaaagttcctttgaaatcttaacggttgggtgatgtcccagtgtaggagcacacgcacaaaatcaatcctagccacggcttctgcatcaaaatcaatgttcagaacattaccaatagcacgaccaatttcacctatgacttcacggttgagaaagtgaaaagggattccacgaatttggatccagaaattgatgaaattgagtaaaggcgggttctcaagtggtgtccaccgttggaggagcagcatgcggtcgttgaacgcccatggtccccggcgtatcactgtctccaatgattcttcagaggggaagatgaattggaactgattccctggaacaattctctcgtgaactaaccctgattagccccaaacacgaggcatggaagccacaatcgatcggagattttgtctcctagggattactggtcgaccgacgagaatgaaacggtttttagcaatagcctggttcacgacatccgccggtaaagcgaaaggttcgtcttccactccgagattgatttcttgaactgcccggcggagattgtcacccatttttgtgagagtgcgataaaatcgaagaggatagaaatttgcagagataatagtgaagattgcaagcattttttgggttgcagatgcgtcattatataatgacagatgtggaactgctgaagtagcatcactccggtacgtgggtccggacgtggagatgaacgccagagggaaagtggagaagaaaccacccacgacgccggcgaaaatggtagaaacagtcgcagaaacgatgagaaaaaactgaataagtaaccgacataatatcgcatcttttgtcgccatgttatatttttgttcgggtaataaaaaaaaaaaaaaaataaaaaataaaaaataataatttaaatataatgaagtttattttgcaaaaagatgaactagttgcacgtcatatgcttgattcaacattcgagtttagtagtaattactcgggttatctgatgatgtctgttcaaaccgatttaccgttttctttatttgttcacagccgggtcaaaaaactgtgttgtgtactgataaatgttcaaattaccataagaactactctctcaaataagagatcagttgcagtatttcaggatcgatttccacaaagttctttggttcacacaatgaattcgatgtcaagattaagctagcagggaatgattgaaagtaaaataaaataaggtaaaaagacagtagattgattggttgtaaacgattaaataaagagctaggaatagagaattctcaggaaactatttgttagtagatcaaatggaagctaggttgttatcga

SEQ ID NO: 19311 - DNA, 1052 bp, Arabidopsis thaliana landsberg
atgatcatatgtatgaaatacgtatccacgacaaaaatacattggccaacaagtaactttaaccattgtaccatgaacgatactcaacaaccactctggatatgaactaaccttccaagtatcctccacctgattcaataaaaaaaaaacacatactatattataagctatcaagtatttatctcatataaaaaaaaatatcttacatatttttttaaccagcttgaatattgcttttctctaagctcatttagatctttttcacttatcccaggattagccgcaatcaagctcacatcaaacaacctacatatacatatataaccatgaaaaatatttacaatgtcttttactaatcctaaaaaaaaaaaaatccatacagatgtccaaattatttgtcatacctttcaagtggtcttaattgaccgcagttccacaaaatatatctatgtgcgatatggtaatctttatcttggagccatatctcactttcttttccacagcctctccctgcctgagaaaatatatctggaactccatcaaaatcatgtgtatcttttttattgccaccatcataatgtcaatctcttgctcgattttttgtcttgatgtgtcgttcaaattaataagtacaaaaagtagaaattttttcattgatgtattgcttaataatcgaacctttgatttttgccttatttttcaccttttttttacatggcccatatatcgttcaatacaatacatccacctgaactgtatagatcctccaagactagcttcgtgtggcaagtgaattagcaagtgctacatgacataaaaaaaagaaggagaaaatattttctctgggttacaaagaaccatacaaatatatttttgcaacattgcaacaccgtctttatgtatagttcttgcgcattggtgccaagaaaataaactaacacctacgcatataaaagctaatgcacataaataaaaaattgctttcgacagtcttaattaaaaaccgaaaaattaataattgagaaaagcagagataataaaataaattaatt

SEQ ID NO: 19312 - DNA, 3314 bp, Arabidopsis thaliana landsberg
aagttttttctaccatatgactcatatatctaataagaacccttcaggtatctatttataataactctcaccttattcatatgttttgttcataattcgtaattgtttatgttggttattagagataaggccttggcaacgagaacacatgaccattgagtcagtggatcacgaaacgagaagcatgacgcaacggtttaccgtacctgaattctttgaaggctataagatgattacatcaactacaaaagttaatgattccgccattggcttgtatagcctcgtcgatatcagtgtggagtacgataagactggccctgagatcaaagaccttgaccaagtccaattccttgtggactatatcaatgagttggttcttcgtactggtggtcagctcctacgacgtcttaagtaatggtcccgtgggacgtaaaatcgatccaaactatatatgacaagtgttcctcgcgtctatacaataaagggatctctaagaagataaaatagatatagaacctcccatgagttgttgtactatccagtcctttaatatatagctacatattaagtacctacttgtgaatgtttcaacgtaactgctaaaaagtaaaaacacactggcatcgactcagcatgatcccaacaaacctgccctaccgataaaattgcaatttgcaaacaaaagacatgagttttattattattatcatcatcatcataagactgtttttgacaatttccacaggtgggcttttacctgtataattcacaacatcacaataacctttgcttcgaccctttaattcaatatctacaaagaccaataagacacagactttggacccctttttttttactctaagcaaacctaaaactagaacaaccacagactctttcactctcacttgcccacacgcattgaattcaagactggaaccaaactgaagacaacttacatccacctctttggcccaccggtcgagccagagccaccatctctacccaacatcgccatcatcaaacttccaccatggactcttccttccggagctaaccccaatcctgcttcatactcattgagatcaacatcagtctctggagatccggtagcacttctcgctttcattgtatccatgttcatgtcttgagaaccgctaaactcttcctcgatctctgtttcgctgctgcttactctcggttcttggctctcggaagttatagtcattcctccgtgaacccggttatcctgaaccagactgttatggagtgcacaaagaccagtcttaccgcgagcaaacgaggtacaaggaccagaagaagactgtcccgcatactcagtctcgggttgaccccacgcacaccttttccctcctccatgtgctttgcaaaagtcggtactaccttgagcacttttgccacagccttcagactgacatctctttcctccaccatgtctgacacagaaatcagttcttcctctagcactctttgtgcattcgggaaccgcacatctcttaccaccgccatgtgccacacagaaattggtacctccgtgaacactcttggagcaaggatcatctccttgaaaggcacatcttttacctcctccatgtcctttacagaacggcgtgcttccttctgctcctttggtgcaacctgagtgtgtacaccgttttccaccaccgtgtgctttgcagaacattgtactcccttgtgctccttttgtgcatccattagattgacatcgccgaccaccaccatgagagatacagagtcctgaaaggccttcagcgcttttagtgcagttctctctttggcatctctttcctccaccgtgcctgatacagagtcctgatcttcctctagcagctcgtgtgcaatcttcatggctgcaccttcgaccacctccatgggctatacagaagtcagtacggccttctgcacttttggtgcatccgagaaactcacatcgacgaccacctccatgggctttacagtacacagttcgaccttcggcacctttgtggcaaccatgtttctggcatctacgtccaccaccatgggaaatgcaacgaccagatgcgcctcttgctcccttatgacatccttcgacttgacataactttgaactagaagaattcttaagctgtggcttcagctgctgagataaaccggaagtacatgtacccgagcttattggtgttgttgctgccgtgttagatgacagttccagaacatgagcagcaggaatgatgacatttttgggaatatggcctaagaaggagcttgtttccttgcttgaagaggcttgcaatgtcggtaatccaaacccttgcctccaaccacacgttgcagattcttcattatttgcacgcagcatgtccgcaagagattgaaatcggttggcgtgctgctggaccgcagtgatctcagattgacaagatcctccaccagaaagactcaattcaagatcaaatttcggggaagggacctgcaaccctttcattttcaaattagctggttttttgttgctagccgtcggtttctcgttgccaagatggaggctaaagtcgagctcaatatccatggaggacgcctcctcagtttctctggcagaagataaactcgtgcaagcagttgccgaactccctttgctatcagaagagcttgaagagtgaccgagtcttaaggagagtaaaggatcagctccatcaatcaaattccatttccttttgattcccttggcattagacaacggagaggcaagggaatcaagacgcagagtagtatccgcggcctcagggacttcaacttgaagggaacggcccaaaatcttataagaattcgaagaggaattaccagcaaaagcaatgttctggaatctggaatgcatggtcacaacttaaaaatgaaaactttcgtcaagaacaccaaaagcaaagacgcgaagccaagaggacaacaacaacttccgggttaagagaataaagccacagctctaataagagttagaagaccttataagcatctccaccgccgcttacaaatcctgaggtgtcacaccgatccatcttcaaataaaagttcaaatcaaatctaacagagctgattcgaaagttgctcacaaaccaaaattagttcttctcaatcttcacgcaaggattacggtagcagctaaccatcctgcttcatataacagataataaacaagtgagtggcagtaaaccgcaatagagcagtgaaaaattcaattgggttaccaaatctacagaacacagatcatttaacacctcaaatctacagaacacttaaca

SEQ ID NO: 19313 - DNA, 681 bp, Arabidopsis thaliana landsberg
ctccttctctatactacgaagcacacgttgtacaaacgctatttttctttgaatataatttaacataattttcaaaaaaaaaaaaaaaaaaaatgaaaatataaagtattttattgttgtatgcaatgttcaaaacggtagctggctagtccaccacaactcgatttacgtgttgagcgttgaaagaggaaaggtaagaaattaagaatataaaaggtccaagtaaattaactaatatggcagacaaaacctgagtgggacaatcgatattaatgtttaaattaaacaaagactagccatgtgcccacagtccactagttgtactaataagtaacattgatttatttagagtatataaagaaacaactatattgatccattattacatgaaaccgaagttctattacccccaaacattattttgcatcctcttcgtctctgctaaccgcatccgccatgacttatgagttagaagggttagaagagttagaagagttagaaggacacgagcatattgtttcccgcgttaaacatcatgatggtctggaatgcgatgcttgtgatcgattgaatgttgatggctattcatgcagcgaatgcaagtttaatattcatgtagcatgtacatttgtgttcgataaacaagagatagtccaccaccctttttaatgatgggacatt

SEQ ID NO: 19314 - DNA, 1957 bp, Arabidopsis thaliana landsberg
attgatggctatcatcattgtttattgtgttttttccctccaagagatagcatacaatgaggtaagagtgttacaattcacttgcatacaatcatatgggggtatctttaactgtagcttttcgattgattcttcgatagaggatttgatattttgggtgcccttttctgtaactttgcaagatattctcactctgggctgttagtgaccgaagctatggaggattgagcttctcatctcaagatgttggtgaagttttagctatatcaggtggctgttctatttaccttacattgtttggtggatcggtccagaaaactatgtctacttatttgcaatttctctgtgaaggagctcattgcttaaccagtcgttgtaaaatctatctatttaaactctttaggcttcacatctttgtggttcatactgatttggttattgttttgtatacagtcgttgttttcaactctgtttctttagtttcttgatgtattgtctatccatctcccccttggatgtttatcatgatttgagttacaattctttcaggacttgggcttctggtgtttcaacttttggtataccccccgttaaagaaatcagtgggactccttgcggttatacgtctttctgcggtaaatcttctttttttgaatgatgttatgtgctttgacatagtaggaatggtgtaacaccccggtttcagaaatatggtagtgcatgcggagaagtttaaaagaattgatttgaccacctatgtcaccaaagtgcatttattttttcggagtaggaatgggttgtccaataatcccatcctgttcatttctttacattttgttgtgcaggtattgctgataccgctgctttcgtgttacccctatatagctttgctttctgggatgactctccatttggtgataaattgtgcatccatcataaaaaacgctttgtctgtgagttcttgttataaccctgatgcttttgatacaacatatcccctcatctaacaataagcaagattctaaatatgtttccgtgtaatgtgcagatctctcttgtcacaggactgtttatcatgttgaacaaagccgtggtatggttctttggctagtgtatctctatcttttacatcggtaacttcctctgccatggctcatactctcacttttctttaatataacattgtagcctcagaatcagagaggtgctgctaatggcatttctatgaccgcgatgtctgttttcaaatcatttggccctgccggtggaggggtcttgtaagtattgtcaaatgcactcacattcttgcaaaaactattagcaagtacaagatgtagacaagcttcacattgctaattcaccttttatccatgttttgttacctctacagattctcatgggcgcaaaagagacaagacgctactttccttccaggtcaaatttttgcacactgtacatgttaaactaattttttagccgtggtttaaaaactgcgaatcatcatcaaggattttatgtgaaagacagtgttttaattacgttttgaaaagtacacacaggtgatgagatggtgttcttggtgttgaatttggtacagctcgtaggattgatactaacgttcataccttacatttcccaaatccagtaaaaggtaaaatccattactctttctccttatagtgaggaatcaatgggaaactatgattctctatgattccagtaaaaggtagaatccagttgaagtgattgtgtttctctatgattcggcaccaaaagactgactaataatgttcatatatttttatatgtaatactatcatttactaatttgttcactcaaagtcaaggtgttatatctttctggtcaaaacatataagtcatttagtaggtaacggatctactaatacatttaattcaagccaataattttagggaataatgtcggaaataatcgag

SEQ ID NO: 19315 - DNA, 781 bp, Arabidopsis thaliana landsberg
aggtcactctagaggatcccctaagttatgaaaccaatgatttatatatacctaaagttctatatgtactctatatcactaaaatgagtgcttttcagtaatatttaacaatagattggatcaaactatgtggatttcaaaagtttgtcttttgaagttttccaaaatatcacaaaacagtctctctttgcaccttatttgcgacgaaaaaagaaaactgtcgcatcttgcaaccaattacctacgtattaccaactatcgatttttgggtttgaaatattaaagtttggtctgtttatatgttttcttagacgttgatactttaatttgatcgatattagatataaaaacataaccaaacactttaattctgaaatttacaaacgaaacattaaaaaaaaaactaatttatataataagatctatgttcattaaattcattgccatgattgatatttttaaacaagttctagaataagttacgaaaccaatgatttatatacctaaagttctgtatattctctatatcattaaaatgggtgtttttcagtaatttttatcaaaagattggatcaaattatgtggatttcaaaagtttgtcttcagaatttttccaaaacgtcacaaaacagtcgctctttgcatcttatttgcgacgaaaacagaaacaagttggactttgcaaccaattactcacgtattaccaactctagattattgcgtttcaaaattttaaagtttgttctatttatatgttatcttagacgctgatactttaatt

SEQ ID NO: 19316 - DNA, 582 bp, Arabidopsis thaliana landsberg
ctactactagagaagtagagatggacagatggtaatggcactccaaactcgtcatggtatggtacgacttaactataggtatgttaatgacaaaattatctacccatcaggtagataaatacgggtatggatattgttggttcttgttctcagatgctatacaccaaaaacaaaacaacacaattattattgattaaggatttcgtcttttgaagcattatttcctttacgatataatgatctcttgacgaaggtcattaaggacatgtcttcatcactttggtgggaaaagatgtgaataaagacatacgaaacacaaaaagaatataaacaatcattccaaatcattagattattcatatccttattttataaacatgaataaacattaatagtaattgtattacatttgtacattcggtttgacagaaagtaaaagagcgagagtgatgcaggagtgaatacaagtcagcgtgaacagtacggtattattgttcactatttatatgcccatgatgcagcttgaacaaaattacattaatgtctctgatatttacttatcgggaaccataattagggata

SEQ ID NO: 19317 - DNA, 778 bp, Arabidopsis thaliana landsberg
cctactttgtaattggtatagcatcaaagcaaaaacaaacataaagatccttgagttcccactcacatattcactcaacatttgcatcacatttatatacatagaaatggaaagcgttagaagtttagttgaagacaaaccagtggtgatattcagcaaaagctcttgctgcatgagccactcaattcaaacactgatctcagggtttggggcaaagatgacggtctacgagctagaccaattctcaaacggtcaggagatcgagaaggcattggtacagatggggtgtaaacccagtgtaccagctgtgttcatagggcaacaattcatcggtggtgctaaccaagtaatgactcttcaggtcaagaaccagctagccgcaatgctaagaagagccggagccatatgggtgtaacagaagacaagagagtcaaatgcaaactaggatagaataagatgagaatgatacatatcgctgttttgcttcttctttaattttcggggtttcgagtatctaccatgcacggatatgttttcaacaagtgcaacactatagtttacacaactctagagctaattaagatcaagaactttgtatttttagttaccatactttgtaaatcaacccaatttagcttaagaagacttattagccattaaaagagaaaggatttgcttttccaattgaataccttaaagaattggttcaaccaaaaaaagaaaggggccctttttattttaatcattcaaggcccatgggggaaaagggaaggaaacc

SEQ ID NO: 19318 - DNA, 1866 bp, Arabidopsis thaliana landsberg
ggacaataattcaagtggaatatactcctaaatataacatgaaccataacacagaattaataaaaaaaccatgatgttatgatattgtattattgcttaggcatgatcctctgttttagaagcctgagtttccgatgacacattgactttttcagtagcagtacctttataccacaaagaaatcagtattagcaatttatgaataaattaactaatctattgagaatgtaaaaagttaccttgttcaatactttgagcattttttattttgttcttcagatgaaaaaggtatataacactgaagatcacaagtataaccactagtactgagaagattatatacttttctgtataatatagttaattatttttaaaaacttatatatgtttattgaaattagtactcattaaatcagcttcatgttgagttcgatatctattaattttatttttttgacggggcaggtcgatatatatttaatatcttttttttttttttgaatatgaatatctatttaaatatcaagattcatagcgtaaacaatgatataatagaattatttaataaaaataatggtcacaataatttacaatacatcacggaaactataacatagattcaactaataaaaccatactaaatatattgacaaatttgaaatgtgaacaaatgtcttatcattttcattgtccatccacaacttcattgtctttgctcatagaattattcttctttgtttgcggtgtagctcccgaagagactctctatttcttctaaaggcacaccacgtgtctccgggaggaaagtgaagaagaagacccacgcggcagccgcaactccggcgaagagaaggaatgcaccaccgatggtgagacccttagaaagagataggaatgtcattcctataataccactcattagtctattcaacatcactcccaaacttgctccttgcgctcttagcctcacggggaatatctctgaggcgtagacccacgtcacggggcctgcacctaatgagaatgttgcgacaaaagtcatcaccgtcgtaacggcgagccctatagcccacttgagtgtttgcccggggttcctgtcgatcaccgtgagactagttccaagggcggtcaaggaaaaaaacattccgcccatactcgtaagcaacaaggcacgacgtccaaaccggtccaccaaacaagttcctactacgatgaagagagtcttgacaactccgacagcgaccgtagccaagagctggtcattcttggacttcagtccagcccttgagaagatggtcggagagtaaagcacgacagcatcaattccggaggcttgctgggagaaatggataccaaggcatgctatgaggatgtgtcgaacggacggggttggtcgaacgagaaggtccttccacacgccttctccagcgctctttttattcggaacgactataacatcgtctgtcatatcatcggggattccaactgcgcgtttgatgtcattgagccttgagatggcttcttctttggtgtttgaggttttgtcaaggactttaaaagcgtcccctagacgaccctgcatgacgagccaccgtggagactcgggcattgccaacactccaatggctagaaacactgagggcacagctccaatacctaacatgaacctccatccaatgtgctctggaagcttggcgaagaagtaattggatacgtatcccaatagtataccaatgttgataaatatctgcatgcatataaaatcatatcacattaatataaacctaattttctttttcttatatcatataaactagtaaaaaaaggatcaattgaacctcagggaaagagctaaggaagcctcga

SEQ ID NO: 19319 - DNA, 1419 bp, Arabidopsis thaliana landsberg
atgctattcccagaaagggtcttcattccattaatagtttgctaattcctcagaaaattaaccggtggttgctactttactacttatgtaattccatattttaggattagttacagatttgctataaaacactaggttctacaaaactctctcatacttagtgcatcttgcttgcaaaaattggggatgggcacaggacaagtatttgctacttgacccattttgtaagggtaaaattagtattcgtatttgacttgtgagaaacgagtatcttcaatttcaaatatttgctaaaaatattttactttacttgctttgttctattacgtgttctttgtaaaattatttgcaaattaattgtaagtatcaaagttatgttacttattattccctttgtttcaatataaatgtaatttaagggtttttatattttttcacaataactgtagttttcaactttctgtataaataataaatatattcaatactttttaaccaactatatttaattatatattttttattaattgaattggttataataaataatgtttttatataaaaaaagatatattaaacgaatttttaaaaactttcttaatatgtgtgtaaaaatcttaaactacaatttatatgaaatagaagaattataattttagaatgtgaatatatgttctactctatatatacatttaatattattattttttgaattgtttttagttatatttaaaattttacacataaactagattataatctgtgttacattacagatgtaatgtttttgttttttgaagtaaaagaatattatagtataaagttgaaaatgtcatattatgttcaaatattgttttttagttgggtaaaattgtgtattatatttattttgttttaaaacaggttttcataataaagaatgagataagattgtagtgtatataatatggttttagttgtattaaaatggaattgtttgttattaaaatctgttttcccatccgttttggagttttctcaattgacatttgttttgttttaaatattagatttttaaggttttttagttatttttatacgaatgtttcgatttctggatagatgattggtggtaatagaattgtaattgatggtaaattaggaataaatggcaatgaataagatcctcttgttagactaaatgttgattatcatccatgtaatagatcaaaaatgagcagtagagaaaactaagaaacgtgatgtcgtaattttttagccagagagtattatatttttttatttattgtatagattagcgatccatgtaaaaaatttatgttgaccactgatgccgataatgcttggatggatactatttaaaacagataccggcatggaatttatttttattatattttaatcatgagtggctggctt

SEQ ID NO: 19320 - DNA, 889 bp, Arabidopsis thaliana landsberg
tatcctttagttagcttcgtctcagcaattgccggttggcttgagacatcttctcttcggaaatgacgaaaacgtgtcctccaaaccgaagctcaaaggcttgagagctatcaagcgctagtaagcaaaagttgtaaaattgagaaaataaggcaaatgacacaagcagtgtatcaagtacagtcgatgtaagtccctatttatacgcccagtgcgctccaagtcggagggccccgtctgtcattgactgttgctattctagcaaagggaaggtgttttttcggactttcggcttagagccttcgtccatgtcgcaatctgaatttgtcattctatcaaattaatatctcgaggggctactgttgggggccttcgtcttccaaaggtcctcaaaaacatgattaacaatatttggcaagtataatatatgtacaggaaccttcggactcgggatgaagttgtacacaatacggagagcagggtcggaacgaaggttgaaccagcgccgaagctgtgcgcaagggagcttcgactcgatagcagaaaaaggaaccgacttaaggaggaaaaggctatttagtcctcaatagattgttcttaagtcaatagtgaatatgaagggcatgaatgtaatttcacacgggctgcgacctgtgcctataaatagatgaacagtacccccgtactgttcacgctgacttgtactcgctcgtgcgttacgcttgtacttttaccttctgtcgagtcgaaggtacaaatgtaattcgatattgttcttatttatccaggattatataataaagatatgtaaataatgttatgtgattattcatgttattctctcatgtttcatatgcttctccatttatcaatgtaacatatgatgatg

SEQ ID NO: 19321 - DNA, 454 bp, Arabidopsis thaliana landsberg
cgtcaggtgattgagaagtactactcacggatgacactagacttccacaccaacaagaagatcttggaagaagttgcaatcatcccatcgaaaaggctacgcaacaagattgctggattctccactcacttgatgaaacgtatccaaaagggtccagtccgtggaatctccctcaagctacaagaggaagagcgtgaaaggcgaatggactttgttcccgatgagtcagccattaaaatcgatgatgttaaggtggacaaagagacactagagatgcttgcttctttgggaatgtctgatattgctgggatttctcaagtggagacacaacaagctatggcacctgctgtgtttggacgtcccgcaggaagataccaacgctaagtttattgggtttcaatcaaagatttcggagacgagagattgccttattgggctagtatggattcaacat

SEQ ID NO: 19322 - DNA, 554 bp, Arabidopsis thaliana landsberg
  unsure (1)..(554): unsure at all n locations
tgaaatgggagaggcaagaggtgtgtgagagagagtgggaggtgtttctcaggttgggaatgaagttttgtgcgtactctgctgaggggaagagtgtgggaggtgtatataaaggtgcccccaaaagctggtggccattggggaaatctgactgaaattcagttgaaccggttctaaaaccggttgaaccggattccaccagtcggttttcggttcactggcggactcagtcggagannnnnnnnnnnnnnnnnnnnnnnnnnnnnnnnnnnnnnnnnnnnnnnnnnnnnnnnnnnnnnnnnnnnnnnnnnnnnnnnnnnnnnnnnncggttttccaaaaatctgcacacgactttttctgacaggactgactgacagactgtcagtgacagaggggaacagtgcagaaaccggttgaaccggtttgcaaaattcggttgagtcaggccgaaattcggttgctccgtttttcaaattcggttgagccgggccaaaattcggttaggccgttttccaaattcggttgagtcagccaaaattcggttgctccgttt

SEQ ID NO: 19323 - DNA, 560 bp, Arabidopsis thaliana landsberg
acaacgacacatccacaagcatcaagctcaaattgtgaattcaaatccatcaaaaacgaagagctaaaaacgaaagttgaaggaacaaaaaggagtcctttttttgtggccattattgattccgagttattcaattagatcgagaacccatcacaatctaacagttgtacaataaaaatcaatcctttctgggaatttggggaggagattgattacctctacttgctttctggaagctttgacggaaaagcttaagaggggtcgaagaagcttcggagaaaatgaagaagaagaagaagttttgaaagaagagtgagtgaagctgagagttgagataaatggaggagaagccgttgccattgttgttgtttctttctaccttattttttttctctttgatctgatatgtcacctatttttttgtttttataagaatcagcccaattctaacaaaaaatcaaaatgtttttgtatagagaaattggcccaatagcacattttttcatctctatgacatttgggcactttatgtagacaattcaattagtcaactacaatac

SEQ ID NO: 19324 - DNA, 687 bp, Arabidopsis thaliana landsberg
ttgaattccctacttagaaccctaaaactcaattaagaaactactcactcatagcaaaatgaacaacacaaagggatatgaaagaaaacataattcaaattgaataaatgagataaaggttcagaaatcttctccaaagtgtcaaagcggatgaatctctaatcccaaaggtgtttacaaagaaaagctctcaaagagttgtagaaaagaatcgtaaaagaaaacgtagaaataaaattaggtctcttgggtttttatacccaattactgaaaaagacggataaatccggttaaggaaaaccggtttggtcgtcgagaaggttggattgatcgatcccccctgggatcgatcgatcccgagctggtgggtcagattcttgttttgcatatgacgtccatcctggcagatgatttgtcttcgacagatgtgttgttgatcaatctggagctggctgagggtttttgacgatgaacattggatcgatcgttctaatgatgggaccgattgatccaatgttgctgactccggtttctccattcccaccgttgtttcgggtccaaatgagcctgataagtcccgaaagcatccgcgtcacgcttaaacacctaaaagctgcaaatgactcaagacacaaccaaaaagacgcaaaagacggactatgacacaacaaacgactcaaaactaaa

SEQ ID NO: 19325 - DNA, 621 bp, Arabidopsis thaliana landsberg
tagtaaaagtcaaaaaaaaaatgagttggtagttactctaatggatgaaaaataaagaacttctatttactacaaatatgggagtttcctaatcggaaaaagttgtggttttaatcaaaaagaaacaaaaaaagaaagataatacagatctcaaagacttttgtgaaagaacaattttaacatagtaaacagtggcggatccacggcataagtaaggtgggcacgtgccctatgctcttttttccaagtaattatgttatagacactaaaatactccacatttataatacaaaataaaaaaccattaaaaatgccttattagccaattagaagtacaatgtgtaacaagtgtaaacgttggttatgagatatgaggtatcgttgagctaaacaaatttaaacaattgttcagtttattttgctaaaacataattgttcaaaatgacaaatgtgatagtagtgaaaatgtttcaaaatagtgaagaaagtaagaaatgttttaaaaaaaataataatataatgatgtaaaacttattgtgccctaagctaaattaggttctcgatccgccctgatagtaaacatatatgggtatatatatatatatatatatatatataaat

SEQ ID NO: 19326 - DNA, 2409 bp, Arabidopsis thaliana landsberg
aggtacatttacaaaaacttattttaaattacaatgggttgttgttatttctaaactgatcctacagaccaataaggggtatggagttaatttgaaaacacttacaaaaaaaactaagatataatttagcaactttaacattttttattatgtttgtagggacattaatgggaaactggtgtagttgtgtaacaaaagatgaaaatagtgataattctagtagctctcaaacttctacggataaagaaagtagtgtgcaagtttcttctgtgagcactacgtcttcttcagagatttcatctgaatgttcttcttcaaaatgatcatctcaaagctcccaatgatggaagcgtaactagtgagcaaatgtcgcatggatcatcttcttcatcttatcaataaaaaaatcttcaaaataaataattttctatgtcaatttttatattaaaagaaactttgttaaaaattatgactattaattaataactatattattacataatcttttaaatataagttttagttttaatttttaatagttgctttatgtcatgctgatgtgttgctacaacaaaattcttagcaaaatttatgcatttttttcttaaaaaaagagagttctataagtataatccaagatatattcttgtacttaatacgaataattaaagttatgattaatccataaagttctatttcgatgacacggtgtcgtatttgaagcgacgtggcaaatccttattggtctatatgacgcagaacgggaattgctctgaagaatcctttctcaggcgaacggagtttggagtcaaaatccagagcgcggggaaacgaaacgagccaacaaatccgctagtgcttgatctaggcaatggttcttgtacatgttaccacctatttgtacaaattgacttccataattgtatttttcttttgaggaggtaaatgattatagtcagctaactcaatagatgttttaacgtggcaggacagatatataagttatatatatggggttacttgctgtcttttgtccaaactctattaacatccacgctggtctgaatggccttgaaatcggtcacacagttgtaactgccgctgctgtaaatcctatggtcatagataatgtgtctgaatttttctctctttgccccttttgggttgagatatgatgcgtcccagttacctgtagatcctgatacacaacgttatgcaaatcggagcatctgtggatcccgagtatcaccacgctcgtaccttctcgatatttcttcatcaaccgctgatggccacatccttggcaatgcttgcttacaattggtaaaatccttcacagctttctctttcaaacttattttttcttgagtgaagtaatgctttttctgaccagttcccgcaatcgtctgctgttaggtatccttcttcagtttttgttggagatacttacacagtcttcgctggaacgactttggcagttgttggtattctgggtcacttcaggtatacttccaaacccacttaccttctctgaggcacaggcacgtcactaatacatggaaactaccaactctcagattcatcatttgcatcatactatccagctagtgtatgaccatgcaactaattcccatgccatatttctgttctgaaagttcgcttttgcagtgaaaccctcatcttctttcttcctcaagttctgaacattctattgtcgcttccccaggttcatatcaactgtcactcttctatggcatacttataatcttgtcaactcatgtttcaaccatccaacatactaaatatcaaaactctttagcttgctgggattgtgaaatgtccgcgccatcgtctcccaagttaaccaccttttctttcttaccttttgtagactgattaaagaactgtcacatcactcatcttgtcttttgtaaactcactcatcacgagggagtttggcgttcaagcaggtccaacatatccaatttgctacgaagtcaagtatttagtgagtcacagatgtaacagcgatctatcaacctccaaatactttgtttctttgtccagagaagaacgaaaacttttcatttttacgaaatatttacagtcttagcaaaaaagaagaacgaaacagagtacctaagctacagcctacatgttagatgaatccgaagatataatcaaacgtaagacatctgaagcattgatgttaaatctcgatgacttggaaaacaagaaagagattttcagaacgttttcaatttcaaatcccgaaacggagaatattactggttggaaaaatttcgaaataaatttcctgtgcttttcgctttttccctggctctcgctttgttgtaggtcttgatagcctcgctacactgacctgacccatatgatatgaaaacactc

SEQ ID NO: 19327 - DNA, 578 bp, Arabidopsis thaliana landsberg
atatataaaaaagcccactatactttgagtctttgatcttattttcctttgggcctaatgcaaactaagggtgggtgtccttggaaattattcaacactatacatatgtatacagaaaaatatatacaatgattacagatttacagtttctctcttattgaaaaacaataccatcaataaaattaagaaagtcaagcaaatagatcctttcaaagtttagaagttgctagtttgattagatctttgcgaagtgttttgccggatgcagtctttggtatggaacttataaatgcaacctttcttattttcttatacggtgccacctgctcatcaaattatttaccacccaaaaatagtttaacttttaagtaaaacaatatatgataaagaagatgttgtacgttctgtgattatagaagtacctgattagagatgaagtcaataacttctttttcggagagattgctctcgggctttcgggctacataagccatcggatattggccggcttctctatccggaacctgtacaatgcacaaaagaacaaactacatgtttttgatatttgaatgacaaaa

SEQ ID NO: 19328 - DNA, 400 bp, Arabidopsis thaliana landsberg
ttggttttgatgtctggttttgattggagaattggttttgatgtttggttttgatattgtcttgtttctttcttaacaatgtattgattagagtccgagtgtattgtgtaagtgtattgtgtaagtgtattagtgtaagtgtattagtttgcggtatctagtttagatgtgaagtgtctagtttagttgtgtaagtgtttggtttagttttgtaagtgtgttagtgtattgtgtaatgtgtaatgttaagtgtctactttagttgtgtaagtgataagagtgtaagtgtattgtgatgtgtctgcttactaataagagtccgagtgtattgtgtaatgttaagtgttcaacttacttgtgcaaggtgcgtgaggtctattgtgatctctagcatgccgtt

SEQ ID NO: 19329 - DNA, 615 bp, Arabidopsis thaliana landsberg
atcagcagaacaaaaacctcggaggatgggccgactaggtcaggttgttgagggaggcggcaaaatacatatgttcgccatcgggaactacgttaataatgggttgttacatcactaccatgttaggggggcggagaagacgtctcccccaagatgggacttttaaccaaacacagccttttgatcgactggttggcagtaggcactctttctcctttgacttaaagtcggccactgatcgttggcctttagtctttctgtttgaggtggtgcagtacctatttgaccgctcctttgcctcaagtgtggttaatactgcatttgcatgcaatatcttagaggcgccttctggtaaacttaaacgaaggttctctcaagtatgctttgtggcagggcagccattgggatatcacggttcttggcctactttcgcgctatcacaccatatattagtgtgggggtgagcgaaacaagggcatactggagtacgctatacatcgtacgcggtacacggcgatgatgacgccaatgccgatcaggaagtccccaaagcctatgaatccgctatgggaggatagagggacgaaataagcacttaaaagggaccggaccccc

SEQ ID NO: 19330 - DNA, 641 bp, Arabidopsis thaliana landsberg
  unsure (1)..(641): unsure at all n locations
tgaaggaagtgaagtgtatttataaatgcagcatgccatatgcattacatgattcatttgcatctgaagtttggtcgtgacctatggtccgaccgtaccggtacaacttagcatcgtacgttgcccgaggaggggtacgatgcggcttcataccttagaggtatgaaggcagaggacatatgcattgcatttatatgcattcattgaagtgatattagcagatgatgtggttttatactctcagaggtatgagggcagatgacctacacattgcattcctatgcatatattgaagtgatatctgcaggtattgttgacgcagggaagggttatacaacctattgtggttgttcgaggaaatgagatggtattggttatattgggactattgagttctgtatctacaagtatttctgatctcaattgtgattcctttaaaatgttgtttaattcaatttgtggtttaaatatctcgtcaaaacaatttgcttgctgagatgtatcactcactcttgcattactcaatgcaggtacttgattcatgttgggaatgagggaagntagcagcacgttcacttcactattataataacgatgcccagttgcagcgatgatttaattagaactcgatgacaaatgat

SEQ ID NO: 19331 - DNA, 551 bp, Arabidopsis thaliana landsberg
gagaatgaaaagcttaacaaataaaaatatataaaaaatgcctgtaattgtttttttaaatcataaagacttaaaatttttgttataaaaatatgctcttctactataatgtcctgaagtcccttgattgtgtagcacgccggcctgttcctaatttgtgtcgaataattcattatagaatattttaactaagttattaaaatgtagaggtaaatcgagcaaatatttgagacattacccgcacgaaattgttaagcctttgaagaacaaagtcttggtaaccagaaatgtgaggaaactcaagacgccttgaaggaatatcgtaatagttcaagataaaatcgttaggccctgcacttataaccaccaaagcattgtttatgatctccatagctttcttgtctcctacgatacttttaagacgagcaatgtaactcttgagcatctttggttggtccgagatacgaatcgcttgagtagagagactggtatggtcatcgtaacccgctccagctgatgcaaaacagacttcgggtacaatctcttggtca

SEQ ID NO: 19332 - DNA, 1505 bp, Arabidopsis thaliana landsberg
tccttaattttatccacaatcctcattctaaacccatttcttgtgccagcagttatatcattcacaaaaaaaaaattagtctttcgattcgcttgttcttgctatccgtgagatggaggggtttcatatggtctcagatatgtgtcctcagatcactgggtggcgaatttatgtctttgtcgtgagagtcttcaagaaggttatatcgcctaacgtcttcgaactcggccttatcctggcagattacgcggtaatttccgtcaaatcattatgtgtttttctcgttcattcgcttaacttgtatataaaactgtctactatcatgttctgtagggatcccattcccgtattgaggccaccgttgatcgtcgccttgctccattttacgaagaccgattcgttgaaaatgagtggaagacgatcacctctttcttggtccgtaagcaactgactcagtcagagcaacaaagcatgaatacggcatattgtttatggatcggaccgtcgtcgttgaggccccaccgagatcaccaccagttccagatttcgatttcactcccttcgactacattttggagaaatctgcttacaagaacgttttagtcggtgagcaggatttctcccgatgctttatttattacatttttgaaactttttaattattatctttgtttctccatcatctagatgtcgttggagcgttggttgatgtaggcggattgactacagactattacggtctcaaactgagtttcaagataaaagatagatagtaagtgttcttttcatttgttttatttacaatgtcactctaaacgctaactgtccttatttctaacgtagcaatgaagtcttggagtgagaagctcgcaatcaacaggcggaggacttggatggttactttcagagtttgggtaagggcaattttgttgtcgcactcagcttttggcgtttaaccgaattgtctaacccgaagcttgcgagccatggtcctatatcaaaggtagttgccaatccggacatattagaagttgcggatatctcgatggtggttttttagctagagggaatgaaccattattctccgttttaatataatataagactacatttcaattaagttttctttcccagttgttgttgttgtttccataagaaccaaactacatttcagtcgttgttgtttccagtttccgtttaaatgttaatctaatttgttgttttatgtacgtgccttgttttattgttcaaatcctctcgcaatgtacgtatagtttctggtgtacgctatcgtgtacgtatattaattttggtgccttcaacatcaaaaactattagatttatacttatgttgtgtacgcaatttcccaatgtacgataaaccaagtttaatgtactatatagtgtacgtacacgaagacatctagtaatatttaaagtggtaattcattcaaaagccagaaacataaaaaggacaggcagtttatataaagggaatgcttcat

SEQ ID NO: 19333 - DNA, 603 bp, Arabidopsis thaliana landsberg
cctatagcggacccaaaagacgttgttattcctcaagatttatcggacctgattctcatacctccacgcagcagacgaccacctagtagaccacccaccaaaaggataccatctactggggaaaaccgggtaagtttttcccccatcctaactgctatgcaatttttacttcgttttaaccgacttactattttataactttcaaaaaaagaggcagaaaagactcattcctaatcaatgtacaagatgtcaaaaaaccggtcataacaagaagacatgcaaaaaccctatttagtcctcgcgatggttatagtttacgtctttgtgcttttggaagatgttctacgtacgtttttggaaatctttttatcagtctatgttgtaatattacatattattttgtctgtacgtacgtttgtggacctcgtattatcggtgtatttgattatccttcaactcttttgtcaatattgttggagtctgtacgtacctatgataaacgtattcatttgtacgtacacttcgtaaaattaaatataaagagttgacgggtacattttttactaaaccgttacatcgatttgggaccaatcatcgcgtttt

SEQ ID NO: 19334 - DNA, 1735 bp, Arabidopsis thaliana landsberg
gtactctggttcccatgttatcatgatcataggcaagatgtaagaaatatttgtagattaatttttgtatgtgattataactttttttctggtagggaatatacaaaccaactgatgatgaatgtgatgcttataaaaaaactccttaagtttataagaagactattactcacaccatgctcttgacaagtattttcaactgatgaatatttttacgagattaaatttcatatttttttaataatgatgatttgattcacataccgaatactcacatgagattaataattaacataagcaaaaggaaacttatctttgtatattgttaatttgatttttttgtttaataggggctggtagagatgaaattgatgacactccatacttcgagatgcaggatagtaatggagatgttgaccatggagaccgtggttatctcctctttccccgtcttccatactctctggtgctcgagtatgttgagatggtggtatgtattttaatttatcataaaatgtaagtttactattttgatttgaaataaatactaatatactactttcatttttcttttgaaatgtatgatctctcaatagaagtttgtcatccatccgccatttcaatcctgtttctcacccctcctcctcctactttgatcttttatctatatttgttaaatcatgtctaataactttatgagaaattcctaaaaatagcactaaaacaagttttatggacaataatagcacacactccataaacttttaaaaatagcactacttaaattactatgaagtttttgttctaaaagtattattactaatatattttttcaacaataccataatttttatataaattctatcatccaaaataaattagaaataaatttaaagtattatatttgggttctctatttccaatttagggtatatattttaaccatttaaaagaaattttgattccttttaattttagtttatggtattatatttgggttccctatttccaatttagagtatcttttcactatttaaaagagattttttattttaatattagtttttgtggtatttgggttctctatttctaatttcgggtatatatttttactatttaaagtttttttttaattcaattaaatattagattagtgtttgctctcatttttattttctatcttatattttaattaagtttaattgaagtttatagtgttatttgtgaaattttaaaaatattgtgctaattttggaagaaatttttttttggtgatagttttgtcaattgccctatatattaaaccaagcttaatataataaaatatttaattataagattttagatagaaagtatttttaaaagggaaagtggtgttacagtatttgaaaaaggacatttttgaaatttctccaaatttttactatttaagatgaataaattataaaaaatgatttaattcattccactgaagattgtaaaaagaaatgaccaaattataaaagtagatttttcaatttatctatctatcattttgcagaaaaataagttgataggtatttaaaatttccaaaaaaaaacaacacaaatttgtttcctagccattgagagaaaaaaaaatctcaattattcccagtcattcatttacacacaaccattttccaccctaaaaattcaaccaacatctatgaattttaggcaggttttaaaaaataagttgaaagatattaaaatt

SEQ ID NO: 19335 - DNA, 454 bp, Arabidopsis thaliana landsberg
aggaatctaaatcttataaatttggggttcttggattcatattcttataaagtcagtcagagttttgtggtatttaattaaaacaaaagaatctcttattgttaatgatttaaattattatgttattggttcatgactttctatatttttgtttacaaaataaaatcataaaaagtaataaaaatattatcaaaatagagattgtttaagaaactttacaagattatgaaaaaactctataagaatagtttaaattctttcatttatttattttctaggatttgattgaagtcatcaatattctttgtaaactaagaaccaataacacccccttaatatttcataatattttgacaaatatagatttataaataacttgattgaaacatatgttatagtacatgacatatgttgatttcacacaaaataaacaattaaagtaaatctgaaacta

SEQ ID NO: 19336 - DNA, 940 bp, Arabidopsis thaliana landsberg
tgtgctttaggctttttcgtagtgataaatgggcctgacttgagttgctttgcatcgttaacattaagatcctcgacatggtctgtaatagtgtaaactctacaatgatcctccaatccttggatttcaactctttggagagtttctctttcgggattgaagtagaagacataaaacgagttagatgcaagcttctccggcaaaacaatttcacatgtagcagtcatcccaacggcaagagaaatattgtagaacatgacttcatgctcaagaaaagtgcagtcatatttcgaccattcatgtttctcgacatcctcaagaacccacatactcaactcaaaggtacgacttccattagcgttaccatatttccaatcaatcccacctaattttcccttataatttatcaaatgataaaagcaatctacgtcaatgaacgtgaatttttcaaatctaacatcaaagcaaactatcacaaaagaccttttgttaaccaagggttcatcaatttggatagctaagtaatataaaaccccattgatgcatatcccttcagaaaaaggatcatgagttaagggacaatggatcttcctccacctcattcttctagttctcaaagtcagaattttatgatcatcaggaccagatggataagccatgaacaataccttgaattgcttgtcaatcggatcaaaccctaaatagctatacgactttacataccttctcagtttaggtaagaccgtatactttcccgtgatagggttacatatcgcacgcactacatcttcatcattcactgagatcctcatatcagagagatagatcaagccagaagcatagctacaaatttctcggctcagagaacttagtatgaaaatcggcagctactacaagagacgacttttcatatgaatccgagcctgagtcgcgagaagag

SEQ ID NO: 19337 - DNA, 782 bp, Arabidopsis thaliana landsberg
caccatttcccgattcgttgcgcgcatggcctctgtgtcatcccgtgaagctcctcgtgcccattaattgaactctcccgccgtggtttggccggagcaggcgccgccgtcgatccccgccgcctgtgttcgtggccaggggagctccgaccacctctgacgccgacccgcacatcgacgtgaccgtcgcgacctcctgaacatcaccgaccacctcgccggacctccctcgccgccggtaagccgcgccacccttttctttcccgcagctactgtttcagttaagggagggactgcaggtgagagggagagaaatccagggggttaagtgaaaagtcagagattcaagtgaatagtggcgtaagggtagatctgcgaagtttgattcggtttaaacccagggacctcggcgcaaactgtttttccaggaaactcttattaaatctgtttttaaattgaacagaaactttaaaaattcataacttctgtttagttcatccaaatttggtcaaaccaattttgccagactttaaataatgtaaactacttaagaaaaatataaaacccctaggtactatagaaaactttaaggttctgatttaattatagttttagccaaaagctcaataatagaaagaaaaatagttgtgctatttgactagggttagaaaaatttggggaagtttatatctacctactgacctgtttaaaaatgttaaacctctctgtccactccattaagttagtttttatcccttattctataatatggggatcctgta

SEQ ID NO: 19338 - DNA, 440 bp, Arabidopsis thaliana landsberg
  unsure (1)..(440): unsure at all n locations
ttttctgaagctttcttcaaaaatgtctgccattcagggtgtgttggatgtatctcagctgaagaagtgtgttcgattgccgaccgagatcatagcagagccagaattggagatagaaccagatctatcgtaccaagagtaaccttccaagattctggattgcaaagaaagatcaacttgggctaaatcgatcaagatgtacaaggtccagtggagtaatcactcagaggaagaagctacttgggaaaccgaggaattcctgagatccaacttccccgattgcctacctaaggaagctggtacgtaatcacacccaacccctcctgctgcacttngaatctaaaattcagaaatatgatcttaattcagaacgaggaaatcatgaaacaaatttaaaaaggacttccttctgcagttgcaaagagaatgacattcgagag

SEQ ID NO: 19339 - DNA, 1024 bp, Arabidopsis thaliana landsberg
agctgcttgggtggacactcttcgcgaatttttcatcttctgaggtaagagtttctatggctaccaaattcttatacaaagttataaaccaaataagtgttcttagttatttttgttttgttttggataagtatgatgttgctccatgggctatagaagctgtcttggagtatgtaaagcagagctatggcaatcctcctgtctacattcttgagaatggtctctctctctctctctctcattctctctacctctctctcgttttagtcggttaaatctcttgttaaatgtcaactaataggtcgaccgataaatcgagattcgcagttgaaagaaaaggacacaccaaggattgagttcttacaagcttacattggtggtgtgctgaaatccattaggtgagtaaagtttcttattgcatattttcgtcacttctcttgtcagtgtatgaaagaaaaaaaaacattactacatgtaggaatggatcagacacaagaggctacttcgtatggtcatttatggatttgtccgagttactgagcggatacgggagtagttttggattgtactctgtcaattttagcgatccccatctcaagagatctcctaaactctctgctcactggtactctggttttctcaagggaaaatccacctttcttggttcccaagtcatcacccaattgcatagcaacttctcttctttctcatagtacttgttgctaatttgtcaaattcttgaataaagatgatgtaagattactgaaacacaagcacatcccctatcgtatcttattatataaagcttgttttcaaagttagtaactcgaatgatcataacatgtgtccagtctatcgatcatatgttgacactgcagccccaccagaacaaagcaggcaagttagtggctgcgtttggggttgactaaagaaaggaatgaagggaagtaactgagggagatagagagaacatgagaacctaagagaaatcttgtgttcttctgaatttgtttgaataatttaa

SEQ ID NO: 19340 - DNA, 505 bp, Arabidopsis thaliana landsberg
taccagcaaaggcttacccagtactgttctctgaatcatcaagattttgctaatcttgattatgatgctactggtgctgggtacatgcgaaaggctactgaattccgttctcggattcaacaagagggagctaatcttgatgatgatgatgctgatgctggtcaacgcattgttctgccacatcttctagactatagacttcctaaagggatgagtgtcaagaatttagaactatcaagctcacaacacagtttggggcttggtatgggaatgatttttggctagggttcaaggaaagagatggatttgagtttacgaatccaactgatagtaagttcccacgattcactctatttgttcttgagtattcagaagtatttaaggcacctaaagatctgaaagaaaaggtgagcaagagtgatgcttatatgtcagccattcatgatggttttttctgtctccgtcatcagtgggattctctccaagatgttaaatggagggatgg

SEQ ID NO: 19341 - DNA, 397 bp, Arabidopsis thaliana landsberg
cggtattttaacatatgcattgtgcagggttatgaggagtatatgattttgttgctggacgaggccaaggaagcgcgcattatggtgaaaaccagaaaaccactatggtgcgttactcgcgactcggctacaagactcctgacacattaccatatattggttgggcttaaggcgctaactctcgcagcatactggtataacaggtcggattttgcttaaaggagacaacacaactgtcacgatgaacgcagaagtgccaaaaatatcctgtacagaaccttactttcccacatgtctcaatgtctctctccatggatgctgagatacaaactcaatccctgatatatcctatcacaagggcacgagacgtcagccgcagagcaaggaaagacctaat

SEQ ID NO: 19342 - DNA, 1195 bp, Arabidopsis thaliana landsberg
  unsure (1)..(1195): unsure at all n locations
atcctaacacaaactaaagaaatacctattattatttaataaatttagtaagaatacctattattatttaatgaaccatccaaaccatacttacaaaagtagcagtccctatctaaatagaaactgttgatctcaaggtttcatttgctaaaaaaaaaaaaaaaaaaaaagcaaccacatttctttctctatctcactctctcgtttaacattctcatgaaattagggttttagaaagatagatcgattgaagatgaggaaaggtaagagagtgataaaaaagatagaggagaaaataaagagacaagtgacattcgcaaagagaaagaagagtctaatcaagaaggcatatgaactctctgatctctgcgatgtccaccttggtctaattatcttctctcactccaacaggctctacgatttctgctccaactctaccaggtttatatataaaatcatacatatgtgtgttcttgttttggtaaaacaaaaagaaaagaaaatgaatgctctttaatatggacagaaaaaaagagttattgaagtttttttttctagttgtaattaatcaataccatcatcacttggtttcatcttttctttttcgttggtttacttctttttttttgtgaaactttcgttgatttacttaagagaaataaaatgctgacaatcttgcctaggaaatgagatgattaatcaaagtgttgcttcatttagttttttctgttcactcgtacgcaagtttgaaatgcttttggtcatctatttttttttcatataatttggtattgtatcctttatatgctttcttgggatattttattatgtaccaggtttaattctatggaaagttatgatctatgtaggaaaagttatgatcttttgtattatggatccaaaagaaaattcatattaaagttcattcagaaataactcatcttgatataaaaattttcttctgttttctagttcctaattttatttaatttttgtaacatcagcatggagaatctcatcatgagataccaaaaggaaaaagaaggtcaaaccactgcagaacacagtttncactcggtaattatttttgttataattcacaaattaatatttatcttcacatgttttaaaatttatgggatgtttttatatgaaatataaataaaaattttgtttgaaaaatttaatttttttt

SEQ ID NO: 19343 - DNA, 412 bp, Arabidopsis thaliana landsberg
gcacgaacaccagcggcagttgctgacgtagccgacacggcacgagcagcgagaacaggttgctcttgtgcccatacgcacgaaagaagagaacccggcgagtgctaaatagcacaagcgccaaactaccgaactctcgcgagatgagtaaaacacaggagctgacagaagcgtgctgccggataagacctttactgcttcggatacaagaggatgcgcttgaatccctatcactacgagcaaacaaaggaactagttgaatcacaaaccatggcccagactcagactggaaacgagaaatcaggaaagtcggagaactagaaaaaatgggatcttacgaattgttacctctgccgacggggactagaggcaaggaggagacggggacaccggcgaaagcagagggtagggt

SEQ ID NO: 19344 - DNA, 685 bp, Arabidopsis thaliana landsberg
aacaaccaacttcaaaacaaaattcctggcaatatagaaagcataacgaagcgttttacatatcaacagaaagacacgaggctcatccttccaacacgaccaacctcacccaaatcggagctgtgtaataagcgttatcaatatttccatgtaacatatgacatttgtcaaatcccagacacgaactgcgagaacaactggattagaaggtagatttccaacgattcaaaacacatcaagagcccatcatctacatacctttctgaatctctaaggcttatctttccaacaagatcaacttcgtttcattctattatgttttccgaaagttataggcgtttctctcaaacatgcgtaattcatatgaccccaaatccatctccatccgacctgccaggtttcaaattgatttttggacgatctaaacggaaccaggatccaatctccgcatcattatgaagccccaaagcttatctttcttacaagtccgatctcacctcaatttatgccgtctaccatgagttcttactgtttttctgcgacacgcacatcctggccgtaaccctaaggcgcatgtctgctgttatcggatcagccagcttcgtgaccaattttccggcgaactactaggaactacaaaacttaaaatatattcgatctgaaacccccggggccttatcttttt

SEQ ID NO: 19345 - DNA, 1173 bp, Arabidopsis thaliana landsberg
agaatgaaccttcaagattcaaaagcctatatcctaagaactccaagacaaacagccacaatgagatttttcttaatctttgtgattttgtgtggtttttacaatgaagcatatgggaaaggttctttagatattgatctgaaattgaaggctcttaataaacctgcgttgaagaccatcaaggtatggactgaatctgaatacgaatatataacatctttgttatagtttttggtttctgagtttccaaatcgattgtaattttatttgtagagcgaagatggagatataatagattgtatagatatctataaacaacatgcctttgatcatcccgctttaagaaaccacaaaattcaggtaaacaaattctactatataacgatcgtataaataaaagattttgtatatacaaaatttggttatattatgctttgtatataaagaaaccacatttatgcatgcagatgaaaccgggtgtgaaatttggtgcaaagaagactactataccaaacgacggttcttctgaacacataaaatcttagatttggtctaaatccggaaaatgtccaatggggaccataccggttcgtagagttagtagagaagacataagcagagccttttcaccgtctcattttgggaggaaaactcctcacaaatacagctttctagacaacgcacttcaacacaagggtaatttcactataacacctgaaaaaataaacgaagcccaaccaaggttaagatcggtacgtacagtgtaaggtcttaaatatatttttttcagactaataaaagcttcatatggttaactagaaacacttatgctttgtggatgatggtataggaggcatttattgtggccctagggttcaattttgtcggagctcaatctgatataaatatttggaaccctccgagggttgaagctaccgactacagtactgcccagatctggctggttggtggtctctcagagaattttgagagcgttgaaggtggttggatggtacgtttccattgctaaaagtattatactttgctttagaagtaaaccgtgacccgattaacaaaatcctatatttcacgtgaatccagctgttttcggagactcacgtaaacgtctaatcatctcctggactgtgagtaacacttttatataactccgga

SEQ ID NO: 19346 - DNA, 2117 bp, Arabidopsis thaliana landsberg
  unsure (1)..(2117): unsure at all n locations
attgcaattattattttatttcttaaattgtaattatttctgatactacatcttatcaatattgtttaaacttgtatgtgagctatatcaaactaaaaaaaactaaaaaagaagaaaaaaattgacattggcaaaattcagtaccaccaaagaaaaagttgattgattagaatcattagatactgactatcaagaatttagaagtattgtacaactccggtcattatctctttccaatcaccccatctgtggttatgaagtcaatnaacctttnaaacaaatcaataaaccccataatttaatccaagacaagagaatctacgttgtgagagattggactgcatgcaatcttacttatactgatgngangcnnncttttnaatatgtaattttgtgtaaataatctatgcatggttgttctatgtatcacgatttaccgccaacaaaaagattacgtgtttcaatagtaagtctttcaatactatgtggataaatgaacgttgtttttgtttcctaaaaatattaantctttcaatatataacaatacngacggtttaaaaggggaaaaaaaaacttgaacataaaagcaaaaaaattgttgttgaagatgattttcgaaattttctttctcaaggtgccacactgccatgctgtgaatgttatcaatagattaggctaaaaccctacatcatatttttattcgttgcgcaaaactataatgaattcgatataagcaatgattataaagagcatttcaagaaatgctataaaaaataccgtagcatgattgggttttaatcattgctctatgcatgcttattcttaggccctcacgccctacatcattattctcatgttacattttcttggtaaaagcatctaaatctttttgtagtgacagaggaaagcatatatattctcgagaacaatattccaatttatataaatattgtaagaaaaaaagagtccaagtaatttcaattagttcaatttaatgtgtattttttttctttgaaaattttaaaaaggtgagtaagaagaccactggaattgtgttttcaacatcacttcatgacctaaagcaaataaagccagagatttagggcatctccatccatgagaaacccacaaagtttctcaaacaaaaaaaaaattaatattatattataatttgatttttttgattaaaaaaatatttttgttaaaaagttgaacaaatagtgagaagagaattgtcatgatgggttgtagagagtatctcaaagtttctgagaatctttctacactctctctccttcatttttattatttttatttttttaattgtgagaaactcttatgaaaaacccccaatggagatggttttagtttgaatctcaagtccgtcacgatcaccacgaggacccccaccaccaaaaagcttctccatctcctccaatggcaatcctttcgtctccggcaacataaagaagaagaaccaccatgccgccaccgctattccggcgaatacgaagaacacgccccctgtcgtgatcgccttcgtcatcgacagaaaactcattgagaccgtcgcgttcatgatcctattaaccgcaacacctatactcgctccctgagccctaagtctcaacgggaatatctccgagctgtacacccatgtgataggtccaagccctatggagaaaaaagctacaaatgcatacgtagagacgatgcttaaactcaatgcccacgctaaccgcccaaatcgctgaaccatcgtgagactaaccgctaaactggtcaatgcgaagaccatcccacccgtactggtcaacaggagctttctacgacctaccttgtcgagcaagaaagtagctattattatgaaaaaggccttagttaaacctacaccgaccgtggctagtaagagcttgtctttcgaaacaactccggctttcttgaaaattctcgggctgtacaacacgacggcctcaatccccgtcgcatgctcgaaaaagtgtatccaacggccgctatcaagatcaaacgcaccgcagtcgcggtgtttatcaccaactccctccaaacacttttaccgtgattcctcttcttaacgccgccaacaacttctttt

SEQ ID NO: 19347 - DNA, 954 bp, Arabidopsis thaliana landsberg
gggtcttacataattttatatacacgaattaaggtttatatagaacttttatgcatcaaactatatgaactaaataaaatttgagttttctacataaacaaaagcatggtccaaaacttacgtttacatagatgtcgttaatcaaactgtgacaacttgctggctacttggaacaactaaaaaactgtatttaactaaaacaattcagaactccttcatacgacgtcgttcttttgttaattttaaatttaattaatgggaaaaatgtcattaaaatcttcaactcattgcaaacattgatttaaatcctcaactctcgacgaaacaaaataaatatttaactttctaaataaatatctaatttttgttgacctggcgatattagacacactgttaagtaaattactagatcccgttaacggagttaatttttttgttaacagaggcccattaatgcaaaacgttattgtttccaacaacagagtgacgtcgttttgtaataatgactgaactaaattcccaaattcaatctaagatctctaaatcaagcaaaattcctatctctaaatccccatatgatttgaaactggagatttaattgagccgttatgacaaaaacgatgacgttttattgttagagtaaacgttgtcgttttcaatcaacgagtatgttaacacactaaacgttcaaggtctattaacctactgaacatcatgcctaatatagtttatttgaaaagtcaagaaggtttggtatttatttggaaagtaacataagtttgatatttgtttcgttcgccgagagttcaagatttaaatcaaagttttcaataagttgagaattttaatgacatttttttccaaaagataacatgtttgataaatattatttttgcattgtatttttcttaaaataccaactaaattataagaacagtgaagaaagaaaaaaac

SEQ ID NO: 19348 - DNA, 772 bp, Arabidopsis thaliana landsberg
actttttgttggaatatatattttatgtaattttaaatgaaaatattataaaaatgtgaaatggagaaattataaacaggaaacccgaaaatcataataaataaacattttaaaatctcaaaacacttaaacatccaaacataatattgaaaacaatcctaaatgcttaaaattttaatgaaaccaaattactaattgaattcaaagacaaccattggtgttcattgttgttctcatggaaggtggaacttcatttgcaaacttgttctgcatcatagtaatccaaaaatcaacatctttaaacttcaggagcattccctcaatttcttggtccgatttctggagcttttcttgagtctcaagatacatttcttcattatttggagatgcatcaacagtaggatcagctaccagaattgaaccatagccaaatttcttgcctttcttcacttgaacttcctgcaatttcaaaattgcatgttacaatttatataagaaaaaagtattataaacataaagtatggttaaaaaaaaacacatgaagtataattgaaaaaataatagaagtttcagcattttgtgtaagacgcaaaagacagactatgacacgacaaacgactcaaaactaagggacttaaaacaccaaaaacgcaacatatcaacggttagtgtccaaagtgtcaccatcgtcattgtctctttgactgagaatttggtgctccatgtttcgatattttttggcgatcaactagcttttttgcacataaaaaag

SEQ ID NO: 19349 - DNA, 570 bp, Arabidopsis thaliana landsberg
ctacagatgcactcttttaagaagataaaattcatcagctacggataccaaaaggacatctggattacatgattgcctacgatgcatcagttgtctttcttggaaagcacggcatcggattgtagatctccattgcttcgatacggacttgcagttgagcaaggatttcacatcaagtctctccagaatatgctccacaacatcgtagggtagcaagtccatattatgtctttgtctctaaatctgaatgatgaagagaggggagtccaaatatcctttatttatacacaacatatcccaatcccaatccaactaggaaagaaaaaaaaaaaaggaaactaaatctcaagttgtttctgaataaatataacatcagataattacgagaatttatatttatcccaactattttaaattggtttaaggtctagcatttatcccaactattttaaattggtttaaggttaaaggggtttcagagatcaatgttatttgtgttattgatcacgttgagctgagtgcaacttaaatagagagagcttacaacaaacatcgaaaatctaggaaggg

SEQ ID NO: 19350 - DNA, 1426 bp, Arabidopsis thaliana landsberg
  unsure (1)..(1426): unsure at all n locations
ttagctgtctatgactttgccttcttccttcaattgatagttttgatacaatgaaatcaaatcttcttctttttttagggtatttatttttggttatttaaattgtaagagaagaacgcttgcctcttagaagttagaagagtgaagataaaaaaaataaaataaggaagtcgaagtaacnnnnnnnnnnnnnnnnnnnnnnnnnnnnnnnnnnnncaaagactagcgacgtgaatctagagaactgtaagagtaataatatattctttcgctgtattcacacaagcttaagaaacattatttgaataagaaaattacactttaatcatataatagcttgtctaaatagacgtgcagaagataaatgtatttttataatatttaaattttaaatttacacatttttaaaattgatctaatttttgtttttcttttaaccgggactgtagtacgtgaatgaatttacttactctgttgaacaacacgacgtggtcggctcgtctcggataagattgagattgtctctttataaatatttgcaaaatattacacaattagcattcacaaacacagagagcaaccattaagtttcattcatagtgaaaattctctcatcttactctcacaattttctctcggcaagtctcgatggatccggaggcgaagctcatactactcatcttgagattcaatgctttgaaaagctatataaactcggatccagaagaggtcatgtcagtgattactcaaataatctctctggttaagtcaatggtgacggagacggagacggagctgatgtcactcatctctgaaacaatcgattttttcaaggagatggatttggagtcccagccgaattcgctaaggaagctcatatcactcatttctcgaacgcatttcgtcaactcttcagattgggaggagccggttccggagtctacgctcatgtcactaatcaaggaaacatggagtatgaagccgcagccggagctcatatcactcattcagaaaataatatccctcgtcgacaactcttcggagctgaagctcaaatcattcattactcaactaatctttctggacgataatttgtctgagagactgaattggaattactctcggaggttcttgtcactcagtagatatataatctctctggccacctcagtggattggaatttgcagccgaagcccgagtcggagctcatgtcactcactaatcaatctatctctgtcttcaactctatggatgttgattctcagcccgagcctctacggaacctcatatcactcatatcactcgcttctttcagatcctctcccaccaacttaagatattcgaagccgaacagggtggatatcttgaacctttttaaagacaagacggttgagtttgaaacgggctcacttacgaaaagagttg

SEQ ID NO: 19351 - DNA, 864 bp, Arabidopsis thaliana landsberg
cctcagcaagggagttctcgaggaataaggcagccattactagaggaaagaagcccgtggtgtgaggttggaactggtagatgaagattctgaagaagaaatggcttcatcgggggaagctgatcaaatagagaaagaaggtggtgatgatttataataagagaattgcgcaattcgaaacgagtaatacaggctgctgaagcgcaacgagtgtttaggaactcgatgccctcatcctgagaccatggagagactcgacatctatgatgatgtagactacatgtttaagcaatgcagcctgaatattcacatgtttcgaccaatgtcggggcatgaagaagagaccatccagtttctttcatccgtggaattgttcatatataaagagttagaggacgatggaatcaggctagacggaagtttgggatacttggagctctgtgtttatgacgtagagtatcggcttccaatcgagcatctagagctgatgtatgggtttccaagcggaaaagacacgagtcatcgttttgacaaaagagagcttcagtcattctgggccacgcttgggttttaacaggggttttcgtcctctaggacaaagagcaacgaaataaggagtctggtggttagatactatcataggtccttggcaagtgctctatttgcaagagagcggatggaacctttgtcaatggggaactagaattgatggagacagcactacaagagttgcttggtttagcatcggatggtacagttctagctggagatcagactgacacttcggtctgattctacctaatcgagaacctgctgagttacagaggatgggctatgggacttaagaaaccatgaagaatggtt

SEQ ID NO: 19352 - DNA, 3292 bp, Arabidopsis thaliana landsberg
taggacaatcattgttcacataactcaagtagttgttacgtacatccttactgtctattatgcaacacttgcctgtcctggttgctacaatcacagtgtcaaattgtttagtattgtatatctgataattgcttgtccttgttaagctcctccaaagcaccatatatgaagttgatcttgatagacttcttcagagtatccatgtatatctgcaagatctgggaatggaagagatacgtaggaggtacatctctttaaatgcactcttagaaattttgcaaatctatgtctgtttattatgtggagatttttcgtacttggcaatactaatgcattctcggttggtattttttccaatgaaaagagctggggcagatgataaacctctgaggatggtgaaaactgttctacatgaacttgttaagctccgcggagccgcaattaagggccacttgtctcttgtccctattgacatgaggccacaacccatcattctcgcttacatcgatctaaaccttgaggtgagacctccttagtcgtctaacttcatgtccagaaattttgacaaatttgctgaagctgagggtttggtcaaagagcgcatccaaactatttgctgttttactatgttttgagaaatttagacgccattggtagtaactatttaaatacctgcagactttagctgcagcaagaatgttaactgcaacaggtcctgtgggccaaacccattggacagattcaacagccaacaatccttcacctcctgcaaattctgccgatgttcagttgaagcaagagcttggggctatttttaagaaaataggtgacaaacaaacttccacaattggtctttacgacctctaccacatcacaaagtcatatccaaaggtaatagatatgactatgtatttcaagtctcaatgtttcctgttcttcatgaacaaacgagccaaattgtatgtacttacaacctcatcttaatgcttgtaggttgatatattttcccaacttcaaaatgctagtgaagcgtttcgtacttacatcagagatggtctggcacaggtctgtaactagtctcctagctttttactatgatttcgataaaactcaagttttttgtcttgaagttttgcaatcggttctgtaggttgagaagaatgcagctgcgggaagaacaccttcaagcctaccgttgtcaactcctcccccttcgtccttagctcttccatctcctgatattccttccttgtcctctttagatgtgaagcctttgatgaaccctagatctgatttatacacagacgacatccgagccagtaacatgaatcctggaggtagtttcctagatccttatccttctttgtccttccttgcggtgtttatatatatctgttaaaaacaaacatctttggcagtgatgacagggacgctagatgcaatcagagaaaggatgaagaacatgcaactggcttcatcagagccagtaagcaaaccgctgatgccaacaaacgataacttatcaatgaaccaacagagcgttcccccgagccaaatgggacaagagacagtccacacacacccagtggttctcccaatggatgagaaagcattgtccggtcttcaagcccgaatggagaggctcaaaggtggatcactggaacatatgtagaactagagaccccaagctttggagtctgaagttacataagcaaattcgccatttttgttacttctctccaattaatgtagtagtaaaatacttttcttttaatatacaaacatataagagagagcaatattttatggtgaagcggctagatttcaatggagttagtgtgtatagtggtgggagagtctgggagatgatgatgagtgtgccagattctttttaatatgagacaaaatattattctttctatgcttgtttacatctttttttcaaccactagtagaaacctgaatattctctcgactctgtttagatatgattctgatgtagttggcatatcttgtgtaatccctccactctcaaatttctaacaattcttaatttttgggttgaaacggaagtaatattttgttcttccatctaaccaaaggtcgtatatttgcaaaccaattgaagtagaaattaacttaaaccgggaactggtttaagagatattaatatatgaccgaagacattgggtttaaaaagtcagaataataaaaagttggcgtagtctaaacgccgacccagaggccctctcatacctttaccagtgcctatatatatatatatatataaacagactaattactattccccatcgcacagacccgcctaagaatccgagagagaagaagagataatgcagatcttcgtcaaaaccctcaccggcaaaactataaccctagaggttgagagcagcgacaccatcgacaatgttaaagccaaaatccaggtttaatttagggtttcttctcttctttatcccctcaaacgattccttagttcctctgaatctctacttgttcttaccttgaattgtataattaagaattgtttcgagtaggaatctctagtaatcttgaagaacatggatttgatttacttgagaatagctaaaaagtgtttgtgaggattgatagtttgtttaacgatctttatctgagctcgcttttgtttgaatctttggtaaatcattttggggtttcaggacaaagagggcataccacctgatcaacagaggctgatttttgctggtaagcaattggaagatggccggaccttagctgactacaacatccagaaagagtctactcttcatcttgtccttcgtctccgtggtggtatgcaaatctttgtgaagactctcacgggtaaaacaatcacccttgaggttgagagctcagacaccattgacaatgtcaaagctaagatccaagataaagagggaatcccaccggaccagcagaggcttatctttgccggtaagcagctagaggatggtcgcactcttgctgattacaacatccaaaaagagtcaacccttcatttggtgcttcgtctgagaggtggtatgcagatttttgtgaagaccttaactggcaagactatcactttggaggttgagagctcagacacaatcgataatgtcaaggcaaagattcaagacaaggaagggattccaccagatcagcagagactcatatttgctggaaaacagcttgaagatggacgcacactcgctgattacaacatccaaaaggagtctaccctccatcttgtgattcgtctccgtggtct

SEQ ID NO: 19353 - DNA, 620 bp, Arabidopsis thaliana landsberg
acttctcctttcttaggaactacatgaactggactaacccaactcatatttgaaacttgttagttaatcgctgcttccgacagcttcataatctctttcttaaccacttctttcagattcgaattcaatcttctctgaagttcaattgaagacttagactcatcctcaaggtgaatcctatgcatgcaaacatcaggagagatatatgcaatgtcatcaagagaatagccaagagctttgcgatgattgcgtagcttgcttagcaagaaggtgagttttttgggattaagagaagcattcacaataacaggataagtagaattttcaccaagaaaagcgtaccttagccctgctggaagtggtttcaaatcgattttaggagcctttgttgaatcccaatcagaataagtagtcggtgttggagtcacagatgaaagatcttcttcaattataagttgcatcacatgtttagtctcatctaggagcttactatatgtagaagtttcactatccaaatatgcactatcttctatggaagagaccaaaactcgctctagtgggtcttcttaattcatctctgaaatactatctgaagctaatgaagtgaaagaatctatcaa

SEQ ID NO: 19354 - DNA, 1404 bp, Arabidopsis thaliana landsberg
ttcagttgagcttgatctttttttatcaatctagatcgtattgatctgttagaatcgagctctgttttggctttttagtgttgaagggtgctcagaatcccgtgaattgtgtcatttagtactacgctagataagatagacgaaaggattaagatactgccggataatctttggtgttgatatgggctactggtatgctcctttacaagttatcttggttcgatgatgcttacactctgatttcttaactgttgcagcaaattcagaatccaacagccattatgattgcgaggacagctgttgcacaggatgatataagtggtgatggtactacttccactgttatcttcattggtgagcttatgaaacagtctgaacgctgcatcgatgaaggtaagtcgctaattgtttgctgagagttcgttagttttatactcctatatgcttgtttttattttatttctcaatctatgtgttattagtggggaccaactatttgtattcagcgacattgatttgccaagttttgtttatattgggtatagaaaatgcacaactggtatctagttttgtagccagaatcctaatgaaggtttatactgtatcaggtatgcatccacgagtcctagttgatggtttcgagattgctaagagagctactcttcaatttcttgacaacttcaagacccctgttgttatgggtgatgaagttgataaagagatcctaaaaatggttgcaagaacgacactaagaacaaaagtattcttcattttatgattatctttcttttcatttgatttttcttttcgttttctaatttcgatttactcttgtggattgtgtagttgtacgaaggcttagctgatcaactgactgacattgttgtcaattcggtgagtttactgttctctaatggaatctcacttattcttttcattttttttgttcacacagatgaggactcatctatgcaccaatattggttttcgagcttgtttgtcttctaattatctactttcctcacattacaggttctttgcatccgaaagcctgaggaagctattgatctgtttatggtggaaataatgcacatgcgtcacaaattcgatgttgacacacgattggtatgtcttgacttaatttattgtaaaatagttccctcattataggtttatatatgaaatacttgccggtttatagtatggacctgttggaaacactgacttaattctgaattaggttgaggggcttgttctggatcatggttcgagacaccctgacatgaaacgacgcgcagaaaattgtcacatcttaacttgcaatgtgtcaatagagaatgaaaagaggtgtgtaatataattctttggtcaatttggcgaagagaaagtaaaggcctggatgtt

SEQ ID NO: 19355 - DNA, 1810 bp, Arabidopsis thaliana landsberg
cgtgatgatgtagttcaggaccctaaagtgatggatgatgttggtgaagaatgccaccgcctgtttggacctgatgctgtttaggggttggacctcgatccacttggagaatttgtcgatggcgaccagtaggtgcgtgtacccccgggtgccttctgcaagggaccgacgaggttcagaccccacacagcaaacggccaggtgatgggtattgtttgcagagcctgagcgggtaggtgcgtctgccttgcgtagaactgacacccttggcaggtgcggacaattctagtggcgtcggccaccgcggtcgaccagtagaaaccctgtcggaaagcgtttccaacaagggctcagggcgctgcgtgatgaccgcaagccccctgagtgtatttcttgcaacagctcctgtccttgggcgacggatatgcatcgttggagaatgcccgagggcgtgcggtggtagagctctttttcatcacccagtaagacgaacgacttggcgcgccgcgagtacgccgagcttcggccttgtcgaggggcagctctcgtcggaggagatattccaggtatggggcctgctagttcgggtttagcgtgaccccattccgctctccctcgacgcgcagggcctcacccttggcggccgagggttcctcgggctgtggccgaggcctcctcgggctcgggcgtgtcatcgatcttgacggagggttgatgtatgtctctggagaagacattcgggggaaccgtcatccgccccgaggctattttagccagctcatccgcagtctcgttgtaccgtcgagcgatatggttgagttccagccgtagaacttgtcttccaggcgccgaacttcgtcgcagtatgcctccatcttcgggtcgcgacagtgggagttcttcatgacttggtcgatgacaagctgcgagtcgccacaagcgtcgaggcgccaaacccctagctcgatggcgatgcacaacccattaagcagagcctcgtactcggccacgttgtttgacgccgggaaatggaggcgcacacgtagcagagatgcttcccgaggggtgagatgaagagcaggcccgcgccggctcctattttcatcagcgacccatcgaagtaatggtccagagttccggttggatcggagccgttggcaattgggtgtcgaccattcagcaacgaagtccgccaagacttgggattttatggccttccaaggagcgaacgagattgtctcgcccatgagttccactgcccattttgctatcctacccaaggcctctctagactggatgatctctcccagggggaaggatgataccacagtcaccggatgggactcgaagtagtgtcgcaactttcgccgtgtcagaatcactgcgtagagcagcttctggatctgcgggtagcggactttggtctcggatagcacttcgctgatgaagtagaccggcctctggacgagcagtgcatgtccttcttctcgtctctcgactacgattgcggcgctgaccacctgagtagttgcggctatgtagatcaagagggcttctcctgcagcggtgggcaccaagatgggcgcacttgtaaggagtgcctttaagtttccgagggcttcctcggcctcgggggtccaagagaagcgctcggtcttccttaggaggcgatacaagggtaggcctctttcgccgaggcgcgagatgaacgggctcagagccgcaaggcatcccatgaccctttgtactcctttcaagtctttgataggccccatgttggtgatggccgcgattttctccgggttggcct

SEQ ID NO: 19356 - DNA, 594 bp, Arabidopsis thaliana landsberg
  unsure (1)..(594): unsure at all n locations
tggtgttttggatgttgtgagatgatttgagatgccttgggcgtcctcccttatataggaggcgaatggatgcttcccgaagcatcacatccggtccttgcacccttctgaaaggtcacatccgttctttgcatcctttcgaaaggtcacatctgttccttgcatcctttgggcgatgcaaccgttcgttggtactcgctcgaccttacaccttttggccgagacacctcttcacccgtgagctaccacagtccnnnnnnnnnnnnnnnnnnnnnnnnnnnnnnnnnnnnnnnnnnnnnnnnnnnnnnnnnnnnnnnnnnnnnnnnnnnnnnnnnnnnnnnnnnnagctgagctagctagtcttacaactggtttagctcacctagcttagctagctagttcatccagcttgtccagctcacctagctggttcggcttgaactttctcgttcttcctactatgtattttggtctgttctcgaccatgttctagtttgctcctaaaacaaaccggcctttttnnnnnnnnnnnnnnnnnnnnnnnnnnnnnnnnnnnnnnnnnnnnnnnnnnnnnnnnnnnnnnnnnnnnnnnnn

SEQ ID NO: 19357 - DNA, 1284 bp, Arabidopsis thaliana landsberg
  unsure (1)..(1284): unsure at all n locations
tgctttttagtgaatttcaaagatattctaatgattgttaacaaaaggcttttcgattgagtgtggttttataaactgctaaggagaattttggtatcaaagttagatacccctagacggctagtgatgaagaagacaacactaagaaaaccctgtgaattgtgaaaaagatttgttacctgcacgattgaatcagatgatgatgagacatgaaagggtttcggttcctttttttttacataccttaaatgttgtctacttctttttttatttttgcaccaaattcatatattaaaattaaaaagatacacgaagattagctttcatcggacaaacccaaataacaagtttgaaaatagaaaagttgaccaaacataatcaaacatagagacactagctgaagtaagcttggtaggagaccaggagacgtttcgaaactaattaacacaagcatacccatgagagaaatcgtaaacaacacaaaaacctcgactggtaagaaaatagtcaccgtacagagtgacattaaaatgaaattcaaaccatcaaacgtggttctaggttggaaacaacgtggatttgccttagacgcaggcatagagacgtcggagaaatattcggtaaacaagcttcgctgacgatgggcgagatccaaatcaaaaaatgtggtactggatcgggagtgaaatgggcctacaggagaagtatccgacataagcagagggaactcggaaaagtattcggtgaaccgctgagagatgaaacgggaaaaggcaaaaggttggcaaagggagagacaaatgtatcccaagacgatgaaggcagatgatgagcgttgcacaatattaaggcagaccaaaataatatgcgtacaacccaataatcttaacgagcctttacgaaatctagaagttcccaagatgggacaagcccaatttaaagtcttcttccaaaaatgtgaagtgaggatttgacctaatccaagcgaggccaagaacaagaggcggcgacagttgacggaggtgacaaggtcatcgaccacaaagattaagagagggcaaagatcactagaaagaggagacgaggagacaacaaccatcagcttcacacataagagtcgattctcgtggctggggaaggagaggagaacagattccacaacgaagtagccgctggttcttccaataggaggtggagcatgtcaggccggtgggcaaagatcttcagaanagagatccaccagagctgcactcgcgagatgcgacacgagatggaaatgatgag

SEQ ID NO: 19358 - DNA, 1087 bp, Arabidopsis thaliana landsberg
caaagtagtgacgtagcttgcgggcagttagaagtactgcatataatagattctgaacttgaggatactttttcttcgagggacccagaacttcactgatgaagtaaacaggatgttacactgggtaggcatgtccttcttctgctcgctcgacatacaacgcggtgcttaccacgtgagtcgagcaagagatatacagcagcagatcttcagctggttgagttgatgtggctcacgtggcggtttcagtactggtggtgttgttaagaatttcttcagtgcttctagagcttcttgtgcttctgaagtccattgaaacttatccaccttcttgagtaacttgtaaaatggcaaacctttttctcccagcctggatataaatctgctcagagctgccatacatccagtaagtcgctgaaccttcttttgtgaccgaggagcttccatcttcatgatagcttcaatcttatctggattagcttcaattccccggtggctgacaataaacccgagcaactttcctgctggtaccccaaagacacatttttcaggattgagcttccatcgatatcgtctcaggctgttgaaaacctgctgtaagtcttcgatgaagttttctgagttctccgttttgattaccacatcatctacataggcttccacacgcttgccccagtgatcggctaagcatgtttgaatggctctctgataagtcgctccagcatttttgaggccgaacgacatggaggtatagcagaaagcaccgaacggagtgatgaacgctgttttttccacgtcttcttttgccaagctaatctgatgatatccggagtagcaattcaggaaagacagcacagaacatccagcggtggaatctaccacctgatctatcctaggaagcccgaagggatcctttggacagtgtttgttgagatccgtatagtcgacgcacatgcgccaatccactttattctttttgagtacaagaacagggttggctaaccactcgggatgtaacacctctctgataaacccagccgcgaccaagcgggccagctcagcgcgaatggcctctctcttgtcgggt

SEQ ID NO: 19359 - DNA, 262 bp, Arabidopsis thaliana landsberg
taatgatgttgtcttgaaccgcatcacgcacctgatgacaatcagattcaatgtgcttcgtgcgctccatgattcacaggattggcagcaatattcatagcagacttgctatcacaaaatcacttcattggttcgtcatgtttgataccaaacgagagaagtaactccttgaaccatttaagctcgcacaaagcatacgccatagatctatactcggcttcggcggaagaccttcacactgttggttgtttcctaccacccc

SEQ ID NO: 19360 - DNA, 1919 bp, Arabidopsis thaliana landsberg
cctggccgattgcagcatccagtctaacacaacaaacaacaagaacataagattatgacttttttaaaaatatatcaagaaaagattttctctttcgtcatatcttattaggatttagtggtattaaatcttgcatatcacggcttcaaatatttaaaacaaattaatatatgtactttaaataaactaatttttcagaatcttaattggataataaaaagatttttttggaacaaaaaccaacaatacttttaaaaactactacgggtgtattcaaattagaatttaaagtgatttgaattttgttgagtttttaaatgattttgataattttagggtaagtctatataatttttgtaaaatccattcaaatctcaccttaaaccatatgatttggatttctatatttttaactaaagaaatcctcttaaatcctctccaatcctccaaaattattaaaattcaaatccacaaattgtttacaataacaacgatataaaaatcaaactaaaatactaaaaaaaaaaataggcatatctaaataaaatctaaatcccaaccaaaattgtaacaagttgatacctatattagatttgatatatatctaagtaataaataataattattctaaaaaaaaagagtaattgattcgtaagtaccttaacagatggtaacaatcttctatcatacggtggcaaggcatagctgttgacaaaccgcaagtgaactctttgcaagcgtccttgactttgttctatcttaaccacttgatattgttctgttttacgttctccttgtccattattatattctcccttgaaacacattggtgtcggagaaaaccgccggctttccatcttgtacacaccggagtaagcaaaacctatgaagaagacaataactaggaagtagctgagccgtcgtggtcggagaaacataccgatgttgctaaggaggaacaaggcgaggagagagacgctgacgagtgtttgtacacgtggtaacgtactttggaagtggcggtagtaaacgtggtcgttacgcatgcagaagagatacaaggcgtggccgacaagaggagccgagaggaagaaagtgatgatcggaaagaagattccggcgactagattccatggcttatggctttgtgacttcattattggagagcttcaaggacagatttgattttcgtatgatcaaatctcctatacgagtatttatccccacaaaaatatccttttgtaggagttacttacgcaatcaagtgttgacatgtggcaaattcacctcaaaactaggcatgggctaacaaattgaaccgaatgtaccgaaccgaatccgaaacaaaattaaccgaaccgaaccgaaaagtgaaaaataaccgtatggatactaaattatataaccgaaagaaccgaaaccaaatggataataaccgaaatatttcgggtaaccgaaaatatccgaaatataaatatatttttaaaatattagttatttctatagtaaataattaaaaatagttgaaaatatatacaaaatggtaaaaattttcgaaattaagcgaaaatattcaaaaatatccaaaaataaccaaaaatctgaaaatattcaaaacaaaataaccgaatggatattaaattttaaaactgaaactgaaccgaaaccaaaccaaactttcaaaataacagaatggatactaaattttagaaccgaaaaaaccgataaccgaatggataaccgaatgtccaggactacccaaaacaataaggcattaggaattaaagaaaatttgatattttcggcagtaatatatatgggccggttttgttcgtttagttgggccaaattgtaataggccttatagtctactaaacaacaatctgacgtcatgtcagagatagaagacttaacaaaaa

SEQ ID NO: 19361 - DNA, 506 bp, Arabidopsis thaliana landsberg
ttagttttcttactatatgttgttacgtggttgctgtttcgttgtttctttaaccgcagattagtcgctgcagaagtgggtgtaacaactgcgtttgccttaaagccttgagcatataggaagattgggactaagcctcctttcgggtttaatcctaatttcctgattatacaataatactgcgaaagtcacataacagtaacaagcttttaagattaatttggactttggtctaaaatatccggttacgaaaatgactaaccagtatcggtctccaacaagaaactcgttagactgatagactttatcttccaaggtagagaaatgaagtatcttccaagtgaaaacattgtctggagggtttgatatgaatgtgactttctctttttgttgggctggtttaacgatgtagatctcagcaccaaatgtaccagtgtcctgctcacggtacccatcgttcccgtcgagaatgttgattgaggaataagttggccgtaaccccactc

SEQ ID NO: 19362 - DNA, 513 bp, Arabidopsis thaliana landsberg
aatccacccaaaacggtgtcgtgtgtgaccttatggtaagacatgtaatgaccaggagggtgtcttcttaaacactccaagatcacagctttgaggtaactcaacttccccaaatcctcttctttgatctcttctctttcttcttcttctccggcgaacacactcttcatttcctcgtatactttcctctgtatctctggatacttcaccatgatcgccatgatccactgcatcgccgtcgccgttggatccgtagctgcgttaagaaactccgaacacagactcacgatctccgagtcactcagtttcctcttcttccctccttctttctcctccgtcgggatctcaagattcagcagcgtatcgacgtaacagagaacatctccggtggtttctttacttcttgcgttcacgtatcgaagtataaccgctctcttgagatttcccttagttctaaaaactcttttcattttcgccggagcaagaacttggttacgcttgggaagatgttga

SEQ ID NO: 19363 - DNA, 815 bp, Arabidopsis thaliana landsberg
  unsure (1)..(815): unsure at all n locations
ctctgtctttacttctggatcaggtgcattttgttggaattctagcaaacagaagaacgttgctcaatcaacgaccgaggcggagctcttaatcacatcaaggttcgaagttctacgagaagagctagacgtaacgatgaagccatgatcaaggaggagtgttggaagtgatcaagtcatcatcttattttagaagagatatattatatagtgaagtgactggtttatgtatattcgtatcacacatcgaagagatacgaatataattgttaactacaaaacagttacatgtgtgtatgtgtctctacattaggttgtcttctagagacgtgtcccttagtcaaagtgtgtcatgtaaacctataaatacagtttgtatatgtaataaaagtgtgtggttttcgttttataaaaacagagtgaaatatagagtaagacaaaacagagtaaaatctgtgttgtccgacccttaacaactttgagagttcaaagttctacatactcttgctacgtttatcgataggtttctgagatccaaccgtatcgtaaacaagtttaagttaagatgcgattcggatctcgttggggatgtggatgtgtttatctacatggttattaagcgaaaagttcagcatctcgatgttacatgccctttagtgcatatagatcgagaaatttacaactgtgagagcttggtttctttaaagctctctgaagtaactttgacaaagcccgagttcgtatcactaccgactctgaaagttttggttctagattggggtgagtctaatgagttcgctntcgacatgctcatg

SEQ ID NO: 19364 - DNA, 705 bp, Arabidopsis thaliana landsberg
aacgggcaagtttgatttaaaacaacttgactctttttctcccaatgaatgtgacatctatctctccacattagttataaatttttatattccacttatagaattcactaagagcatctacattggacatacctttgtaggtgtttcaaaaataaattaaaattaaatttaaagacatcttctattttggggatcagaagtgtctttctaaagactctattacacatttaaagactcactttctcgtttcttctattatttttaatttaaagacatcctcaaagtatcaccaatgaggatggtctaagcgacttcagttacttttggtctaaaaaacttgttatattgttattttggtcacaaatatcagaccattaattaaggtgatgataaaaaaaaaatcataccattgagtaacaatgatatttcactaattttcctttattcgtcattgtatttatagttaaaacttaaatacgaaaaaaataaaaaataataaaaaaaaacttaggcaaatattttagaattctgaactctagtatcatgtcaaaacctatggatatgcatcttaaaattaattgacaacaaaatattacataaatacataattctttgtttcttatactatactaggtgccataaatatattttctgtggaactcttaaggaacaaagtttttcaaactgtatacttatgatgagccc

SEQ ID NO: 19365 - DNA, 623 bp, Arabidopsis thaliana landsberg
gcacagaaactgtactaggcatatctcttaacacattggaaatcaacgggacattgtctgtagatgataaatcattccaaggtatgcataatctccaatttcttaaagttttcgagaattggcggcgggggagtggtgaaggcatattgtctttacctcaaggcctcaattctttgccccgaaaactcagactactacactggtataaattcccgttgaggtgtatgccttctaacttcaaggccgagtatctggttaacctagaaatggcgtatagccagcttgagaggttgtgggaaggaactcaggtaatactattaagtaagattttcttcattacttaactattgtccattttaaaagaaaatcttgctcttctttcttcacttcgattgataaatatggagtaaacaaaatgcttttacttattgaatatgtgcattatttttttcatgttctgttttcagcaatttggaagtctcaagaagatggatctgtccaagtccgaaaatttgaaagaaattccagatctttcttacgccgtaaatctagaggaaatcggatctttgcagttgtaaatctttggtaacacttccttcctcagttcgaaatcttgataaact

SEQ ID NO: 19366 - DNA, 921 bp, Arabidopsis thaliana landsberg
aacctacagccacaattcaacatttccacatcagtcaaagcataatgaaacaaaaaaaaaattgatcaaatttctaatcaaagataatataatgtattatgcaacaattaaaccatccctcaatagtataaaaccatctcaaaatatctgaattaaaaaaaaaaacaatctaaattccaaaagcaaaaagacataacctactcttcatcagccttcttgaacacgtaagtagttccacatttcccacaataatgcctatcgaaatgactcgccatgaaagttccaggaccacaactaacagaaggacactctttcttcaacctctgaactttcccacttccatcaaccttgtaaaactgcagaactgctagcttcactttcttgtgcgtatgcttaatcttcttaggtttcgtgtacgtcttcttcttcctcttcttcgcacctcctctcagacgtagaaccaaatgaagcgtcgactctttctggatgttgtaatcagctagtgttcttccatcttccaattgttttccggcgaagatcaaccgttgctgatccggtgggattccttccttgtcttggatcttcgctttcacattgtcgattgtgtctgatgattctacctctaaggttattgtcttccccgttagggttttcacgaagatctgcattttcttgtttgagaaaaaacgcagagagtgaaaacaatagcttttatatcaaggaaattagggttacaagtccatagattatgggcctggccttagggcccaatttaataagtaaagcccgtaatgattaaacgatgtcgtctacaggataaagtttgaaaactactaaaactctcatcttcttcttctctgagtatcaatggcgattgtagcatcactaagagatattaatctcttctcttcacttccttca

SEQ ID NO: 19367 - DNA, 686 bp, Arabidopsis thaliana landsberg
tactattcaatacatagatgacatacaaaaaattaaaacatacatgaaaacataaaatttaactattaatttttgctaaaaaatttccatatatattcaactaaatcaaatttcaattattgatgtgcttgtagattacgaattcgagttcgagtttccaatatattctcgagatttgaaggcatatatgtagaataggtgaaatccacttgtgcatttctagttgattccggttgtacgaattcagagacatcaaagtaagtgtaactatctcgttcgttttctactatcatattataaattattatacatagtagaaaaattaacggtgagaaaaaaaaattcggctttaatattattcttccaaccaaccaaatcatgtcacgtcaccaccatattttacttaagaggatctcttagcttagagggcctctaagcaaaattgctcaattaacatttaaatttaatcatttacaatctaaaaatctcctaatatctccctaatatcccccctttaatgatactcttaggttcttgactgtcttaattattattttgtatgagaattgtaaatcagtattttggaaatattttttattttcttaatttttgaagtagtagctataaatatataattaaattaaaagaaatacagattatgttaatggaaaatacatgattacttt

SEQ ID NO: 19368 - DNA, 2761 bp, Arabidopsis thaliana landsberg
gtggccgagtcagtctttacaaaggtctcatcttggtggtgtcatattcttgaatatttccatgacatccatgatagcttctcgccacaagagtcaacgctcctgtccaatatgcgcaacaccttgtaagcttaatcttgatcctctctatcattactaatgaattcttcattttttcttggcacttttgcagctgcaataggcttctttactctttttagaaaattcagattacaacaaaataacaaagaaattgattcttctactatatcttcttcatcagttccttcatcatcttcgtcccacaagtggacacatcaagtctttccaagcttccgtggggaagatgtacgtagaggttttctcagtcatattcacaaggagtttcaaagaaagggaattacaccattcattgataatgagatcaagagaggagaatccattggtcttgaaatcatacatgcgattagagaatctaagatcgcgattgtcttgctctccaaaaactatgcttcttcatcttggtgtcttgatgagttggtggagatcatgaagtgcaaagaagaatttagtcaaatagtgatccccattttctatagagttgatccatccgatgttaagaagctcacaggaaattttgggaatgtcttcaaaaataattgtgttggtaaaactaatgaggttataaggaaatggagacaagctctggcaaaagtgggaacaaccactggttacgattctcgcaactggttcgtccttctgaacatacgggcttaatcctttttaacacaacaaattatatatgtgtatctacaaatatttatgatctcccatatagaaatttatatattttaaatacgtacttgaaattttcatgactatattatgtatttattgataatccatcttaattaggcataatgaagcgaccatgattgaaaaaattgcctctgatatattgacaatgctgaattattctactccatcacgtgatttcagcgacttaattgggatggaagcccatatgaaagcaatgaaacggttgttatgcctagatctgaatgatgtgaggatgatagggatttggggtccgtctgggattggtaagacttccatcgccagagttttatttaaccagtttaatgacagttttgaactaagtgcttttgtggagaatatcaaagagttgatgtatagaccattgtgttccgatgactacagtacaaagttgtacatacagagacagtttattgctcagctaaccaaccataaggaaatcgagatttgtcatttaggagttgcacaagatatgttacacgacaagaaggtgcttgttgttcttgataacatcgatcagtcaatacaactagatgctatcgcaaaagaaacttgttggtttggtcaaggaagtcggattatcatcacaacgcaagaccaaaaacttttgaaggcacatgatggcatcaaccatatttacaaggttggttttccatcaacatatgaagcgtttcaaatattttgtatgtatgcttttggacaaaagttccctaaagatggtttcgaagatcttgcatggcaagttacaaaacttttaggtcatctacctttgggactaagagttatgggttcccacttccgaggaatgtctaggcatgagtgggtaaatgctttaccaaggttaaagattcgccttgatgctagtattcaaagcattttaaagttcagttacgatgccttatgtgaggaagataaagatttgttccttcatatagcttgccttttcaacaatctagaaatggtgggagttgaagattatcttgctttaagtttcttggacgtgaggcaagggtttcacctcttagccgagaaatctctcataaatcttaagtttttatctactaagtatacacgtatagagatgcataatctactagtgcaattaggtagagacattgtccgtcataagcctgggcaccaatccatttgtgagcctgggaagcgtcaatttttggttgatgctagagatatttgtgaaatactcattgataacacggtaagttatgttatcagtctctagtttccttgttttttacaaattaaattcattcaatagctaattatctctcgtcttctaacttttttgagtctttttacagggcagaaaaaatgtgataggtatactttttgatataagtaacctatcatgccaattaaatataagtgagagagctcttgacggaatgccaaaccttaaattcttaagattccatgacccatatgacgacgagagtgataaattgtacttgccacaaggtttgaattatctatctcaaaaacttaaaatactagaatgggatcattttccgttgacatgtatgccttccaatttttgtacggagtaccttgttgaactaaacatgcggttcagcaaacttcataagctgtgggaaggaaaccgggtaagaaattgttatagagttctctttaattttcaactttttttgttgaagttcatctgtatagatatttgattttccttgcaccttttacgcttcaaaggagttttacaaaagcattacgttttgaatttaatcttggtgggttagaagtttttttttacatatttttcactaataaatgtggtcatttatattgcctttttgttttgtttttatagccgcttgcaaaccttaagtggatgtatttaaatcattaaaaaatcctaaaggagctacctgatctctcaacagccactggcctt

SEQ ID NO: 19369 - DNA, 4046 bp, Arabidopsis thaliana landsberg
  unsure (1)..(4046): unsure at all n locations
taggattgcccatcttcatccctcaaaactccttgctcatcagctataatgactctgtcaggcattgctattttgtgagttttgcggttagtgcgttctagtattcccaaatcaagcacaaataagttgatgtggtccatctatttagtgcttcttgcgagcctaggcatacacctgaaacacagaaaagaaaaaaaacatggaacgcgtatgtatcaaaataaaaataaaaatctagacgaaatatctaaactaagcttaatggtgattcttaagaactttggcaatggcgccaaatttaatatagctcaaattgccttaagcttactctctcaaataagaaatcgtcgttagcacttaagggtcaaatttcactgagctctctatgttcacacgatagacttatgatgtttttaaataaactagacaaagtaaatgaatgtaaaagaaaaataagcaagtaaacgggtctaagaaatcgtctcgggaaatagatatattgtagatctagctaatattaggattgttatcgcaccgttctcaaactaaaactatgattttacagtaaccggtggtgttctgcgaaactctctatacttagagctaagataaccggagaagccgagaaatcctatcctttagcatgcattgttttcaagcttgattagttgacctgggatctaaaccagaacccttctatgagcctacctgttctctattaaatgcctaggctcatttatgatagttcaaacaacaagtacctatggtgggcatacctattatctaatatcaagttctaggtgatcaatttaaaactagcaataagaataatcaagatgaagaactttaagaataatcctaaggggttttcgatctactaatccatctaaatccctattgagactccctaaacccgacaaggtgattactcaaacatgataacagaaacacaaatcataatctgaatagtttgcattgatggattagaaatagtaaaaggagtccagaatcctctctacaagaattggattcttctctccaaaatgcatctcaatctctaaaaaaataaaacttaggtctaacactgaccaaataattagagactactttgcaaataaggaaaactttagggcttttcaaagacttggtaaaatacaggaattctctcagtcgaaataagggtgtcgatcgacataggtgtggtgtcgatcaacaccatcttctgaaaaaagtctttgataatcttcattgctgaaaaactttcaaaatttcttactatgctccatagctcccagatagtgtaagtgtacctgaaatgactcaaaacatacgaaaaatactagaaagactataaaaaccattctgaaactatgttagaaatcattaaaaaaccaggacatatcaactcccccagacttagcttttgcttgccctcaagcaaaacaaaaggttgaatctgtgaaagaggtttgaaaaacatagaaactcccaatttctctagtttattaccttgatcatacaaaccaaatccatgtattaaacagttctaatcaaatcctgaccaccatgtaattctccgctagcccacacaacatcctagattccataccaaagcactcaactatatccactaggctatcatcgctaggtctcatcaatcaagtaaatgcttaagaaccttctagactcattcctgtattataccatgatagattgaccattctttatatatttatttttttggtgttctttctctcccccagacttattctntttagagagntaacaaaggggaactcgcatactggattgacaccctcgacnattttccaagctttgtaatcgatcgttccaaataatgttataataatggggtcataggaaacattcctacccatatacactatctgaaaatcctgtcaatctctcattactattatttttgtttataaggagagaggaacaatgttttttttttcatcacattggtctcaatatcaggtaagaacaaggagtcaagatctatgaatactaaccgttgaaaaggtaaaaggaagagcagtgagattagctccagccttagtggttgtgttggaaactaggatatcctctagtcagttagtttgccatctagattttccaatagttggattgagtcgaacctgcaacactcataaatcaggcaataatcaggagaaatatagatcatgatttctaactaaactaaataaaaagttttttttttatatttatttattttatttatttttttattttaagaagagtaagtgaaatgactgaataatctgaaaaacaaaaaataataagaaacaaatataaaagcaatattagtaagaacctcccccagacttaaacgacattgtccctagtggcattcaaatccgaagaaggtgggaaaaaaaatcaaaaataaaagaaaataaaagaaaggaaaagaaaaatcaaaccagtgggttgcctccaactaagcgcttgttttaagttaatagcttgacttggcggagttcagtatgtgggtggagtggtggaggattgctgctgcctccgcgccttccaaggcggtgtgtaaactaatccggtctggacaactgtagtttcgatcgacactcatgattgtgtcgatcgacactatcatcgtttccttcaatatcaagaggagaaacaagctttcgaagaactctaggcttgttaacttatgaagcagacttcgaagaatctaaagaattaatctaaggtaaagaaggagaaaagatagaagagaacttagcacagaggtctgaaattggtgtgggttgaagagaatgtgcagaaatcttggtctatgaatctcgagggtgtcgattaacaggaggggtggtgtcgatcaacaccgattctcttcagctctcattggcgagaggagcagtttggggattctaagcagtctgaggagatgtgtctgtgctagaggcaatactactaatagtctaagtaaactctgaaccatccatgccaaactctgtctccaaatcacaaactttaagagagatcctacctnccttcacatcaatcctagcaccagctggagctatgaatgctctgccaaggataagaggatccttgggggccttgatcggaggctaggaccacgaaatcagccgggagtagggagttatcaaacttaacaggaacattcttcaaggattccttcagggatgcgtttggaacgatccgcgaagaaaagagtgagtctagtctgactgtagttaggcatgcctagactctcagcaacagacttaggcatgacgttgatgctggatcccagggcacacaaagagcggctgaacctgcttgtggagatagagcaatcaagaacaaagctacccagatctggaaccttctcagtgggctgtccaggagtaatggtgcggatgtactcagctatgtctactctttgtgccttctccttcttggccttaggcagcatgattgcactgatgtctctggtaagaagcttagcttcatccgagctaattctattgtcaacaagtcgcttgacatacctattgaatgaaacatagatgtctcagaagcatccttaggaagagtatggaggatcttctccattatggccgtgcacttagcagcatgaatctcctgcttagaacgacgcttccttggataagggacaagaggagtatagacagactcgggctgcataggtacctgcaccttacacggtgcagtccggactcagtgttgagcgacaatggatggtgttcgatcgacaccgtcgtattgagtcgtctgtgggaaaagggtcacgtatggtgtcgatcgacacaggagggtgtcggtccacaccatctctgcaacttcgagctccaactcgtcttcagtgtctaattcttcccacacatcatctccttctctgatcaagatggcattacagctcttccttgggttagcatcaggattaccaggaataaagccctcttgtctcttgatggattgtgcactgtgaactgaatccagttaagcattca

SEQ ID NO: 19370 - DNA, 1074 bp, Arabidopsis thaliana landsberg
taaatttgcaggtgcaactcctaagagaattttgagtcttatgggtgtgagagacctcacaatatcacatgtcaaaagtcatctccaggtctttataattatatagtgtcataaaacttatctacaaaacatatactatctaagattgcaagtactgaattatttttttttttttttactttcaatagatgtataggaacaaaaagaaagaagaatctagtaaaggtaaaataactatcttacattttaaattaaattttaataaatatgtttgtcgtgtaactttgcataaggaaatatttagattttcaacataatgcatagtgaagtttatatccgtttattcataattatgcacctccaatcctttgacagaaataaaaatgatgcgggagatgacacagaggcaatctcagcaataccttcaaatctatgaacgtgctacccaatttatccaaaatcaacaaaggtttttatgttcatgtattaacttagtttttcgtataattaatcgttttttggtttcgtgagtaaaacaatcttctttttcaatttcttctaggctacaactggataatactgagaagataaccccagttttgggatcaagtaacaagtctctagatcaatcttcaaaggtaatttttttttccttttgtaatttttagattactaaatatcatgcatgattatcaacatgttgatttgatgcctatgaaactagattaatgtatattttatggcaggttggactaaatgaaaacagaggcaatgatgttgttgttgttggtggtgcaactggtgaagaagaattgtcccttgaactcactcttggtcgcaagtactaagaggagtttggtttctatctttttttatgcttgctctctattttatgtaatgcttatctcatatatataatgggataagaaaaataaaaactgaacaatattttatggtattctatttataatgctattatgtgattttgcatccatgctatttgggggaaagattatttatataaaatatttctattacaaaattgaaagcaactttgagtctttgacaatattc

SEQ ID NO: 19371 - DNA, 1006 bp, Arabidopsis thaliana landsberg
cagtgagctagtagactccaaaagatcagtcttatttatcttggaaaagtttgttttaactgttctccaaatactaaatctttgaaacattatgatttgttgtctctagtttattgctcaattgatcgaatatcttctatatcattttttccatgagtctctttaagtgttttcagaatgtgtatatcaccaactaaaaaccaaacttcaattgtctctctctagcattcttttcaaaagttcgaaacaccaaacaccaaaaaccaaattttattttcaaaattttcagaaaaattgtcaaatgaatctttctatactttgtcatatattattgtcatgaatatttgttattcaaaatgtgtttatcaagaatgtatcaaaaacttgtatagtttgtcttctctatcttttttttcaagcaatcaaaactcaaacacgaacttttattttcaaaattttatttcttaaagattcctaccattagccatgaatatttctaagatatccgaagcaaatccttaactttatatttatcaaaatttacaattataaaattcttaaggattccctaaatatacctaccattggagttgttctaacactttgagctaaactattcgttttggtatatattttttcgatgttgttaaagtataaatgatgttaatttttgattttttttgaaaagcaacaaaaaattaaaagtagtaaaataataatagtaaacaggaatgtcaagatagtagaacctaccttacggtttttagtctaattggtttgattcttagaaagtatcattcattgttaatcgatattttacaatctataccggttctagagcaaaagacagaagtaaaacgatggctgacagtgatccgagtgtgatggctactatcccacacggccacggagacaaaacatgtcgtgttctaatttatcatatgataaaacaaaaaaatcaaaactcataacacgtaccaatccataaccaaactttcctaaaata

SEQ ID NO: 19372 - DNA, 1048 bp, Arabidopsis thaliana landsberg
atacaagatcaattatatctaaaacacacttttaaatttgaaaaaactttagtttcattctcagttaatataagaagaagaagcataactaaaagttgttggtgttatatagaagtgggagaaagccatagagggaggctgacaaactcaaccccatctagtgtttcaacttggtcttcaaaatgacggatacttctggtggcgatatcgtaaacatcagatctttatcagtctcataaaatatgatcttttatgaacaaattatacttttgagtcttctttttcaaatttttttttcttcatgtgatattaaagtttttcttttcaaaaaaataaacaatacattcaaaacagagttctagtctctgttagaatgtcatgcaatttcataattatttatttctgcctaaaatcctttgtatcatctttcttattctctttttatataatataccttctaccataaaaaaaccctaagttccataaacaggtaatctatttttgttttaaattcttaaactgaatataaaatatttatcttttgttaaaagatttttataattgcttatattttgcttatttggtagagttgtactaattaaatgttttattgtcatatatgagataactatatggattttctagaattaaatcattatagttttgaaatgaaagaaattacagaacaaaacaatttttaattttgctttagacttctgttatcttttgaccgggcttacgtccatttacatttaatttatcacacaatgaagctttaaattcaaaacaaatattatactcaaacctgataataagggtatgtatgattgtaatatataatcatataagagatagcaaataagtagatatgatacaaacatggttgtgtgaagtgttgtccatacaaattaatatcggtgtttattcgattaatattttgttccatattttgtattcaacatattgctcttgctgtgagaaatattattgaatctgttttctgttgttttgattagcaaattaatgagctttcaacaccagctattat

SEQ ID NO: 19373 - DNA, 1125 bp, Arabidopsis thaliana landsberg
tctgttcatatgaagttagggactaaaagataatgtctagcctagaaaaggaactaaattcccacggctgcagcttttggagctattgggtcacacactggactccttcttgcagttactatcatctataaatatattgaaacatttgaaaaggaaaaagcaagcgagctaggtttcttcggtttataaagctcattagaccctagacatgtatatcttaaaagctactaaacacaatgagataaaccttaatttcccaagagtttatagtttagtttctcatctgaccttaattttggtaaagaggttctagaaactttaatccttcgagcttacacagatcttataccatttttggttaaactgaagcatcttgtgttttattttttatttttgttctacattatgtattttctactcaacgtcagaattattgattagcaaaaacatgacctcgagtcaaaagaagtgacattacacattaaggcataacataagatctcctttagatctacaagacattcaaagtcaccacaatgaagaagaaagcacatagttcacataaataaagagtttctggaaattttaatccttggctcttacacgaaccttattacatttttggttcaattgaaacatttaagacaaacatatatgatctttttacagatctacaatacaacaaagtcaccataatagagcaggaaaccactgagttcacaatagtaaaagtaccgaaagacaaccttgtatgttcgtcaacgagaatcagagaagaataacttgacatgagctcgagcgtcttggaattttaaggagttctctgaggatgacacaacatttctttctagaacaatgatccaatgataaagtgagtttcttgaggattggtgagttctcaagtaagtatctcactaattccatcttccccttgtccaatgcaaattctatcttaacatactcgagagatgataggagacaccgaggtccagatataatactagttctcttccttggaaagtaatcagattcctgatataacacctaagtgaacgaaacaagtttgagtaattgatattaccaaacgaaagttcataagttttaagtaaacaaatccttaccaag

SEQ ID NO: 19374 - DNA, 619 bp, Arabidopsis thaliana landsberg
atcccattccagtgcttttgagttgggcatgagctaaatcttgctaacaagttcaccgaaaatgatatatcaggtcttgtatgattagcaaaatacattaatgctcatgttgcacttaagtacaatattttaggaacaagaatttcttcattttcttctcgagaatggaatggatctttatccatatcaagtgctcttacaattattgggctactcaacggatgtgttttgtctaaagagaatctcttaagcacattttcagtgtatgtcgtttgatgcacaagaattccattttccaggtgctcaatctgtaatcctacacaaaatcttgtctttccaagatttttcatctcgaattctttcttcaaatactcaactgtctgttaaatttctgcagaagttccaataatgtttaaatcatcaacatacactgcaatgataacaaatcccgatccaaatctctttataaaaatgcatggactaatcggatcattcttatagccttatttttaataagtactcactaagacgattataccacattcttcccgattatttcaatcccgaaaaagatcgattcagttttatgcagtattatatcactacttggagggtataa

SEQ ID NO: 19375 - DNA, 535 bp, Arabidopsis thaliana landsberg
  unsure (1)..(535): unsure at all n locations
aggccatagtacacgtctttgtgctttgggatttctaacagagatacactgctaacgcttgctcaatcatagagatggaacaaagtaaaggttggatttcacgacaagccaagtgactttatcaaggaaagcttgatcttcttcacagaagaactttttgtcatgattcctgtaatcatggcaaatatcaagataaagatgtgacagtattattgaagttgagttaatggcatgattcttcaacattgttccgtaacatcgcgagtgttccctgttgaagctatctaactgatcattcaatggaaaatctagaggaagtaaccaggaagtttcggggannnnnnnnnnnnnnnnnnnnnnnnnnnnnnnnnnnnnnnnnnnnnnnnnnnnnnnnnnnnnnnnnnnnnnnnnnnnnnnnnnnnnnnnnnnnnnnnnnnnnnnnnnnnnnnnnnnnnnnnnnnnnnnnnnnnnnnnnnnnnnnnnnnnnnnnnnagagctgcttaattcattgtgaccaagctgctttgtagctctc

SEQ ID NO: 19376 - DNA, 4390 bp, Arabidopsis thaliana landsberg
  unsure (1)..(4390): unsure at all n locations
tacataaaatcagttacgacagtgatgggcccaatagttgtatagaaaaggcccattattcttaataatttttaaaacgtcctaaattgttttttgtcactaattattgtttttttttatcaacctatatatacaacttattacggccacacaatatttaggtttggttcaaattattttgatggagaaagagtatggcagaaaagcgagcttcattttttgatgtatttgataacttgtgggtaaaatgttccagaaattattcttccatgctttacagtttcttttttagattgaaaaaaaaacaaatatgttacaagaaaaaaaaaaaggaaatagaagtttttatgaaccccatcataagtgatgtggttaaaaaactaccatcgcctctccattgcctctgccaaatgatcaaaacaactgcaagcggataaaaaatcaataatatttgtattttccctatgtcttgtggtttaactcaccaccttcaccttcttccatattgatccgacctgaatcatataaacattcacattcaatctctcttctacaaccacaaaactatcactcgctttgcggcgttcacagtttggttacatacctaacaatgatatcaacgacggggcttcccctgatccatttgatttcatgtctgcacctacatttcaatgtcacaactgatacttagatctatatccaactattggacctttttctagaagacaatttatcttaagagcaagttataataagcaaacacataagcagtagagacaagagatatgaagactacctgaactttccattgatcttgtgatgtctgacttcttaaatgtaaatcctatgaagttggtgtccttggacgtcaacatctgctcaacccaatttataaagttagcaccaaattgttttcatcaatagcatactgtccaaactagttgatactagtctcaaccataacaaaacataatctgctagttttatcatgttcagagaaattttcgcatatgtcaatttgcaacacagattatacgataggaatctagtggagtgattcacctttctccaaggaccaacttgtggtgcttcggatggtgatccttcaacctacaagaaaatatcaagaaaattgatgaggatattagacggtttgactttctcattttagcaatactaagatccataagacagttttgacttctaacaagcagttttaaaacaagttttaggttcaccaaactagtcggtttcaacataatgcctcatgccacaaattatgtcatgacaagttttttgagattctatcaaacttacttcaggaaacttctcaaaattttgtgtgtctagttctccatcgacaatgggtctataagctgcctccatgtcatacagtttgtcccatggggtgcctttgaaccatggatgcgactgaaacatgaacaaaatataatacaatgatatcaaggatcatgaaactgaatcgtaattttacatatccttttcagaagtcgcacctttatctcctcaacacctctggttcccaaccttgaatcaacatcacaaagcaaccgacaaatcaagtctctggcttcatctgatatttttggttcttcagggaacttcaagcataccctccaattaattatctcacataagaagcacaagtctttttaaacaagcatgaattttcnaatatagataaaattttatatgactgaccaattgtatacacctaccttgcggcatgttatacgggggtcatcataactgaatgggggatacccaactaacatctcatacaaaattgcgccgagagaccaccaatcacattccattccatatcctttctttaggagtacttctggagccatgtaatcaagagttccaacggttgaataagcctataaaattgagagacctattgattacccaagatattttggatgtggtaactgatctctattgtgtagcataaaatgagtagcccatgtaattcaattagagaagcagcataagtaccaatgcacggcgattgcgtttccactgcagtaactgctctttaggcatttgccagggtgctttgtcagcgtctgattttcctgactggttctctgaatcctgagacaacatttcatcgtcttctaatagcaatgaagaatacttgtcatcaagtggcttacataaaccaaaatctgaaagcttcaaatgcccacttttgtctagtatcaaattatcaggtttgatgtccctacaggcaagaagaaacaaactcaaatcaagaaccaaagagccaaatagtatacatggacttttaacaatacgtagagatctcttttacaccctaaatcactagcaataaaaatgatgtcaaaacttattatacctgtgaacatagttgtgttgatgaattgaatggatggcaagaatgctctcagcaatataaaaacgggcaacatcttcagaaagaatgtcttctctcatgagtagtgtcatgatgtcacccccaggtaaatactccatgataagatacaaacattcagaatcttgaaaagagtaaaaaagctttacaatgtaacggctgtcaacttctgcaagtaagttcctctcggacctgacatgctctacctagagacacaaaaccaattaaaggaaaaagtgtccaattattcacttgtttcttcacaagcacaaaaactgcaagcaacctagtgaagccagtcaaatgataagaaaaaggtacgaagtttatcagctcatatcaggcatcaatcttgcacttgctagtactactattctcaaacaacaaaaatagaggggatttttgtacctgtccacggctaagcatctcagtttttttcaatttcttcatggcataaacttcagatgtagatctcaaacgacataatctaacctgaaaacacaatttcagagattacaagatatcctgaagagtaatcgattccttaagtagtcaatttctagagaaacgcatagatctctgtataaacaagctcgatttaggaaatagttagtgatattgtacctcaccaaaggcacctttgccaataacggtcaaaagctcaaaatcatcaatcccaattttacgtctctgaagtctcatatactcagtttcacgacgagccagattcctcatcatctcgtcttgttcctcaacaggtaactgagcttcttgcactttcctctgaaactccctgcgtctgtaattttcaaaaaaaatctcaagtcaaacacaagtcatctttcgaaatgaagcaaagaccagatcagatttgaaaacaaacaaaaatcccgaatccaaacctctccattcgttcgtgcaagccttgcaagtaattcttataatgattctcgatgaattgcttagctgcagcagctttctgacgtgtcactggcgacgaaaccgcaacatccgtctccgtttcgaatccgcgaccaggcttgacgcgaacggttccatcggcgccgtccataatcttcaagcagagatcgtaacaatacaagtaagagagagagaaagagagagagatttttagagagccatggaaattaaaaaggaagtaatcgaggagagatctaaggagctgtcacggtgttggtgaaatcccaaagacgccagaacgtggactatttaccagagatgaactggcaaagctgtctcctctctattaaatttaatcacattaattaacaacaataaacaaattttattagttttttttagagtatggaagactacacatgtgccagtgccatcataattttagtttttattattaacttgcaatctttgatgaagcaattttttatcgtctgactttttgtcagcgcaaggtttggatctatctcctggggcacacacgagattattcttctcgttcagtaaattcatgtaaattttctaacaatttaaccaaaaactaatccaccaacacttgaaataaccaataagtggcaaaacacttcgttagtgtacagatccatagtacaatttttaaaaggaaacactgattcgagtttttaccacataaagatgctaataactcaacgaagaagatcctgaaaagttttcatgaagaagaccgcatgttttcaaggtctgagagcggctttgtgaaccatggtttccttgtgaatttggtggcaactcttttccacaagatctagaagcttctccaaattccctgcccacgagtttagaatctcgttgctgtcctttgcgatctggaagcacacaattccagatggtctgtctatttttgcaatcagtgcttttgacactaccatctccgatagatgcttctccgcctcctgaaaaaacaataaccaacaattataacaagcagaagcatagttgatatagccaggg

SEQ ID NO: 19377 - DNA, 266 bp, Arabidopsis thaliana landsberg
atggcaagtataattctttattacttttcttattggtcacactcgcccgatgaagactcggatctgtaacttagtcttttggtatcgacgttccattaaccaaataatgaaatggaagcaaattttgtttcactctcattgctcatcaactacttgtttccctttgctcataacattgttctttttgtttgcgctgcagctcccgaagagactctctatttcttctaaaggcacaccacgtgtcttcgggaggaaagtgaagaata

SEQ ID NO: 19378 - DNA, 1635 bp, Arabidopsis thaliana landsberg
gtctaatgagttccttttaggtttgacttagacatacaacctcagttatgccaattaaggtgtaacggttgcttatgtattaaataaataacccaacacatgaacacaaatagtgaaaatattcatacacatctacttaacacaaatgcaactaaacgcaacacaaagttcgatcactcgatactttgctttatttttctcaaaattgttttggttggaggtgatgttgctttgctaagtttcttacaaataaaagaaaaatttacattttgaaacggcttctggattttaagccgatcgcaatggagacattgttgttgtgagtaagcaatggaaccatctcaagcaactctttgatagcaaatctagattttcatagattctaaaccgaattttcataaaaaaaacatttaataaaaacagtgtttttgtgatccatattgatttttttttagaaatttcctgaagaaagtaaacatctggtaagcaaattttgtgaatctttagctttctggccaatacaagtaatattgttaacaaacatgataaagctcccaacttcttttcgatatttcaaaatattcgatgagcaaaccagctccttaactacaaaacttacgccacggtttatggtggcgaaaccgatttgatcaagttttttgtgtacttctattgccagtaccactcatcttctttctcttcttaccttgttgccctttttgacgttcgtctctctttctcttcattgtttccttgtgatgtgatttcccaactaaagacggttgttctctcagagcaaaactcttggcgacatgacccaagtgaagcttcttcaccacgaaaatactcttgagctctcccttgtgagctgcatatcccctaacccaagagacaaatgcattctttgccaggctcttcatctttggctgtgaataaaacagatacaaacaatgagacatttagaccatcagactgtaaattaatcacatagagagggaggaacacattgaagagaatcgtacctcggcgtaagtaagggattcaagagctctctgcagagatatgacccatggatgggattctagagataggacctttttgattcgggccatattgccgggtatgggaaatttatcaagtactttcataagagggtactctgtaagtgatgcaccatgtttcttcagctccttaagatagtctatttcatcggttggtagaaataacaaggcttctcctttttcaccaatacgagctgttctcccacttctgcaaccatgaatcacaaacacataagctcagtaaactcaagttactaagtatctaaggtataaccgtcaagtggttttttgccatttcagaatttacctatgcacatactcggtagcttccccgggacagtcatattgtataatacatcttacttttgggaaatccaagcctctagcagcaacatctgtactcaacagaacagcctgcttctctgttttaaaggtcccaaacgcagatcttctatcctcctgctccatacttccatgtaaccggaacgttttgcacttgagaaacaactctttagtcccctcctcttctgtctcagaattcggtggccactggaattcactcagaagtgagtaa

SEQ ID NO: 19379 - DNA, 903 bp, Arabidopsis thaliana landsberg
agggaaatgagtaaacatgatttcaatatggcgcgaaaactttatcgagttattacaccaaaatttaataagttaataataagattagattgggtttacgaattacttttggactatgtagaacttttgcattcttcttatcaaacaactctctcagaaaattttattaccaaacaaaaaaaaaaaatctcacaagtcacaacctgagagtgtttcaggaaaatcccacgtgcggtcctcacgcgcgaggcgcgttgcgtcataatcgccagctatagtccacggatttaggcaactttttagcaaaatccacaactgagcccaatagacgcgcgtgggtcgagttttttccttttcccatcttaaatgggctttaaattggactaatcaaatcaaacggaccgaatgactcgttttgcagcccatattacatgttctaaaacagtaataaataaataaatattctttctgttttgtttttgatttttaggttttctatataatattaattgattattattgatgaatatcaaatttcaagataaataattaaatattattggtttagaattaaaaaaaaaatataaatcacaaaaataatacatttataatcagcttttaatatgttttttaaatatgtgtgttttctagaaattcaagtattaaggaacagagggaatatatcaatattaaaaataccatccaaaaaattgaattttagaagaaatttctataattttgttaggatgaatttgttttgagaaacaaaatggagatgggaaaggggggtagttgaataatgagtaaagctccttaaatctctccattatggctcaccacactgggcaaacatttattccacatttaaacaaccttctttcttgggatattcctctttaacca

SEQ ID NO: 19380 - DNA, 1164 bp, Arabidopsis thaliana landsberg
atattatgtttttatatttatgtatatacgttttaatcaaacaacattgtcaactaagagataaaatattggattaaagcttttggggatttggttgaatttccctattttaggtttttttgagttatttataaatatagagcaatcttctcttttattttatttttggacgatatataaagttttgttggaggtaattatactctataattaaaagtctagatttgtacatccttaggctagatatcaaagcaattagttgagatattgcatttgattatatatattcaattaagaaaacgacaacaatgttaatttgatggatttaattagtaagagcattagaaacgcgcgttgaagtaaattaaatgttaaatgcacaattcttggttatcttcaacattatatatccgttgaaatccctaaaaaaaggatacattcaaataatagtgatgtacatgtaaaagtaagaatacaacaaaacaatgtcggggctaagggaagtgtttcatctctcacaacttcatacgttgattcattttttttttttttttaaatttacttgtctaatatatatatatatatagaagattggatggcacgatcgtaattataacaggcagagcttgtgggattggagctgaagcggttaggttgttcacggaccatggagctaaagtggtcatcgttgacatacaagaagagcttggccaaaacctcgccgtttcgatagggctagacaaagcaagtttttaccgttgtaatgtaaccgaggagacggatgtcgagaacgccgttaagttcaccgttgaaaaacacggaaagcttgacgttctgtttagtaacgccggggtcttggaagcgtttggaagcgttcttgatttggatcttgaggcgtttgatcgaacgatggcggttaacgttcgcggtgcggctgcgtttatcaaacacgcggcacgttcgatggtggctagtggtactcgtggctccattgtatgtacgacgagtattgcggcagagataggtggtccgggacctcatagttacacggcttctaagcacgcgcttctcgggctgatccgatcagcgagtgctggactggggcagtacggtattagagtcaacggtgttgcaccgtatggggttgccacgggaatgactaga

SEQ ID NO: 19381 - DNA, 473 bp, Arabidopsis thaliana landsberg
  unsure (1)..(473): unsure at all n locations
aaccattggggatggtctaagatatatcagaaattgattcctttcacttcactttgtattacgatttagcttgagaagcagtacaccatttatttttaaaaaggtacacaaacgaaccttattaaacacacaacacannnnnnnnnnnnnnnnnnnnnnnnnnnnnnnnnnnctcaaagagttgactttttgtttgcattaggagctttgacataagcaaccagggaagaatctccggttctagtcaatgtcttgagctcgtagcccaaccaacacctcgaactctttctattgtagaaaaaccctaaacatttgcaatctctcgtacacttgtccccacacgcactctccgtcgtcgatgatccaccgttatattttgtcatgaaactatcagctccttcgatcttgaagtagtgaaatgtcttgggatcgcaactagcgagacttggagatttacatgtctcgtcccaacc

SEQ ID NO: 19382 - DNA, 1678 bp, Arabidopsis thaliana landsberg
ataataagctatctgtttatcataatgagcaaaaattttagatttcttctgagttcatttatatatactcctaaaagcaaataatacgatgttatcgcaataagacattattgagaaataaaataaaaacctaaaaacaagagaaggagagaaaactttgtaactacaattaagctgcgtagagttgaagagtgtaattttcatgtcaacaactttaagctttgtctttaatgttcgtaaactatacatacttagaccatccttaatggtgagttcttacacaaaattcttaacattttgatatacaaaataataattaaatattaaggggttcttaataagaagagagaatgtagcaaatatctcttatctaagaaccattttccttttttaagagtcatttcttatattttaaattcttattttgttttatataatattttaagaaaatttttcatattcttaagaactcatggataataatgctcttatgtacatataatatccccaaattattcttattcaattgtcatactgtatggaggcctacctctatatatataaacatacgtacatgaaactccccaaagtataatcatcaatcgcaaaacaaacatcgacccagcacaagtactctctcggtcactctcttatctctcttaccctctctccatctcatattcataacataagggatcttttaatacatggtttttttatctatatataccgtacgcctgtttacaaactggactctctaatatactatcatttgattatttctatgaaattctaaactcgttgagtatatatatgtacacgtaactatacatagctcggcccatcgttatgtggaagttgaagataggaaagggaaatggagaagatccgcatttattcagcagcaataacttcgtcggacgtcaaacatggaagtttgatcacaaagccggctcaccggaggaacgagctgccgtcgaagaagctcgccggggtttcttggataaccgttttcgtgttaaaggttgcagtgatctattgtggcgaatgcaagtgagttctttttttcctcatgaaatatcttatactaatcttcgccttttttgttgttacaactaccaatgtttattttatttggtttgattgtatgtacagtttttaagagagaagaaattcgaacaaggcataccacaactaattgctattaacatagaagaaataacgtatgaaacaacgacaaatgcattacgaagaggcgttcgttacttcacggctttgcaagcctctgacggccattggccgggagaaatcaccggtccgcttttcttccttcctcctctcgtaagtttcttcatctctctctctatacctttttgacgatactctatcttatatttctacgagagagataattaatcttcttaggatcaaaggtaaggttttggcgctttctttattacttgcatggaaatatcaaatatggaataaagaagagaaagacttactatgtttacgaggagattatggacaccaagaactttttggtttggttatccaaaacaaagaatttgtttcgcaaaaatcaaaagactaaaacgagagctagggtggaatttgaacgacttttttttatttttataaatagatattttgtttgtacattaccggacatctggag

SEQ ID NO: 19383 - DNA, 1003 bp, Arabidopsis thaliana landsberg
gaaatctccaacaaaaccagtttcttattttcctaaccaggaaattggtcttgtataatttggagagtatgaaaaatgcgaaaaagtatttttaaagaccaaaaatcgttaagttttaactatctaattttcagttcgcagaattatatgaacgatttgtcatttgttagcacaatgcacaaaagacgagaattcaaatttttaagatttgttgtacgttattaatgttcattactggtttgacttgacaatatccaaaactatttttttttctgtttcaaatgttgttgaaccatttttcatttgtcgatctgattattcttgcggatgaatcatgtgaatgtgatatcatcatatctccacaaagactcttgaaaagtaatttattgtatctatctcaaaaaaaattatactgatgttgtttataggaaaaaatatattatttatttgttggacatttcatttttattaagagaaaagctcaaatgaacaattacataaggtggaaacaaaacccaagaaaatctcaatttgactatcaatcaacaaagtgaatatatttactaatcagattttgatcaattccaacttcagtgttataatatcttagcggcgttggattcgtattgacgagagatttctaataagatatctatcaagttttaattcttcctgaaaagaacaccattaatgaatttgaacctcacttctattgagaaaaattgaaaaatgaaaaagataaggcttacgaaactcttccaccaaaactgaatataacccaaaactaaagcactaatatggagaagaatgatcaaactatgtcataacaaattccggtccccaaaaatgttcaaattgaagttgataaaaaaagatctcgaaatctcaccaaaacttcaagttgactttgtatttagcttttatatctttgggcatcataatgcatatatataagtggtattagcgttgaacaatagagatacgagttgccaaaaactctccc

SEQ ID NO: 19384 - DNA, 664 bp, Arabidopsis thaliana landsberg
gcttcccatttaatcgtacagcgctagccagtgcttcacctgggcgactactccgttcatccttggcctttcctgtaccctcaatcgcaaacttcatattctccttctctttttctctctaaaccggattctctcatctctccaaagcatctgcttcttaaagctaagaaaacacactccattcttgatatgttctcttgacttgcttccgttgacttgtccccatgattcccaataattgcaggaatctgcaatagtaaatattattttacagagccggaccaatgaaattcgggcccatttaaattacgaaaacaaagtactttggtctttaaaactatagagtaaatagaaaccaatgtaaacaaaactctgaattatatattaaattgaatgttagatccataaatattctggatcacactatcatctaagatttatatgtataaaactaactatttctcctattaaaaatcaatgtatatatgtatatatatatatatgtatttaatcacaacaaaatagctgtgggacccttttaaaatgggagccccattagaatgtttcatcttcatgtgctacggtccggctccaatatgcttctcttacttttctggatttccaggccaaatatggggaccacctgcacctaacccttgtcttc

SEQ ID NO: 19385 - DNA, 1940 bp, Arabidopsis thaliana landsberg
aggctaattgctgctgcacagaactcttcgaaatacatcttcctatacgctagagattccatctgccaaaacagatgatcattagaaaccaaaagattgattcatttttctctcaaatttgttctcaggttctcacagtgtgaagtatttcagtaactcttgattctctcattgcgtctgttgcgttttgcataagcgcctgcgaggatggagcttattaaacctttttagtttaaaaaagccgatgtgactattgaccaaaggccttccttcagattaagtaacttaccgtcttgaagttttcgagagagacgctaccatctttgtttggtcccaacagcatgaactgtgctctaagatagactagctcgttctcggtcaatgcttttgctagcgcctagattcaattattaaacatatgcttcaatcttctaaatcaactcttaccaactttgtgccaaaagaagaagaagaagaaagtcatacctttaaagcagctcgtctaagaggtgtcgcgtgcaagtaggctttgaccaacttatagatcaaaatgtctaaaggaatcacacgactatcatcccgtaaccacggatgagctgaaaataaacatatcattagttctgtaatgttcaaaataatataactcaatgatgtgtcaaaaaaagaaaaaaaaaactcactcaaagcttgaactgcagacattcgcttcctatagtctttgttgagaagtcgtttcacaaaatctttaccttctgatgaacaagaaggccaaggtacgtcatcatagtttggttcagttcttagtacagtgcgaaagattccagattctgtccgtgcccaaaaaggtcggcttccacataagagtatatatgtaataactccaatactccatatatcagcctcaaggctatatgacctgtgtaaaacttcaggcgcgacatagtaggcacttccaactatatcattcagtctttcatctgcattgaggaattcaatcaaatttcactagtaggcagctataaggaaagtatagtgacaaggcctgaaagaatgaaaagtcttaccaggtctaataaagtctgagagaccaaaatcaataagtttcaagtctgagtcttcgcggcttgatgtaaatagaaaattctgttgaacaaggtaacaggagtgtttagtaatgatgtgtaatgctactggaggtagagatagggaaagttttctttgtaaaaacagacctctggctttaagtcacggtgcacaactccttggagatgacaaaatgaaacaacagttagaatttgtacgacaatcgcctttgcatcatcctccgggtatttaccacccctgagacaagagaatgcagtgtttgagcatagatatgaataaattctcagcatttaacttgaggcatatgcagagaaacacctaaaagagtaatcagacataccttgctaaaattctgtccaaaagttctccaccatcacacaacctggtcaagcagaaccaaacatcgatttaagtaactggtttacaaggtgtgtctgattacagagatatgttcaaagaaatgcagttcagaagtgatgttctgtgttacaacatttaagtaacagccaaaatcctgaggaagagagaacatcaaatatctgataaaaaaaaatggaaacaagacatactccatgactatgtatacgttattggcgtcctcacatgcatcataatatttgattaaatatttgtgtccagataatgatttcagtaacttcacctccctgcgaacatcttcaattgcaattgctgttgtcatctgccaagtacagaaagataattcagtcaacaaatcctttttgcttgttctattagagagaaggatagcacaactgtcaccaaaatgtgtcagaccagcttcattacaaagataagccaaaatcatgagctttaaa

SEQ ID NO: 19386 - DNA, 630 bp, Arabidopsis thaliana landsberg
accaagcaaggaacattgagccatctagatcagccttgtttaacattgtttctacttgatcatcgcctttgaaataaataaattgttcccctggcaaatggaacaaaagtttcatcatagtagtagatctataatgtataggatattttaatattctccaggctgcttcgcaagcagaaacatatatgaaatgcgaaattatacaatcataaggaacataaataaatgtatttaactggaataatactattaaaattttaattaaacatacctgcaattgaaatagtcttctacttcattcttcttctttggctctgatccatcagtatcagcattgaccttctgtttacctttttctttatttttcgaatttagagacgattcaacaacaacagtaacacgatctggttctttatgaatatacttgaatatgtatttcacagaacctgaatggttacaccactccacgttgatgtgagttccgtatctcattgatagggatctattataaggaatgacacaacgtttatcgcatttaaagtctttcttctgaacatagtcatctgttcttcgccttctgtatattggaaatctttctttatcaataattggttttgtgacatgatcttt

SEQ ID NO: 19387 - DNA, 790 bp, Arabidopsis thaliana landsberg
gacgcattcccctgtaaagctcaagagcattctcgtataacccatgtgacacattagcttttagaatcgagttccacaaacgcaaatccgacaacaaaacaagagaaacagtctcgaaaacgttacgggcatcgagaaggagtcctaaccgagagtaaaccgatatgagattcgcagctaatgacccagaacggaagatgaaatcggatagaagtacttgggcatgaacttgcctgcattgctgagctgtcaggcataatccaagaagatgatcgaagtaatggaagagggattgatcattgttagacgtaagggagtagtacgaggaaactgaaacggtgtcgggagaagaaatcgatgtgtatggacattgagaagtgaggaagcaaaaattacgaagacgccaagggataatttgaaggcgaaattgccaaagagaagcgtgaaccatatcaagtagaagagggaaaatgtaaacagaaacttcaaatgctgtttactttgaagctagtattttaaaaacattaaaaataggttaaacgctgttaatcgacatttaaataggtttattgtgtatttaccatgagtaaaaattaaattaccatgaggacatgtatctagtactcaaatttaccattgtcaatgatattatcaggacatgtattagaaaacaactaactagaagtggtagtatatataccattgttcactcgtggagccccaaagtctcagccaatctcacggcattgcctttggaccaagctccttgaatcactctcaaaactgattt

SEQ ID NO: 19388 - DNA, 498 bp, Arabidopsis thaliana landsberg
  unsure (1)..(498): unsure at all n locations
agaaaagaattccttaagatggtctcaagagacagattaccctccagaagagaaggttgcctattttgaagaaaggggaattgagtattctgctgcagacctctccagggaggnnnnnnnnnnnnnnnnnggtattagagaggattatgctgaccctctctacagttcattttcttcttgataagtgtgaggagtcaagctagagacttaaaacaagctcacttgggagaaagtcccatgactatccttgtaaataatttttactttcttgttatttttgatttgctttggttgtgtttgtggttctcaggaagaaaggagtaacgtgaaggtagagtaaaaattcaaaacttttactctactgatggcctagagatcgagtatattggtcgagtatgagtgatgtttaaaaacctaaaaaaaattttaatcatcgttttactcgaccaacagaagcttcagagtcttccaggaaatttatcaagtttacagaagatt

SEQ ID NO: 19389 - DNA, 506 bp, Arabidopsis thaliana landsberg
tgttaatcccagttggtgagtctatattgtccagaattattttattgaatggccatggaattttgcagccaacagcttgtccaagtgaactcacagatggtgtaggcctccaggtagatgtttctttggttgatgcagacttcaccataactgctgctgcattaggaccgagtggaatatgtcctatcttgtacattggatcagctgagcagaattctgcttaccctacaacaacctgaacttgtgaataccattccaacagctaacacctgggtcctgcattgaaaacattactggactccgagttacaaccattatcatgctacatacaagaagaaaacaacgaagtatttaaaaacttacaagttggcatgaatttaataacaaattgtacatttaacttacccttttgcctgcagctcagtcacgaactacattttgtaggtcttcaaccttgatgagcaactctgcttgggttgcttctagcttttgcacatgagtgtctc

SEQ ID NO: 19390 - DNA, 1567 bp, Arabidopsis thaliana landsberg
aatcaaactatgggagatatagttctggttactacatgcagcaagttaaaagaaacgagctcagcttccatctcatctcctctactcagcgccacaaactataacgtatggactatgcggatgaggttgttgctcaaggtacacaaagtttgggatactgttgaaccgggatcagaagacgtggacaagaacgatatcgccagagccctcatcttccaatcagtacctgagtctctaacccttcaaatcggagaacttgagactgcgaaggaagtttgggaatcgataaaaacgaaaaacgttggagcagaaagagttaaggaggcaagacttcagactctcatggcagaatttgagagagccaagatgaaagagacagatacaatagaagactttgcagggagactttcagagataaccacaaaactgcagcattaggagaaaagattgaagcatcaaaattagtcaagaaattcctaaacagtctaccaaggaaacgcttcatacaaatcatcgcctcacttgaacaggttctcgaccttaacaagacaagctttgaagacaaagtggggaggatgaaagtctatgaagaaaggatatgtgatgaagaggaggatcaaacaaacgatggaaaacttatgtatgcaaaccatgattcacaatctcagcaaggtagaggcagaggacaaggagatcgcttctatcaaagagggagaggtcgtggcaggtttggatatcagggttacaaacaagagcgtgatacgtcaaaggtggtctgttacagatgtgataagctaggacactatgcttcttcttgtcctgatcgtctacttaagctacaaaaagcaaaagaagaagaagacaatgacactcaagaagctgaagaactaatggtgcatgaagtggtatatctcaatgagaaaaatgttaaaccaagcgagtttgagacaagttcggatgcaagcaacgtatggtatttagataatggagcaagcaaccatatgttaggaaatcgagcttttttcgaaaattgatgaatcaattacaaggaaagttcattttggagatgactcgagaatcgacataaagggaaaaggctcagttctgttcattagcaaaaacaaggaaaagaaaattcttgctgatgtatacttcatacctgatctcaagagcaacatcataagccttggacaagctacagaatcagggtgtgaagttcgaatgaaagatgatttgctcattatgcatgacaaggatggaaagctgctagtaaaagcaaatcgatctaaaaatcgattgtataaagtattcatggagattgagcctcttaagtgtctacaagcaatggtccttagtaactcagcaaaatggcactcacggttaggccatattggagttgagaccttgaagacgatggtgaagaaggatcttgttatcggaatgcctcaaatggacagtgaaaaagaaacatgtgcttcatgtttactcgggaaacaagtaagcaaaagcttccctcaagcttcatcttatcgtgctacacagaacctagagttgatacacggagatc

SEQ ID NO: 19391 - DNA, 537 bp, Arabidopsis thaliana landsberg
caattgtgttaagccacaaacggttgtgggaatttctatgcatacacaaccattgacaaaaaaccaataattaagtggccatcggtctcacaggccacacagccctttgtctatcacatctggagataaacgaataatgttctccataatagccaaaggatccctccaacaaccatctttaagaatattgatcgagagatccggaacaccatctctggtagacgatacaagaacagatggaggaagctgatgcttctttggattcgatagctcggattctttccatctctttttaaatgcattgtaatcttgctactttatctttcactttcctttttttttttttctttttcgctaagagtgctctacttttaggaaatattttgtaatatataccttctatttcatttcataacgatattacaagttagtaaaaaaaattgacaacaaacatttcatttcatgcatgacccttgttgccaatttgtgtggccggggcaaaaaaccacccatccaatcttttgtcaattaaagatg

SEQ ID NO: 19392 - DNA, 624 bp, Arabidopsis thaliana landsberg
gattttaatcatttctggctttcttttcattaaaataaaaaattcacatcaaataaagcttttatctttctagtggattgaccttctttgctaaaaaaatcatatataaaacgaaaaacaaaatctactatacattttaaagaaataaaaattcatcaatgtaattaatgaatagtgattaaggttagtaagaccacttgactattgtaaaaaacctaaaaccatactaatattttttggtttgaaaattttaatggttacaaattagaaagacattaaatcctacattaagttgagtacatttagaccgaaactaataatggggacaacaaaataatcaatcaatgcctatacgtttttttatatacatatatatatctccgtttttcatcattatggttttatgcaaatcccaaaagtgagtcattccaccttcccgaatcttggttacatatttaatccaaatgatatattatatagaaaaataaaattgcaaatggaactaaagagttattttttattccaatatcttattggaaataatggtgggggtcaaatttcctttatgttatacatttggctattctccaataagctatttttctcttccttaaataaataatc

SEQ ID NO: 19393 - DNA, 603 bp, Arabidopsis thaliana landsberg
  unsure (1)..(603): unsure at all n locations
gtcttatctttttacgatagatttaatcttaaccattcattttatttggtatgtaattaaaagctaatcaagggcatattctctctctattcgattatattctctacagatacaattttcatatatgttctaatcaaaatagcatatttgaatcaataatttgtttccgtaaataaggttacgaatatgatgcattaattttggatttaagaaatcttgcttgctcacaaagaaatcagactcagtttttattgtcatacaatgttggcgttttccaaaatatgtgtacatgttcttgcagatgagtctattagtgagggttacttaaacaaaatgttgtattttttggaaaacaaagtttatttttagatattggttctattttttacatctaattttatttttaaatcataaatttagaaaatctattatattttttatggtcaaacaaaatttagaaatctattaatgatttactcattccgtaaagcactataaattgtcgtaaggcctaaatacattttcgcactcaagtcaaacagaactcttctattntcctctgtcttcatatccaacagagatctcttcatggctccaattact

SEQ ID NO: 19394 - DNA, 1389 bp, Arabidopsis thaliana landsberg
  unsure (1)..(1389): unsure at all n locations
atctcctttggcacacctctttatttgacccattttcctgcacgaagccctataacggggattttgggagtcgtggttgcttctttccggaaatcacctgtcaaagtccctgaagacgccacacttctgtatgaaactcaagacaagaactctgctattgctggaagtagannnnnnnnnnnnnnnnnnnnnnnnnnnnnaatatccgcttcattgctttccagtaatgtatagctttacttggtttaacaagttattctggtatgatgcaggtatcttgacaaagccgctgttatctcagaagaagaatcgaaatccggagattattccaactcgtggagactatgcacggttacgcaagtcgaagaactcaagattctgatccgaatgttcccaatctgggcttctggtatcattttctcagctgtatacgcacaaatgtccacaatgtttgttcaacaaggccgagccatgaactgcaaaattggatcattccagcttcctcctgcagcactcgggacattcgacacagcaagcgtcatcatctgggtgccgctctacgaccggttcatcgttcccttagcaagaaagttcacaggagtagacaaaggattcactgagatacaaagaatgggaattggtctgtttgtctctgttctctgtatggcagctgcagctatcgtcgaaatcatccgtctccatatggccaacgatcttggattagtcgagtcaggagccccagttcccatatccgtcttgtggcagattccacagtacttcattctcggtgcagccgaagtattctacttcatcggtcagctcgagttcttctacgaccaatctccagatgcaatgagaagcttgtgcagtgccttagctcttttgaccaatgcacttggtaactacttgagctcgttgatcctcacgctcgtgacttattttacaacaagaaatgggcaagaaggttggatttcggataatctcaattcaggtcatctcgattacttcttctggctcttggctggtcttagccttgtgaacatggcggtttacttcttctctgctgctaggtataagcaaaagaaagcttcgtcgtagtaatgctgttatctatctactttcattacatacaaaagtttgtttctttcaactgtaactgtctctgtatcaataacaacattgctgtgtacttttcctttcaatttcaaaagtttaagtcgcatttgcaatattataaacaattcagggttcgaatactaaattgagagaaattatccataggcttagtaaatcaaatgggcttttggcccatatcaaacgggcacaaatatgacccggagaagaagaatgttccgggtcaataaaatcgaagaagaagaagagagtatc

SEQ ID NO: 19395 - DNA, 418 bp, Arabidopsis thaliana landsberg
  unsure (1)..(418): unsure at all n locations
gtgatcttcttcattggatggatgagacttatctccattcttgcttttctcacaccggcgaggtattattttgttcattggtactctgttttggatttaggttgttacttgtaaatatggttaaaaattcatcctnnnnnnnnnnnnnnnnnnngttcttgtgttttgattcattgttaaaccaagtagctattttaaaaaactagttagttggattagattagatccaatggatatagaaacaaatagggtaatggagaacaactttgacctgaaaaggacaggacaagttcatatttcgttaggcaaaaagtactcttgtaccttgccacgtttagttaaaacttttctggtatgaaagagaatgattgcataagattttcacttttcatgaataaacttatatcccagtatacat

SEQ ID NO: 19396 - DNA, 1363 bp, Arabidopsis thaliana landsberg
ggtctcttcaccctgcaactacttaacttaaaaagggatttaaaagatcttgatcttctccattgtaacaaatgtaaatatgcgattaagagttgctctcatgttgcaagatggttgatgtaatgagtgagtcttttttgcaaattgtaagtttaagactctctaaatcttgttgttggctttaaggttagtggactcatgtatatattgttgatgcaaataatttatatcgcttaagtaaatgatgtatatattgttgatgcaaataatttaaagtatacataatatttgcattgtttgttgtaactaatgttaatttgagtcaactacaaaaaaagatgttatctttttaaatcactttttgtaagtgttctaagtatttgcatcagtttatcaaaatcatatatatgaaagttggtcaaaatcatatatatttgccatgtgtctattaaataattaatgtaagctcttcaacttctaatttataggttaataatatttttattatccaaactcaaagtaactatgagtatataatagtcgtggattacttaatgatttgagtaagttattctcttaaatgaatattatactctcttaaattgatatttatacaataaatcattgagggtgaagaatatgtaaggagctccatcatcaaattcttagggttctagaatccaaaactaccctctgttaagttggtttaatacaaacgttgtttatgaattatgtgtatgatgcattgttgataatattgttagaaaaaatatttttaaaaataaaagtaattgcttattgtataagtgaataattagataaataaaaattatatttaaattaaacaatacgaaaaaattcgaaaaaaccgcggcgtagtgcggatgatcacctagtacattaaaaaaaaaaaatcaattttattagaatatcccacatcgcttgaaattaagatctttgaacatgttacaatccttaattattaaactaggctatattcctaataaatatgtatattgataattaccaaaaattatacccgaccatcaaatattttttaacttcataagtttgaaattaaaatgaagttgatacgagattttaaacttcattttttattacatagtattggcatatctaacatcaactaaccaatggaattcacaaatgacttaatcatatggagtaaaatatctaaatcatatggagcccgcttttatggctatccaatagatattctaaagaggcatatgccttttggagactaaaaagttttaattagtagttggtgattaaacgtttgaagtataagctgtgaatagtcaaagagtagctcaatttcagtcacctaatcatataccaa

SEQ ID NO: 19397 - DNA, 1255 bp, Arabidopsis thaliana landsberg
aataattgtaatactcttcattcatcaaaaaaacatattatatctaaatatctccttggtccaaaaataaaaaatgaaaaaaatctacatgtctccttttgggttgttttttttatagatcaacactagcccatataaaagagtctagttcaaactgagcccagctacaccaaagaatctagtgggggacgtgtggcaggcagtaattggagcgttgaccaagaatggacattattatacatccacgtggttagagcatgattataggtgatactcacaaagtatcattaatttttttttaatattatttataatgtttgtttaatagataaatatttttttcttacttttaacaaatgctaccaatcaggagatgctacatagatgatactggtatcaaaaaaatcactggaatgatactaatcaagctcattctaattgctttactaatataaaaataatttttggactgatgatactctaaaaatatcacccatgtacatggtcttagcagttcaaatgttggtcgcggcctatatatagaagaacataactctaaaaatagctaaatccaaccacttcccttggattggaatctctcataaacagttttttggtctggtccgctccagtccatactcataaggtggtagatgtttacttagggtacatcatacatgcacaacgttagtagttgcaggccatagacgtgtttgccctttattacgcgaaaaccactactcccttcgctagtctactttcgtcaattgaaccactaaacccaatgaaacctaatattttagtgtgctcaataatttatcatcatcccaattcccaagcgtaccaagattataatctaacttaacgcgaaatgtcatgacaaaacctatatacaatgaaaaagattttgcatgacaaacaaagaaaaaataaacactagaaatgagttctcgtaataaagttggtgtgaactggtttttgaacgtgaagatgaccccttcatatttttatttcttggtttttgcttgagagggttaaagactcttaaggaagaaatacattacacgtcaaacctttttgggaaaacaatgaacgcttcatttataatgtttctattttttactcttaggtaaaacattgcaattgatagatgacaagaacaaaagcagaggattaaaagaaagattaaactatgaaaaaaggacgcgtgtgaagagaattagagattcttggttaagacagattaactaacaaa

SEQ ID NO: 19398 - DNA, 2032 bp, Arabidopsis thaliana landsberg
tcacttgtaggccggatgcatattatttcaccatctgctggtgatgatttttacttgaggatcctcctaaccaataaaaaaggtgcagccagttttgagaatttacgtattgttgacggcattttgtatccgaggtttcaagatgcatgtggtgctttggttctccttgaagatgaccaattgtatatcaatgcaatcacagaagccagccgatggggatcaactaagtacatgcgttgatacagtgccaattgccttaaatacactctttcaaataagagatcagttgtagtatttaagggtcggatttccacaaagtccttttgttcacacaatgaattaagtatcaagattaaggtagaagggaatatgaaaaaataaaaagataacacagtaaacaaattgcagattgattggttgtgaagcaagataataaagagtcgggtttagggtattctcaggatactattgattagtagatctaatgatagttaggttgttatcgaaccattcttaaactcaaagtcttattatggaatagccagtggcgtttcgcgtaactccctatgcctatagctaagaatacccggagaagccgagagatctataacttaaacatgcattctcaacgagttcaattgttcaccttagtagataggccgattcctattacacacctataaaccaggctcatcaaataatagatccaactacagatacctatggcaggtatatctattgtttggattcaagttctagttaattactctagaactagcattgagaacaattaaagatgaagaattctacagataacctaacaggtggcgatctactaaaccatatgaatcctaatgagaaatcaaaaacaaaacaagcaaactactaagacataatgattgaaacaagcaacataattgagtaacaaagcataaacacaacaaataaggtaagagtatgaaatgatctcttaactgtattgaaaactggatggatctctgaaaatagggatgaatagcttatgtctctatgaaaatagggatgaaaagaactttataggtctaaataatgacctctaaaactatataaatgacctaataatcacccaaggactaataatgcaaataggaaagtctcctggggcaaatttccacttctgtaaacttgaaagcgtaatggacttctctgggccgaaacaggtgtcgatcgacaccaggagtgtgtcgatcgacactctcgctgaatcttgaactgaaatcgtccttagcttccttttccttagcttttgctccaaaatgtctcctcgtctccattgttgtcccactgcatggaatacctgaaaagactctaaaaagactcgaaaattaacaaaaagactcaaaatcctaaatctaaaacatagataaaatcagtaaaaacagggttatatcaatagctttaactaccgaaagccaaccgcagccgatactagtttccttgatcaaccaaattgcccataacaaatcctggtataagaatcttgatagccttgataactttctcgataaccttaactgtccaatgccaacggtagccgatactagtctttagccatgtcaatcaggcctctgctccgcgggcctggcccgtttagggatgttgcggggtgggtttgggcccatgtatggaagaccaaaaaaatgtgggcctcgcggtcttggcccgtttggattgcggttgaaataaggctaacccgttttgcaccacggattttcgggttgccccacttcttcttccaagatagcactgttatgctcctttgctacgattcctcttcttccggttgctagtctgttaagagtcgctgttcactttgaagaatcttctttctcttcaggatgttagtctttaggcctctgttactacttgcgactcgattggtcaggtactattggatatatatttctaaatttggaatcttctctatcgactcctttacttctctcaaagattcattatagaggttggtctcttctctgacatgaatattagt

SEQ ID NO: 19399 - DNA, 284 bp, Arabidopsis thaliana landsberg
ctgctcgaagaccaaagaattgactagttctgttgtggttgtacccctcctgcttgttgcctaactctgggaggcactgatggaagagcgtttgagcatctggatgtcaggatgctgagacttgatcaagcgatagataaggctagggaacggcagaaagaacttggagacaggcttcagtgccagttgacgaacatggtcatacaccatttcaccataatcgattgccattttgtgagcaatgcgatagacaagacgacctctatcaatgcttacataccctt

SEQ ID NO: 19400 - DNA, 582 bp, Arabidopsis thaliana landsberg
cgttatgtagaaatgtgccctgtaggctttgagtctctcattagacggctcctcatctttggtagcagtttctatcgccactttcacaatctccaacttggacagaacttctggcttctgaactgtctacaattttggagttcatcttattattattaccagtagtgccactcgtggtggtatgtcattaattgatatatatatatgtaaaacttacctcagtgatcgacctatcagttgtagtaattacaagttccaaatacatagaaatccaatcagtggcctgccactctgattccttcagctgcaaaagcaataaccacatatcaattgatcatgagctagcacaacaaaagttaagataatgaagtgtcataacatattatagggcattttaccatgtaaaatcgttttccatcattcaaagcatcatctgagggccaatcaggcaattcaccttggaagataccaccggcccgtgcatacaaagcatcatctaagacatgctcaggcaattaatctttggagacagcctccatcagtgcattcaaagcatcatctgagagacaatcaagcaattca

SEQ ID NO: 19401 - DNA, 1238 bp, Arabidopsis thaliana landsberg
cacaatgtttatgacaaaatcattacatgtgtatgatacataaattcttatacaaacgactaattgacaaaatcagtagaactaaagcttctttacttagactagcgattgtgtccatcacaatcttataagtttgctttgtttatgaaaatttcccaacactaacataaataaaaaggcacttatttgaactaattacaggatacaaacaacaacaacaaaatatgccagagaattagaaacttgccagaaatgaaaccagcaaaaatagagatatccatccatcaagcattatataactacattagctttacacgactttcatggctaaacttaagtcttattgatgatcccaatcactttcacaaaaaccaattcaaagcattctatacaacaaaagacaaaacaaaaaccacactgcggagatattgaaagaggcaaaaaatagcaagctttgaacatcaatgtttcatctttaagataatccttcgtagctatctatacagataaaaaaatagcaagctttgaacatcaatgtttcatctttctaaatacgcgacagatacaaaactcaagaatcagcgcatacccatgaatctcaacaaatacaaaaacccatgaaaaattatagcctataagcatcataaactcgatacaaaacccatgaatcttacttttccaaaacgagctaccacatatatcacagctaattcccattcacacaaaattatacaaataatcgaatccatcgaatgactcaaggagaaatcaaacccatgattcttacctctctaacaatggtcgaagctagaaacacctgaaacccattaggagaaatcgattcattaaccaatccatgagacagagagatagaaggggagagtgagagagagagagagagaacgcacgagaagattccggcggaagatccggcgaagagctccggcaaagtgatctcgtttctctttggagcatcccgcattctcctatcttccaatttctttcgtagtatggtgtgaactcaaagacaagctccgtggaagtcacctcctctacttcaagttcaaatgtgtatatatgctctgttaaaactggatatatacgatgatcgcttggtgtacactgaactttgagacccttctgttcgtccttgatgtcaattttcatccattgatcataacccatcagtttttcattaaccttaacaagcatgatacaagccttaaatctcaaggttg

SEQ ID NO: 19402 - DNA, 1239 bp, Arabidopsis thaliana landsberg
gacggtatcttcttctccgccaaatggtaactgcaagagattcgctatcagttattgaatatgtcaaatgtttgcatattgcaggataaaatttcagtaaaaagcatctcacacgctgtctttttccagcccattcgcaacttggttaaggaaatccagagtgaacatgtgtaagcacacctgaaaagtaaacatcgttttcgacttacattatgaactttaaacacatgccttttccacaaaaacactcactgtccttaaaaatatttgaaataagcaatctaagttgcacaaaaatggaacaatcgcaatagtaccggaaataatgatctaagtataacttcgaaaacttataaagagggaggagtttacgttactccagcaatattgaagacgtcctgtttgttgattagttgcagaagccatagactggtcaagctctgtgtactcaactacagtcaaaggcccaccttttcccctccttacaaatactccaactttttcctgtggatatgcctgttttcataacaagctactcgcttaaaaacttaactatgatttggcccgggagaaactaattgcaggaaggtgaaaactgaatatagaatagttcatggaaccaatgaattagaaaggtatctgaatataccttgcgcactacttttgcagctgaagctgcacttttgtcgatgaagtatcccagaaaagtagggtcagctactcgaacctgccttccaggattccatattataacaacgttgagaagaattgagaaagttctcgaataaagattacactagagagctaaccagaacattgtcaacgccatagcaatccacatatttaatccccctcgaagccatatcctctaataaccttgaagattttagcgctgtaaaaatctcggatcagcatcagcaacggtttgaatagaacatatgtatgatagtaaaaaacagaatcaaaatttagtaaacatacctgcatagactccgccgttaccatctggagctttagctagctgttaatgatatgtaattaaactcattaagtgagtactgaaaacaaaagtgagtgcttgtcattttttaattgtacatacactgaaaggtgtctccataataaactttccatcctttgtaacgcagggcaaagtaccttgttggaaaaaactgatctgtagtaagaagtgatcaagactggtctaagagtcgaaggaatcaacaataaggaatgttt

SEQ ID NO: 19403 - DNA, 1621 bp, Arabidopsis thaliana landsberg
ccaatgtgtatttaaggaatagacaattaatcattttttaatctatatgtaaaaagtatttaaccgatattttcaatttgacgcctcccaattgaaaggagccaaaagcaaccgatcaagtggagaccagtagccatacacattcactcctacccttacatgagaaagataagattatggagttttctgccacgtgatcttatcctagtggtccaaatcgataagggtgtcaacacctttccttaatcctgtggcaattaacgacgttatcatgaattatggcccctttgatcattagggctagttgcctctagcggttcccactatataaagatgacaaaaccaacagacaaacaagtaagtaagagaaaaaccaaaagaagaagagaaacaacaagaagtagtaatggcttcctctatgctctcctccgccgctgtggttacatccccggctcaggccaccatggtcgctccattcaccggcttgaagtcatccgctgcattcccggtcacccgcaagaccaacaaggacatcacttccatcgcaagcaacgggggaagagttagctgcatgaaggtaatatcatcaataaaaactgtcttttgtcatgtgcaataaaacaaaacataggatatattaatttggaattggatttggggattataggtgtggccaccaattggaaagaagaagtttgagactctatcttacctccctgaccttagtgacgtcgaattggctaaggaagttgactaccttctccgcaacaagtggattccttgtgttgaattcgagttagaggtaataaacacaaaagttttcttttgtctactaatcattattatttttttcgttttcattgctagaaatattagcctataaccggattttgtagaaccgaaatagactatatcaccttgtgcatatcctccaatatcaattgtattgaatggttttcttatgtgtttatagcacggatttgtgtaccgtgagcacggaaacactcccggatactacgatggacggtactggacaatgtggaagcttccattgttcggatgcaccgactccgctcaagtgttgaaggaagttgaagaatgcaagaaggagtacccgggcgccttcattaggatcatcggattcgacaacacccgtcaagtccagtgcatcagtttcattgcctacaagcccccaagcttcactgatgcttaaatccttttctggaatattcaatgttgactatccggaacccaattttgtatggtcaatgtaaatttaagtaattattttgccaaagtgaaaaaactgaaggtttgtttttctatcgtttcctctataaaaatctctattcatatcacttcatttctgctcttatcacttttaactctttttattcgttttatctcttttaactaacattttagttcctttaaatttctctcctaattcttgcctttggttctctaatgaaagagtaccctttttaggtacatttcgcacttgaaagcataacaaagatgcgtccatcaatcaaattttgagggttgatttagaacattttaatttaaagatgaaaaacagccagtaaaggtagtaaaaatacgtagaaaatagagatct

SEQ ID NO: 19404 - DNA, 857 bp, Arabidopsis thaliana landsberg
tcaggtcgactctagaggatcccctacaacgctgattgtctagctcctccatggtgaagcgatgactcctctccaagatggtcaacgagttgctggagtcacaatatagcttgtcaagattgtcatgagaagcaacaagggcatgttttcttcctgcaaacaagaattgacttcttcaaacgtcgagccagcaataagaacatagcaaaacaaagcttgggttttcaggtcaccttttcataatcaagctgagcgcgcagagtagagttcaacacgttggcatcgttcagagtagcagaaacttgggccagctcagtctgactttgggaatacttttcttcaaaatcagagcaccaccggaccaattcagcctgattttgagaatgtttctcttcaagaacataaaactgccgagccatatctagcgagaaacggtcaagcaaaaagtttagattaagaagcagtttaataagatagaagaaaggaagcataaaagcactaaccagcattcgccgcctctaagtcagaaacacgctgttgaagcagcaccggattccaacgtgccagagacgaagctctttctggaatagaagcaccttgcaacttcaactgactagccatcccatccaccaatgtctaatattgagagcacatgagtgtaatgacagcagttcatccggtgtaaaagttagactagaatagaccatagtacctggaggttggagaagaacgaggggactcccaaatcgtgagaaatcaattgatggcttggcgtaggatcaccatccggagcaacttgcaatgaaccagcaggaaccaattcagtgtcatcagtagagcccaaaactttgtcgtca

SEQ ID NO: 19405 - DNA, 897 bp, Arabidopsis thaliana landsberg
tttgttttactgttctcctgcaagagaaaatgattgaattaaaaacaagtgttagcttgaagaatatattgcagctaaaaagcaccgagtttaaaaccttgctcaattttagagtaaagcaattcaaacaaaatcaattaagagacatagcagatccaaatcaaatctccagattggatggattcaattcgtctcaaggcaaattgagctgggacttacgatcttaacagctacgatctcgaaggtatcgacgtgcgtagctgcgaaaacaacaaacagaagacgcgtcaatttcaaatcataaagcaaactcggaaaaccaaagggacaagaacagaggagaacacaaacctagaaaaatctctccgaacgaaccaccgccgatcttccggccgagcttgtacttgccgccgatgatacgttccatggcagctccaatctgaaccgaatctggatcaagcgcaaggatagagataaggatttagggttgttgtttagaagattgaaattagaggaactcaaaacatatattattatttttgtttgactgacatcggtggtagtgacatggacccaggcttgtttgagccgtagtagtgatccttcaaaaaaaaaaattgtacacctaactactacaccattttgggtccgccaatcttttttaccttataaacaaacacgagggtatttacgtaatttcgtaatgtcacgctggcacggtggatgatttgatgatttccgtttttggggtctgcaaaatgatgaaggttcgaaaatgttatagctagctataaaaaaatctaatccactaactagttctctaccaaatcgtcaaatctggtatatcatcaattctaggtgttggatttaatattgagacaggatttatacggattt

SEQ ID NO: 19406 - DNA, 1999 bp, Arabidopsis thaliana landsberg
acctgtgacaggaaatcagacttcaaacgtcttgtttggtctaggagattcgtcctacttttccatgaactatcaatgactggtgctccaatttcaatgatggagttggctttcgagcttttgagctgtggtgcaacagtatatgcttgagttcttagcaggagaggtggattgatgcaagagctcagtaggagaaggatcaaagttgttgaagacaaaggagaactcagcttcaagactgccatgaaagcagatttgatcatcgcaggatcagcagtgtgtacctcatggataggtaagaattcattatgcagattttagactactaatttacaatcagaggaaagcatatcttaattactttttttttttccttttctcgcagatcaatacatgaatcatcatccagctggtggaagtcaaatagcttggtggataatggagaatcgacgagaatactttgatcgagcgaaaccagttcttgaccgagtgaaaatgctgattttcttatctgaatcacagagcagacaatggttaacatggtgcgaggaggagcatataaagcttagatcacaaccagtgattgttccactatctgttaatgatgagttagcttttgtagcggggatttcttcttcactcaacacaccaacactttcaccagagaaaatgagggtgaagagacaaatattacgcgaatcagtgagaacagagttaggaataacagattcagatatgcttgtgatgtctcttagcagcataaacccaacaaagggacaacttcttctccttgaatctattgccttggctctttctgagagaggacaagaatctcaaaggaatcacaaggggatcattaggaaagaaaaggttagtctctccagcaaacatcgtttaagaggttcatcacgacagatgaaaagtgtttctctcacacttgacaatggcttaagaagagaaaagcaagaacttaaagttcttttaggatccgtgggttcaaagagcaacaaagttggatacgttaaagagatgttaagcttcttgtcaaacagcggaaacttatctaagtcggtaatgtggactcccgcaacaacccgtgttgcctcattatactctgcagcagatgtctacgtaacaaactctcaggtaacctttccccttgatccttttatggctccactcaaaacaaactatcaatgctatttgaagcgttcttcaacttttgtttacccagcttcaactgtgaaacagggagttggtgaaacattcgggagagtgactatcgaagcaatggcttatggtcttccggtgagaaacaaacgatagacttattggttattcgggagagacaaaaaaaatgcaatgatctaattctaatcattgtttttaatgggagcaggttcttggaacagatgctggaggaacaaaagagatagtggagcacaatgttacagggctacttcaccctgtggggagggcaggtaacaaagtgttggctcagaatctcttgtttcttcttagaaacccatctacaaggctacaactaggtagccaaggacgtgaaatcgttgagaagatgtacatgaagcagcacatgtacaagagatttgtggatgttctagtcaaatgtatgagaccctaactgtgtacttccatcgtttacttttggttcagttctatggtaagatcgtgtttcagaaagaaaaaacaaatcccaccaattcttataaagtttcatgctattctttggactttcgaaatctttactcgcatcttttgttgttggaatctgtatcctgagaagcttaattacttggcgaattttattacacgtgaaggcatcaggcattaattgttcactaggttgattattgttatggggcagagtgagttaataatagtttagtctactagttaagattctgatccgccgtaagtttgattttgatttcatatttcaatccagggagatattcagtaatttagaattaaatcttta

SEQ ID NO: 19407 - DNA, 985 bp, Arabidopsis thaliana landsberg
  unsure (1)..(985): unsure at all n locations
atatttgcaatgggtaagtgaaattcttacaaaggatctactaatgggccgagaaacttgcggagtgtgttgccccacatttgtttttgcaaacaatatgaaaacaactgaacctaattagaatcttcaaaacaattcctttttttttttttgcactctccaaaacaattcctagattcagttcttaagcaataatgggtggacataaaattcgaaatccaaaaatcatccgaaaccgattcaaaaaatccaaatcgaaccgaataatcacaaaatccaaacagataatgaattctcctacacgaattacccaaaccgaattcgatccataccaaaaatcgaactgatatccgctaatccaaaataaaatatatatctaaaaatattagttatatttagttataatttttactcaaaaatatccaaaaccttgatatccgaattttttttagttatatttgtcataattatacaatgttttgcaaaactaaaccaaattttagtaagattaaacgatttttttattaaaattgaataattttttattttattttttctgaaaaactgatctgaaaccgatctgaatccgacaccatccgaatcgaaaccgatcctaatagtcatattatcttaacggataataaacttctcatccgaattatccgaatccaaaataatctgaaccaaatccgatccaaaatccgaatgcccaagcgtaagcaatatgatttttattttattatacttttgataattaattttcttcttgcattatgtgatgatgttagatacaaagaatcaataaaaatatgatcatttatgtgaatctaatatagtacttgatgtcatttttataaaattatacatatatatgtacatacataaaggattgtcactagggtttagtacatggttttggtggtctatntggtggtcttcttcttccaggtgcacgccttgaacagctaccatctacttcaatctt

SEQ ID NO: 19408 - DNA, 366 bp, Arabidopsis thaliana landsberg
tttgcaatgcttaattcgttgaacttctatttctgattgttttataagaggatcaaggtgtaacaaggatgatacacactattagatttcttttcctacttgcttattttcttttctaggaaaagaaaatatgttctcattaaaatgacaagcggtaaacagtaccgtaaagacatcaccggtctgcagttcaaggtatcttgtaattgatagagaatcacaaccaatatatatctccaaccttctttgtggtctcatctttgtacgttgtagtggtgctataggcacatacactacacacccaatatttttaaatgggatatatatatatatatatatatatatatatatatatatatatatata

SEQ ID NO: 19409 - DNA, 1254 bp, Arabidopsis thaliana landsberg
attgcaaggacttcaaaactaatatttgacaaggaaaattttaaaggacagtgcaaaacaataagacatcctgtcactagctataatcattaagctagatatttaaactaataacttttttgtgaaggttcggctttttttccaacaacacaaacgaaaataacaataagaaaaatcaacgtaccacataaatcttgagggcatccagaagctttatgtgaaaacacatctctgcttcttcgaccgaatcaatagggttagaacaaagctctgaaatccaaatatctgaaacaatcccaagatattctttttcagcatcttcctgatctgtcatatgagcatccatattatcctcagccaaaaagatatctttatcagaacctaccccaccaatgacaatatcaacagcctcttcttccaaaacatccttctccgatcgcttaatgcgtttttttcttcctactaatccactatccaactctgcttctctcttcaatgacagcttttgagttccactagaaccgtccagagaccttagtacaatcaataacacctgggaatctggaaaaaaactgctcacttcacccatgacgttccgctcaagagaaatctgaatttgctcaaccgagcatctatgagatgaacaaaggttccaagcagtaagaaacgaatccacagccctcagcgtctccaagagaaatctcaaggtcccatgtttcacaagaaaatcagaatgtagcatccctttagtgatcagtgaccggctaaatggtcgggggcatatgcatttcatgatagtctgaacatctgagccaccagaaggaggtgtagcacgttgatctggattgagaaagtcaaaagaacatgaagttcttactgacgataccaaatttgctgccaaggaaatagaagaaaacctgcaatgacttcagttactagaatgacaaaacagcagaaattggacggtagacgcagtaaaataaagatagatacactttcgtactctgaagaagactaaccaggatggtgatgaaaaatcttccacattgtatggaaactcgtccaagaaatctgaagctaacgacggtctacccctaacaatggctagaagcaaatccctgtgataaccaatttctgctgctctcaaccccttcatgagcattagtagtctgtcagaattgcctcaaaactttctctttgcatctggcatcaatccattagaggggtctgtgcaaacttaacaagaacatcatg

SEQ ID NO: 19410 - DNA, 1151 bp, Arabidopsis thaliana landsberg
agcatttaaatcaaatatctccttcacatcttatcgctgcggatagaatcttccactttaaggctttctttgttcgtccaaagccatatatgaaaaaaacacctcctttgtcgctaaggacagcatccataatttcatcatataccttcttttgctccggggttagcatctttaaccaattatcatgtttttttttcaatgattcaagattgtagttgcgctcatcgaggatcaactgattaaaggcaggtttatcgccaggttcaagctgcggcaacaacttatacctccaaagatctgttccatgtcgtttcaatattttttgcagctcttgtaaacataaccgaatcttatcttcgtcaggcaatatgtattttgcatatacattaatattaggttgaatgtaataaaatatgtaaaacaacattttaaaaattgtatattacattttaaaatataatttaactaacctgcacgttttaacttatcttttactttcctctgaaaatcttcagacagtatcttccaagtgtgttccaatgcaacggctggggaactcaagctttcggaaataagcaggataacaaactacttgcaaacatacttaggagaacaccaaaaattagcctcctcaataccgtggatatattccttatcatcatcaagcaaacctagagcatatcatgcatctctgtatgttttatgaacaacaccctcgacggttttgatatcatcaaaaccttttggaccttttatgttgttaataaagatgcgaaggtgatatgcatcatctatctttggaggtacatgatttattctaccaacagcaaaacctggcatttttcttctgcgaaaatccttatctttaccattccacgtatagaaattaggtatttgttcatataaaagttttaccgctcccggatcacgcttattaagctcgaaccatgcagtaaactgagtctcatcattgttcactctatacaaaacagattcagcagtctcaccttccttgacataaacaggttgcttgcctttttcatggaatgtaagtttagttacagatgtttgtcgataatgtataggataccctctaatcctccacatcggttcacatgcagatacgtatctgtaaaacgacatttaagtta

SEQ ID NO: 19411 - DNA, 526 bp, Arabidopsis thaliana landsberg
gaaaattgattgtgttatttgagtataactgaacttgtgaaaaattgtatgattgatatcgatctatatcattattgtgtctttggttttatagaacaggaataaaaattacttgtgtgctttgttatttatctgattaggattaacataaaatatgatttggttcactgattgaataatctttgaacttgtgaaattgtttgactgatttggatcatgataataattgtttctaaaatttctaataagtttggaccaataagtttggagcaaacaacttcagtttctaaacaacttcagtttctaaagtcgctaaacagctttagaccatattaataacttcagtttctaaagtactagcttgtaagaaggacaacttcagtttctaaactaaataagtttggaccatataaacaacttcaatttctaaagcacttaattgtaatactataaaatagcatgaggattgaagaattaaactcgttaccttgtagtatatctcgttttcgtaagacgagtgaggcct

SEQ ID NO: 19412 - DNA, 3139 bp, Arabidopsis thaliana landsberg
  unsure (1)..(3139): unsure at all n locations
cgaagccgtcacagcatccacatacaaaatcaacccaaacacagagctcgttctgggtattgctgagaaatggtgtcctgacaccaaaacctttgttttcccttggggtgaaacaaccataacacttgaagatgttatgttgcttttagggttctctgttttaggttcaccggtttttgtaactctggatagctcaggagagattattagggagaagctggagaaagaatggaagaaggttaagaaagataaaggcaatgcaacccaaagaacatggaaggagagattcatggacagtggtgatgagcttgagcatttagctttccttgtcttgtggcttagctacttcgtgtttccaacacgctattatcatatctatgaagctatttggccaattgctattcatctttcaaacggtaccaagatggctcttgctcctgctgttcttgcacacttgtatgcagacctaagtctcttgaaaaatcacattacagctttaagcgaatcgcctattaaggtcgaaattgatctgagttctttgtgtaagctggtcaatgtttggatttgggagagattcagggcactacaatcaaaacccaatctgttgttaaaaggtgagccaagattggctctttggaatgacctgaaacagagaaccagcaatgcaaagcggattctgaacaactcgaaaatcgatggttttgagtggtgtccatacacaaaaactgtgaaaaactgggactttcttcagttttatcctgagaaagcgacgtgggtgactcttgttcccaaccgtgatgatgaatttatctcctttgctcgatgcattatggtgtctcagcttgttggcattgacagtttggagcattactatcccaatcgggtggcttcacagtttgggaggcttcaggatgtgcattgtcctgttaaccggaacaacctctcacgtgaggcagcttggaatgattactacaagcctcttgatgatttggaattatacattccttcccgttctgcaatatcttgtgatacgccaatgttctgcgacagttggagaaagagggttgttgggtcagctaaaacattgagaaccagcataggtgatgacactagttttgttccatcaggctctaagatgaatagaagaagcgaggatggaaggaagatagctgaggattcaacaaaaaagagacttaagttcatgaagagtgctcgtaagaacgatgggagtacaatgggtcagaaacaggttatatcagacgatgctgatgacgatgatagcctcaccgttgctcaaataacgacactttataagaagaagtatagtgagaacagtggaggaaatgcttctgagccgcttggtaagaaaataagacttgaggcagataacaatggtttagagccttgccaaaagctttcttcgataagatatgatggggatgaaactgtaccaccaccagaaataaagaaaaggaatgaagaaacaggaagtaaatcagggatgcgtgtggttctgagcccatttgatgaaagcaactcttcaaaacctcctgttgattttggtcgagcaattgacattgttgtatcagcaccagagacaatgacattctgtgatgatgtatatggaaacaatgcagagaagaagactatgatcgatgatgacagcgaggaattaaagtgtttgctccatgaagatggtaccataactagagaaatggcgagatcagataaaaagtgttgcagtgaagctgagaaggaagatgctgatggaaggatcaatgagaaggtgctagcatcaaaggcatacagaaaaataccaagccctcatcaaaagtttgcttctggaatctggatgcactaatggagatgaaacaagaaaatcatataagcataaggttttgaagccatctgatgagtcaaacattcacatcgctgtaggggatcgaaatgaggtacaggattgtttgcttcatgatgaacagagatagccttgattccatcatataatataaatcatatttaaaccaagaaatttagatttctactcaaaacagataatattgacaaattcagatgtcaacattcagtagtggaggagatcatatgctccattttgtacacgtagagacaggtcatgagagcactgcaatgcacacagagaaatgtgttaaagagattaatggtaacattgggaactaaaatcgttgagaagaagaccaaaaagggaatttctgcttagctagttgtctcaaaaccatttaatctgaaacttctacaatgttttatgggagtgtctcacatatcttcaatctgttggtgtgatctcttttgcattacctagagaacttactagacacaaatgccaaagctttatggtaacaagaaattgtaaaatgctattgttaccaatcagtttttgcaatttggaatatttgttatacttttgcgattacttttggatgcatacgaagcttntgcgttttacctcagtgacactgttaaattcaaaaattccaaacagtacagttaagtcttttgtcaataacgaaaaatatctctgatgaatggtctgataaaagcctttgtgtcaattcgatccaacatctacccctttgtgcttgaagaagtccttagcctctgcaatatcctgcaaccaaagaaacagataaaagacactaaattagcaaaaatattgaaggatgtcaacattagataacacgaatccgtatagagcaggatgaaaaataagnnnnnnnnnnnnnnnnnnnnnnnnnnnnnnagtctcaaaagtaccttctgcagcagaactgcttcttgggggcaagtaggaaactgcatgagcccgactccaaccattaataggccatagcatccgagggatacaacaaagtagatcggtagctgtaagacagaccggcaataataccaaatcagaacagaatcctaatttcaaaaaagcaagaaaccaaaaaagaggacaaaattgtttgttactcaccaaccatgtatggcttcgaggaataattgcagcctgcaaaagaccaatccacaaggcagagatagccaccaacaggctcaagatatttactatatgattcatttgtcctttaaagtaaaaaattatggaaaagagtttaaa

SEQ ID NO: 19413 - DNA, 1024 bp, Arabidopsis thaliana landsberg
gccgtaactcatatgtttattaccacatttataaaacgaaggttttaaaggacataaaatttaactgcagtatttttgggacgaatttaataatgcatgtattaaacagacaaataaaaaataaccaagatatttttcgggtttttttcccaaaataaatatgtacagagatagacatgtgacttcctcctaagtgagctagtttaaagtcttgagctagactccttactattttaggcactgaggggctgagggaggtgaactttagttccttcaggaatggggcaatctgccgtgtagcgcttgaccctctgctcatttacagtaaagtcagaccttcccttcccagtgagagtaattgtcccatatgccaataattgtttgatggtgaaaggtccagaccacctggatttgagctttcctggaaacaacttgagcctggagttgaatagtagaacttggtctccaatgttaaaatcttttggtgagatctttttgtcatgaaaggcttttgttctttctttgtagatcttcgaactctcatatgcttccagcataatctcttccagtttgtgcaggtcgactgctctttttcttgagctcctttgatttacaagttcaagagtttggttgcccaaatggctttatatttcatttctactggtaaatgacaagatttcccatatagcatctggaatggggttcttccaataggcgttttatatgcaactctataggcccacaaagtctcatcaagtttagttgaccaatcccttcttgagacaccatcaacttttgtgagtatagctttgatatgcatgtttgacacttccacttagccactagtctgaggatgatagggagtggcaaccttatgcttaaccccatgttttctcaataaactttcaaagaccttgtttatgaaatgcgagcctttatcacttattactaccttggggataccatatctgggaaagataatggacttaaacattttcagaaccactttgtgatcattggtcgg

SEQ ID NO: 19414 - DNA, 981 bp, Arabidopsis thaliana landsberg
attccacatgatactgcttaagcactacgtcgagctaaaatgaatactcgatttatattaactaccccattagttactcgaagatgaaacgaaacaatttggttttggtcttttggatcatatagttaaacgttatgtatcttactcaatttattttaatgatgtttgttgtttggtatatcaattagggtgatttagctgaataaccatatttgataaacaaattaagaatatagcaccatatatatagaaattaagaaaatagcatgcaaggataaggaaaagacaattttagtgttgaattggaagtgagatgatttagtaacacttagtttagttttcacctatttgtttttttttgctatatatcttttccaaaaaatagatttcaattataaaatttattagaaaaaacataggtttttttctacatacaaaatagtttgaatttttaaaatcgaatttgaatttataaaatagtaaatagtgtttgtaagtaaagacttgtactattttggatagaaataaaatgttgtactatactattttggatgtatagaaaactataccctaagatacaactttggcaacccaagcaatcagataacataagtggtatctgaaaaatctactttgtccttttcgtttgtatgttatgtgatacagaaacaaagaaaaaaaaaaagagattgagagaaaaaagaaaaagagatgagagagaggagagaaggagggacttagaatgaggtggagagaaaggggtaaatatgtcattatcttattatataaagtacggttttaaaagttactaactcaccagattgtgacacacggcagttttatcaatctaagattttgacatgtgttagattttttttcttttacttttttccttaaataaaataaaggaaactaaaaaagaaacatatttacaaatattaatttatattatatatatagttaatccttccttttcttaac

SEQ ID NO: 19415 - DNA, 668 bp, Arabidopsis thaliana landsberg
ctctgtaacaaggaaaaaaggatcttcatagattagcaaatttacataaaattttctttaagaaaacaaaataacaaagtttataaactgtttccatataaatagttgatatcttaatcagtttagttaaataacataacagcaaatattctgtcaatcttttctggctggagaacaaagaaaataacacataactaggttaacatattatagaaaagtcatttctcataaggtttcgagtgtttagctatcacgttttcactggtatctgttctttgttctccatgtcaaaaagaaaaaaaaatcttgaaactcaatcttcagatttgtctaatgttattcaaaacccaactgataagcggtttagacatgaagaaacttctgaaaatacacccccgtcattcaatcgaccaagtgtgaagaaatcactgccagttagttctgtttttaagagggttctaagtgatattacaaatcaaagagttcatacaccaagcattagccaaacgcctggcacttaggagtcatgtttaacatcaaaaacaagttaagtttaatgattaatctataatatatatttaagctttgtaggttgtcctatataacataactacatttaacaagatttatttataaatattaacaatgccagcaagaatcgatttttg

SEQ ID NO: 19416 - DNA, 734 bp, Arabidopsis thaliana landsberg
tgttcttggtgagatatacttttcagctcacagtgcactcgatatggaaggaacggaatggtcgtcgacatggagaagcacccattccctcctcccaattaacccgccgtctcgataagcaaacccgaaacagaatctcctctattcgcgagttaggagatagaagatatgaaaactatggcgatttagtttggctcaagataacatagatatctctcatttttctaaatttgttaatgccctcaaattttgcttaaatacaagccgcacttaatgtaaaacagtttttttcgaataattttacataatattcaaaaaaaaaaaatggtttgtcaggaaaaaagtatttttttaattcgtatgaaacccaaatttcaggtcgaataaactaaaaaatcttagagaaattcatccaattgtttaccaaaacttaataggaataaatctaataaggaccaaattcgaaggtaacttgacgaagaagaaacggaaaagaagacgcacgggtcggcaaccgcccacgtttacttcgaaacaattcacacatttatcgatgcacctctgcttccacacacacatgctcttcctcacctctccattcacacatacacacccgtattatagagttacatgaactcaattatacaccaagtgcccacttgctagatctcacaatctttacacccaaaaatcatataagagtacatgaaaatgtgccgtacattgacacaaca

SEQ ID NO: 19417 - DNA, 615 bp, Arabidopsis thaliana landsberg
ggctctcagtttcctgtatgagatctggctgcaaccagttactagacgcattctgaagagggatgccattaatcatatgtgattggttatcacttacgcaacttccattgactgcatttctattcaaagaattgagctgccttgcctctagccgttgcttttgaagttgttgttgcatttgatattcatgcatttgcttaaccataacttgctgcttcagtagttgcatatcattgaatgacacctgctgccttggcaaaggctggagcatgccagggagctgtgtgtttgattgttgttgaccaccaaagaaatcataattaactggagattctcccatttcaaacctcgtaggaattttatgaagatctggagtgaatcctctctctgacaacttatccctactcgactctacatgcattcccaaaacatttgcctcattcggcatcgtctgcaacccaagattcccatgcatgtaaccatttgtgggttgctggggttcttgtaatacacttctggagtactccgacctcataagctgctgagtaaaaattaaaccatgctgtgaatttgaagattgccctctttaggatcaaactgaatagcaaaaaaatt

SEQ ID NO: 19418 - DNA, 1005 bp, Arabidopsis thaliana landsberg
tcataacaattttggttgctgtagcttcgttgctcgctctggcgcaagtacccagtgccaacgtttcggaagagatggtccggggcctggatggaagagtggttttatgtgaaaaatgatttgaaggtgagagaagatattaaagagatcatcatgcgccccatctggtcccgcttcggccttcgaaagctgaaggtagaaattgacgaggcaaccgaagcctgcagaagggccttcggcacagtttgctcttttattgggacaagagacttacttcaagaacatatagcttacaggatatggccacttatagacagctgggaaatgccgaaagaaaccattgttaaccctagcgaaggtggcctggttcgattgaagtacaccttcaagttaggggataaatttgtcgaaccaaatgatgactgggtgaagtgcattgaaaatactagcgatgaattacttggaacatattccaagaccgaggacaatgcactatatgcggccttcgggagccgaaaaaagaaaagatgaaatagggtttttgatgctattagatttgtgtaccctgactatcgctacctgccacgggggcagaaaagaaatggtgcaacctctagaaaggttgctgcttcgactgctccaagcgagcctgcgccgaagagtaaaaaattgaaagtcctcaccgaccggccccgctatattgaaccgaccatagagcttgagtttagcggggaaacttcttcaactactgaagcgaaaggacctgctcctcctgcgcagaagattgaagagacgggtgcaatgccgaacagccctcagccaagctagctgatccgaagactgataaaactgaggagccaagaatcgaagggacaaaaactttagaagttttaagcccttcggcagaagtgacggtgccgaacggagagaaggtcttgcaacgactcccaaaagaaaaaggatggcaagtgtactagatgtgctagagtcagtaaaggcttcaag

SEQ ID NO: 19419 - DNA, 976 bp, Arabidopsis thaliana landsberg
tgcaccgttgtattacaatatcttactgagaatgatttcctaaaacttgactagggccagggttaaacttgtggttttttgaaaatggaaaaccttttttcatggcagcaatgcaaaatcgccaagttgcttctatccaattccacaagctgcagagtgcatcgctcggatagtggaaagatccaatggcgcagtcatctatctttcaacagatgctgcagaaagtgagacaagtctgcttcagtcacttgttgtggtagatggaaaaattgtgcctcttgtcaaacgtccaccgcgtaattcagctgaaaagtgggatgcattgttatatcgacatggtatagaggatgactctcaggtaagaatcttgagcctttataaatctcatgaaaacctgtttgattttcctgggtttgcatttggttgctcttcaacagaaaaaaaaaaagcttccggatttatgaattttgtagcagaatagaaatcctaaatactaattgcattttcaattattattaatggcatggcctgatgtatcaaacatggcatgggctaaattctgtattattgaatgtgtaggtggatgcaatgcttgataaaacgatatgcgccatgtccagcgtattcattggagcctcgggatcaactttcacagaagatatattgaggctaaggaaagattggggaacatcctctacgtgcgatgagtacctctgccgaggggaagagccaaactttatagcagaagatgaataagtaagcacatttttttcttacaaactttgaattgttctcaaattctattgttcctctagttaaattgtatagtgtaattatagaatccagttttggatactttccaattcatttttttgtgacaagagtgtgtgtatcaatagaaagagcctcagtttcttacaacaacacatatctaattcctgggacattggtgatttttggagattgtttcttgttt

SEQ ID NO: 19420 - DNA, 199 bp, Arabidopsis thaliana landsberg
ccccgaccttcactattccatttgtgatattgttcctccatgaaaccttcacggtgttcaaatccacaaatggtagagtttttacgaccagataagcttcttcgtcctcatagacggtttttgcagcagttacaggtccgcagctattcttcatcactcccgtgaagtcgattacccaactgggcgggtccttggcgtg

SEQ ID NO: 19421 - DNA, 1169 bp, Arabidopsis thaliana landsberg
  unsure (1)..(1169): unsure at all n locations
tcctcgcactagtccctacttggtctaacaatcatgcactgaaaaaacttgcttatacatatatgtttatatacagtgtacattcattgaaactataatctttaaaatcttcatattactaaaagttttccttctctttttctgcaggaaaatgctcttgatcattatggtgtgctgaagtagttgaattaaacttgttagtgtgggaacttgtgaaaacttctactccttcctttgttttccacgtgtgtaacacatgaaatcattttggaaacttctactccttctacttgcttgtttcatctcttcttgccaatcgttctctacaccggctctttttgcattgcctacaccttcactctagttttcgtctgtcttgattcaaaccataaacgaaaaatggcaaatcaacccagaaaattaaaaaaaattggtgggattatcaacaacagtcatacaaaactacaggaaaaagcggatcacggtttaggtttatggtttgaaagttatagccaatttaccaagacagagccggaaggtaacaaacctgcaagcagccaactttggagcaatttcccatcaaacagcaaggaactaaatgattaataatctatgtgttctatcttttgatgtttttttttctttgttcttttatgtcttgtgatggatgttttgtttttgttttttctttgcatccggaaacgaaatagaagatgaatccttaatggttttggattacacgttttataactgataattttggtagtgtatatacagtaaaacctctatagaattaatatttttgagatcatgaaatttaattaatttataaaatataaatttaaagagaatcataaaatttgttatcgaaagaaatttcataaagacatttaaaaatatataaatctagacaatctacagtaaaacctgtataaattaatactcgataatttaacaaatacaataggttaacatgttatattgctgcttatatatatatatatatatttttgactgcattgctgtgtatatttaattgctgtgattactagaaaacattatgtgctattttatactattcaaagcatngtatcgttcgggattgatttataagcattgtattcaaaccttataaaaatgctggaacaaacacnttttttcgaataaat

SEQ ID NO: 19422 - DNA, 451 bp, Arabidopsis thaliana landsberg
  unsure (1)..(451): unsure at all n locations
accaagaagaggagaagagaagcttacatgagagagaggattctgtttatcgctgcatcgacaaccggaagagacgtgggggaggctcacagagaagatgcggagaatacatggagactgcttgagggaaagannnnnnnnnnnnnnnnnnnnnnnnnnnnnnnnnnnnnnnnnnnnnnnnnnnnnnnnnnnnnnaaaagagaacaaggagtcgttgacttgaagtgataaagattaaagagtcaagagttgcctttgtgtgataagaagaaaatcaccaagaggaagacaagagaccgagacttgactccacatcacctgtaaaagaagaaagtagaggatgcgttcgattaaagaaaatctaagcagagggagatgaagaacttcacgcacaaatacgtcgagaagaagaaactcgatgcaaggatattcaaagcatgagggagatgaa

SEQ ID NO: 19423 - DNA, 793 bp, Arabidopsis thaliana landsberg
  unsure (1)..(793): unsure at all n locations
tcctcgcttcataacanaatctgagaaatagatttaaaaacagacaacactaggttacaaaaactgttactcgatgaataaaaaaagaggactttttcaaatcttcacacacaaatttcacaaagaacccggattcaatttttgaaaattgggctctttggtaaaatgtaaaacgtttgggccgaaaaaagaagaaaaaaacaaaactgtaaagaggcaaagannnnnnnnnnnnnnnnnnnnnnnnnnnggatcctgaatctcgaattattcaccgttgattataacattatctaacggtgataaacagcgatccgcgtagtttcttcttattggttaagacgaatctaaaacagtatataaactctggagaagatggagagagtccataacaacaaattcgattcttataactgtttccctctcatctttacacaaaagtattctaatcgatttcaatggcgggtcgtggtaaaacactcggatctgggtctgcgaagaaggcaacaacaagaagcagcaaagccggtctccaattccctgtgggtcgtatcgctcgtttcttgaagaaaggcaaatacgccgaacgtgttggtgccggagctccggtttacttagccgccgttctcgaatacctcgccgctgaggtaattcctcttccctattcttcaaattttcgatcttttagttcaatttctataaaccctaattttgactgattttggggaaattttgaaaaattaggtattggaattggctggaaacgcagcgagggataacaagaagacgagga

SEQ ID NO: 19424 - DNA, 625 bp, Arabidopsis thaliana landsberg
aaaatctagaatctaactgttaaagaaaatttgcatatgattttcatagatttaaataaaacacaaggtttctattgtatatcaacgtttaaatatatttcttttgatcaatttggtaaaaacaatatataaaaatttaattttagattataattcataaaacctaaaactttttagtttaatatatcataattacaatatttctacaaattattattaaatttatttttaaaaaaaactaaatgtattagttatataatattatatattttattacgtttatattttacctgtgcatcgtgtgggactttttctagtaatacataaagttaataaaatatcattattttttctacacataatgtcattcaaattaatatatatatatatatatatatattattctactaatgaaaaagtgtgtttcacatcctatattacctaaggcttttgaacttataattcaatgtctttttctattaaaaaaatgatttttattaatatataaataaatatgtccattcccaattgggtttatgcctggaaaatacaatcttttacagttataaaaacggaaagaaattctggtaaacggaaaaagagaaacagagttgggtttggacat

SEQ ID NO: 19425 - DNA, 758 bp, Arabidopsis thaliana landsberg
tgatgggaccatctacttcaacatatgtgacatcagcggcccagatggagaacactcagacgaacatgtctggaccggtgcaagaccggcccatcatgtactaagagttgcctccagaacaccaagcgaagtatgattaaatcaaagctctttttgaagctgtaacaccctgaatttgggggtataaaatttcttttctaatatccaccaaattcaggtgttactctctcagttcttcgctttcctttctctttttcctaaaaatggagaattattttgttttataatagcgtaaacctagtggaatgagccctagaggcactttggttgttgcattcatgccgttgcatggtgtttctaagtgcaaaatgtgtttgaaacatgttaacatatcttatagaagcgctcggtaaattttcatatttttcggaatatttttctattttccagaaaccaaaatctatttatttgaggaacttaaaaatgtttttaaaaattctaattatgtcttttgagttcattaggtgccaaaacatttataggaatttttctggaatttctaaaagcatatataatatttttagcacaaaatatggatttctaggattttctgaattttaaaaatggtaaatttcgaattttaaccgaacttttatctcgtccaaaccctagatatatatacatgtcccgcttcatcacgtcgagcccgttccagaacacgaaacgttttctccaaatccaatccctagctcccggta

SEQ ID NO: 19426 - DNA, 639 bp, Arabidopsis thaliana landsberg
actgactaatcatgtccgtaacagcacctcgattgttcatactttcaccatctcttttgctgtcaaacgacaaaatgaaacaacaaggaaaatatgagtttggtttcagttggagcttttacaaaaccctaaaacatacaaagaaactaaccattgtttcattggagaaatatgtgtgttgctgttagatccttatcaaacgcagacggtgaaggttgaattcagatgcggtagaatacatttgacggcggagcattagggttttagaggatgactgtggcgagagattgatttttttttttttttaatctaatgtcgcatccaaataatacagtctacatatacattttagaaaatgaagttgcgtcgttgtggtaattaaaacgttttaacttttaagtcttgggggtgtattcaatcaaacattttacataagtgatttgtgttaaaataacaaatcttatgttattcaatcatggttttttaaaagtctcatgaaatctaatgttactaggattagacccgcggtatcccgcgggagagggtgtatatagttttttattaagtaaaaaaagtgtatgttatatcataaaatattaacatatatatatatatatattttaagacttgtataacgaa

SEQ ID NO: 19427 - DNA, 1429 bp, Arabidopsis thaliana landsberg
agtccttataaagtaaatttacttattattaagaaaataagattttgtactttttttcctcttaaaccaatggacaaatatgaatacaaatccatatgtcactattatctatatttacacaatttattcgattttttgtatgttgtcttatctcatcggaaattttcaaactagttaaccatcggaaaaaatcaagacgcacggatatataaattacatattcataaatcagacatttgacaatccgatagaaattgtctcataaagagaaaaagaacacagacaataggaaatgaaatgagcagagataattcataagaatgttttagaaaagaaattaagcttcggtgaagcttgggggcttgtaggcaatgaaactgatgcattggacttgacgggtgttgtcgaatccgatgatcctaatgaaggcgcccgggtactccttcttgcattcttcaacttccttcaacacttgagcggagtcggtgcatccgaacaatggaagcttccacattgtccagtaccgtccatcgtagtatccgggagtgtttccgtgctcacggtacacaaatccgtgctataaacacataagaaaaccattcaatacaattgatattggaggatatgcacgaggtgatatagtctatttcggttctacaaaatccggttataggctaatatttctagcaatgaaaacgaataaataataatgattagtagacaaaagaaaacttttgtgtttattacctctaactcgaattcaacacaaggaatccacttgttgcggagaaggtagtcaacttccttagccaattcgacgtcactaaggtcagggaggtaagatagagtctcaaacttcttctttccaattggtggccacacctataatccccaaatccaattccaaattaatatatcctatgttttgttttattgcacatgacaaaagacagtttttattgatgatattaccttcatgcagctaactcttcccccgttgcttgcgatggaagtgatgtccttgttggtcttgcgggtgaccgggaatgcagcggatgacttcaagccggtgaatggagcgaccatggtggcctgagccggggatgtaaccacagcggcggaggagagcatagaggaagccattactacttcttgttgtttctcttcttcttttgctcgtttacttactgatttgttttcctactggtgttgtcatctttatataatgagaaccccctaaaggcgaaaagccctcatgatcaaagggtccatgattcatgataacgtcgtttactgccacaggattaaggaaaggtgttgacacccttatcggtacgcaccactaggataaggccacgtggcagaaaactccattatcttatcttttctcttgtgggggaaatgaagtgaatgtgcggttactggtctc

SEQ ID NO: 19428 - DNA, 564 bp, Arabidopsis thaliana landsberg
ggattatgttcgtagcagaggttttccgaatcagagatttgatcaccaacaaggctattgaggttcctatgggaatggtccaactagctacactcagaattctcagttccaacaaccgcttcagaatagcaatagtttcagcttcacaaagaactatgatcttgcttcttaccaacccccaccctccacccgcacctagaagcaagatataatcattgctggaacagattctggatggtcaacagtggatcttagagagacctacccctagatggaatgagagcagcctcagcacttcttgggatgctgtttcaatggaaagtgagtatgagttagaaaagattgaggggagtgacgattttgaagttgcagaggcagtgtcgaacgataccaacccttggtgtcgatcgacaccatcacatatatacgagacatcgggttgtgacaaagcaaaatggaacaggctcgacattgatctccagaatcgctcaacacacattgatagtgtcgatcgacaccaccagtaccaagctgaggaagtgtgacgtttcacggagcagaatc

SEQ ID NO: 19429 - DNA, 1745 bp, Arabidopsis thaliana landsberg
ttaacagtcgctgaggatgagtgtttccagagatatcaagtttatatctttttaggtttttaagacttgtgcagcctctgagggtcaagaaaacaagacacttcatattttccatatcatggggtaatatggccaatgctatgcagccttcaaggttcaattcttgaagatttcgagcctcagctaatcctaacaaggtacacaactttcttgagtggttgaagtctatccatttaagtttcgatgcatcctgtcatgaatgaaaaagagagtcagcaacccattaacacgaccatatcatctaagagaagtgaaaaagaatcaactgattacacaccttattaccctcccaaactcgttcaatctcgctgtattgaagcttaaggtcaacaagattttttgggttgaaatctggtggaagttctttcagggggaatttcagccagtgaagacatcgcacctcatccaatgggagttttagtttttttgggaagctcagcgtaatggcggcctcacattcttgagggcagaaagtggtgctgatttttaggtaccgcatattgctcataaaaacaaacgcttgattgtggaaactccttttcatgtttacatcagccaaatcaagaaagatagatcttacgctagaagctccctgttaatcagtaacgaaaaggacatgagctaatcacaacagtaaaagtgacgaaagaattaccttatcgagaacaagaagttaatattttaccttattgttctctaaaacatcaattatggtatgatggtcccataatcttcgtcgccctttcccatcaggagcagttgcttctcgaccaagttccttagaaaacatatgcagtgtatcatgcatctctattttgccggaagatatagtaatcaggaacttgttcacgagttcttctatttcagtctcagcgttagtggaatttgcacattccagtaaacttgctacataatttttgtccatcgacctgaagcatgttaaatcaagaagcgtatcttgttgttgctgattaagtccatcatagctccctttccaaacactttgaaggatctcgctggagctttgtgctcgcatcttcttagagcttcgtgcatgatctttatggtgctgactcaaagcatccagctttgaacaccagtgagactcgtctttccctagaagctcagcacccaataccttgagagctaatggatttcctttggtgtagtgcacgaaatctttcgacagctgcaagaaactcgaagcattgctttgatcaccaaaggcataatgggtaaagtgttgcaagctgtcttgataactcaaatgagggacttcataaatgtaatcggccgtatcatgtaccaacgacttatcgcttgttgcaatgacaatcttgcttcctggtttaatccaatcacgttggccgagaatagcgacaatttgttccttgttactgacattgtcaagtataacaagtgatttggtttccagtagttgatccttgtaaccttcatgagcagcctggacggtctcaaacttgggattcttgacatttagtagatctttcaagagtattgtaaccaagtaactcaagccgtattcctttgaaatttcatggatatcttgtattaacacatgactcaagaacccgttcttagatttctcgtataactttcttaactagagtgcttttaccaattcccaggcatgcccaacaacaccaaactgtacgaagtttttt

SEQ ID NO: 19430 - DNA, 666 bp, Arabidopsis thaliana landsberg
  unsure (1)..(666): unsure at all n locations
gcaatctttcttaacatttggccaaatgtagttgtatgcatatgatatgtgcccccgtgcccccttaatggtttaggcaattgaggctagagttaggtacgtatactagttgtatcgcaatcgatggtgtgaccttaaagcaataactaagttggttagtcacattttttgcttgtacagctatatatgttcttctcatagattcattatgtgatgatagtggttctattttatattgagctatcgacgagaactccaagaagtattgcatgagggaggtctatatggaccaaggtaccaaggattttggaaattaagcatcagggcaaaaagtaatgttgcttactcatgttttaccacttgatttactggtcaggtaaactgaaatttcaccctgcaacaatttgccttttcttggggttatggtttttgagagtatgaaatgaaaaatttaatntcccgtttatttaattagaaatttgttataattttaaatttatttgaaaatctttctaaaatttatgttcatacccaaaaagactttctgaaatgcgataagaaatatactcatatatattcatgtctttattttatagtagaatgcattcttagtactggatatatatatatatatatatatatatatatatatatatatatatatat

SEQ ID NO: 19431 - DNA, 1357 bp, Arabidopsis thaliana landsberg
ccagatttaactatacttgtcaactcagcaagttgaagagaacttttgaccacaagaagagagttatagaagggttagctcagactgaagatcctacagaagatgactggtatgagatgagaaaaaaaaaaatggcgaagcagagtcatagaggggttatcttcaagggtgatgaagctgaaagatcaactatggatttttgaaaaaattgtttataagtattcaatgggtattgatccagagaagatggaaactacactagctatcaaagaggacaatgatttcgcaacagaatgatttgcaccagaagatcagaaaggagttcatttagaggaaagaagtgtagagagtaagttgttaagtgaggaggaaatccctattccgacttattctccagaagtgcctaaacagcccaccaacccctatgctgaagaagaacacttgattttttattctgttgctgaacaactcttggagctctggactggatatcaaattcataagatggaagagttgaacaacaccattctggaagttcaagaaatggttaaaggctaccccagttttgaaattgaggattggtcaaaggaacctggttcagaaaaagaagactactttcttgatcagaaagaagcttattttgaagaaaaatcaaatgagtactcatcctaccatatgtcaagagaggatgcaaagtatacttcaggaactgaaaattcaaccactaaagatgagggcttctcagctcctctcttcaaccttttttctgactaagctttgtaagagtcaaggttagtgacttaaaacaagctcacttgggaggaagtcccatgtctatccttgggaatacttttcattttcttgttatttttgatttgttttggttgtgtctatggttctcaggaagaaaggagtaacgtgaaggtggagtaaaaattcaaaacttttactctactgatggcctagagatcgagtatagtggtcgagtatgagtgatgtttaaaaacctaaaaaattttaatcatcattttactcgaccaacaggagctacattgcgggattcctggagttttcctagtgaacagagaatacagagaagagacaagaagacatagtgggacccaccgctgacgcccatgtcctccatgcaacagaccaaaggacaagaaatctctcctcatctcttcttccccactcgacgtcaacaccatcactcgacccccatccctcttaactcgccctcatcacctcgttttctcctccactacctcataaactcgacccatcactttcattcatcaccaccaacaaaccaaacccccttcacttgacctctctgcctaactttccttaaaac

SEQ ID NO: 19432 - DNA, 714 bp, Arabidopsis thaliana landsberg
caggggcgaggtcctcagggcggacgctgctgcaacaaggccctcgcccacgtccccactcgaggggcgaggacaagccatcaaagccaaagagtcggaagcccggagcgcggatggtggcggtgatcccgtcgacgacgaggacttcttcagtcgccaccacctcagcgccgacgacggaagccatctgcccaccggcagatccccactcggatcctcccggacgggcgagcaccgacctccgcgcgggggcgccgtaccggagcaaaggtaggacagcccaagaacacgaacgccacccaagcagcgcgcgacgtattgggcggtcccccggtacgcacggcgcgacagccgtgccacgcttagcggtggaaggcggcaccgggagccgagccagagccagctgagccagcgagcccaacgcgctgaagctgacgacgctcgccgacgaccagccccgcattgtcgaagtccgaccctctcgctaggccggtgagcgccctctcccttgaatgctgagggagaaggtgacccacgaacccgcgcgggaggtagagctccggctcagctccgcctccgccccagccaggatgatgaagatccttgaagctgagggcggggcagaggacgcatcccggctcgcttctccccaccatcaaactgtggtcaccgtcttgggtgaccaccggcgaggggatgagccgggctgcttga

SEQ ID NO: 19433 - DNA, 299 bp, Arabidopsis thaliana landsberg
tataaacatgaatgctcatgtgatgctatgactatgcagttatgatagaacatagtaagttatatcttgagtataactttccttcatggtactcctgggtaactagggttttccgaatcagtactctattaggataaggcaattattacctgagaaagctagggttttgggtttgggaatcaaacaatgtccaaaacataccaaactttacccaagggctctaattatcaaattgagtttacccaaaaagttttatgatttttggagctagtaattaaattctaaaattctaaaagact

SEQ ID NO: 19434 - DNA, 1181 bp, Arabidopsis thaliana landsberg
  unsure (1)..(1181): unsure at all n locations
caagtgaaaaacgttgtgtacaagaacatatctggtacgagcgctacggatgttgcgataacgttgaattgcagcgagaagtatccatgtcaagggattgtgcttgagaacgtgaaaataaaaggaggaacagcttcttgcaaaaatgccaatgttaaaaatcaaggcaccgtttctcctaaatgctcttaactgagctaattatgtaatgcacatacacatatttacatagatatgcatatttatatatagcatgtatattgtagtacatgcattgcttcttaatacatgtagtaaagatatatgcaaaaatagtcgaaagatttgtttacatataaaatcaccaatatttattgttattgtattttcatgaataaagtaataagattatttgtctaatattttgatttactagtactagaaatgaaaaggaatatgcacaatttcagcattatagtttggtaggcaaaatggagtgagaatagagtttcatagtatatactaaggttcttaattgtgcaaatagttgatacaagtcacatgggccaagtttgtaaatcttaaatcgaaatatgccttcttctttttttgcatgaaaatgctagtaatttataagtgtgtttttcaataagagatgctaaataccaaaattaacctagttttcagtgagcgcttgcattattgtggcctactttactctttagtccattcaataatcaatgtacttacataaaaatgttaaatcccataatcaaccaaaaggaccaaggcattcaagcgaacccttagagcatcctcaatggtagtttttaagcttaagtctcttaaacaaaattgaagtgtaagtatagataaataatatttttaattatgggtttcttaaatttggtgaaccaagaccaattatctcttaactaagagacaatttgcctaggtttcatcaaagttaagagacttatgaatatttaaattatataaattttttattctttgttaagaaacttgtttaaaatcgccattaaggatgctcttatgttttggcctactttaccaaaagtccattgtattaaatgatttactttttacgtgaatgttntcttattttgttgctataaggataagtaacctggtgtttttttggtatgccgtgcctttatccacggattattaagtaaagtgca

SEQ ID NO: 19435 - DNA, 1086 bp, Arabidopsis thaliana landsberg
  unsure (1)..(1086): unsure at all n locations
cggttttccgtatattcgctataaggacctctgtgcagtggatgaataagtaaggagagagaggatcgcctcgtcttataccccgatctagtattatgagtcctttaggttgtccattaataaggaccctatattggactgaagtaatacaacacattatccatgatatccatttttcacaaaatcccatcttccttaataactctttaacaaaattccattcaaccctatcatacgctttgctcatatctattttgattgccatgtattttcctttacatgacgggttagatcttaacccatgaaacatttcttgtgcaataagaatgttatcagaaataagacgtccttcaacaaacgtagattgtgtttccgaaataagaattggtaacaccgtcttaagtctttgacaaagaatttttgaaataattttatacccaacattacaaagactaataggtcgtagctccgtcatccgtgtcggtcgttccgtttttggaatcaaacatatattactagtatttgaccgtttatcgaaaactccagtttgaaaaaaatagtttacaagaaataacaaatccgtttttatggtatcccatgctttttgaaaaaataaagctgtcataccatctggacctggtgacttctccgggtgcattaaaaataatgccgcacgcacctcattctcagaagctggccctgtaagaaaatcatttgtttgatctgttattaaaatgtttgaacctctgacaaggaatcctcaaaatcatgaggattagtcgaagtgaacaaattctcaaaataagataccgctatatgctgaatctctttatcctctacagaccactttccattctcatcatgtaacccggttatccgattcctagcatgtctctgtttcgtcagagcatggaaatatttcgagttgttgtcccctaaagtcatccaaagactcgtaccaatattgttcctcatctcgataagcctctttcaaccgcaatgttagatctgtaatctcttcccgtgtttttgaatcatccctctgagccgcacttaattcaggtntaatatcttctatcgtattac

SEQ ID NO: 19436 - DNA, 590 bp, Arabidopsis thaliana landsberg
tagaagattttaattagatatatgaaaactaataagggtattatcattatttgtactcggaagactcgaaaattaagtcgatcgttattcgactgtttatcttacgctgttcctatggcaaataccataatacccctatattatattttcgaaaatttcattaccgctagactagtattgtgtcagacggcaacataatctttttggtaaatttgttttggagaaacgtgatcctaataatgaactgagttgaactttactagaaacccgaagcgtcgtcacctttcatctctacttatctgttcttatcttcgtttattgaagtaccctagaaagagtgaaagagtaaaccgtctttcatagcaggaatttcgttgttcaataccgtgctcagtctttcattgtttaggcagtatactcctttatatctgatctaactcatttaccgctgggattcgcttgtatggtatggatttgatttcaatttgctctgatttagggttttcgttggctctgccgttggtgataaaaccctttttttttgcagatgggtgaagttgatttaccgaatcgtttggatgcctttggag

SEQ ID NO: 19437 - DNA, 1389 bp, Arabidopsis thaliana landsberg
  unsure (1)..(1389): unsure at all n locations
atcgagtttgtgggacagcgacgattctcgactatagtttaaattctaaatattatagttattcaatatttgttcaaatatattgttttttcaaaagctgtcttttacaagttgatacgactttctcgattctacgccacattgtgacgagtattacaagttggcttggttttaatatataaacatcgaccaaatatgtatatattatgatagtattcaaattgttaattaatttgttttcttaaatattgatcatgcaagaacaatggtgggacacagatgttagacttctcgaactacggccagctccggtttctgatgcttacctcatcaatggcctcgccggagattcatatccttgctctaagaatagtaaaacgcactcttcacttaaattatttttgtaaatgatcgacttccatattaattgacacaacacaattgtttacaaaaaaaaacataatttctttcgttttttttccgcttcgataggaatgtttaacctcaaagttgtcaaggaaaaacatacttgctaaggattataaacgcagcactcaacactcacctcttcttcaaaatagccaatcacaacgttacagttgttgctgtagatgctgtctacacgacgccggtacctcaccgatgtgatgatcttaacaccgggacaaacaattgacgcaattctcaccgctgaccagcccattggaacgtactacatggccatcatcccttactttagtgccatcggggtaccggcatcccccgacaccaaacccaccagaggcttaatcgtctacgagggtgctacgtcatcatcatcgccaacaaagccgtggatgcctccggcgaatgacatacccaccgctcataggttctcctcgaacatcactagcctcgtgggtggacctcactggacgccggtgcctcgtcacgtggacgagaagatgttcataacgatggggcttggcttagacccatgtccttcgaacgccaagtgtgttggaccgctagatcaaaggttagctggatctctaaacaaccgcacttttatgattccggaaagaatctctatgcaagaggcttatttttacaacattactggagtctacactgacgattttcccgaccaaccaccgcttaaatttgatttcacaaaatnnnnnnnnnnnnnnnnnnnnnnnnnnnnnnnnnnnnnnnnnnnnnnaagaaagactagcgttaagacaattagatttaattctacagtcgagatcgttttgcagaacacgggaatactaaccccggagagccaccccatgcaccttcacgggttcaacttctatgtgttaggttatggatttggtaactatgatcctattcgtgatgcaagaaagcttaatctattaaccc

SEQ ID NO: 19438 - DNA, 819 bp, Arabidopsis thaliana landsberg
attatgttgtcccttagagtttgacgatgtgttttcgggttttgatccatccgactgtttttggggatgtaggaatgttatcaagagatgttatgatatatgcgaatcttgaattgataatatattgatgattgtctactcgtgcattatagtgttcattgatctaagtttgcaaattccagcaactacatctgactatcaatattgaactgtcaactccactactgttgggtggatttgggcctctatatcacccaacatgccccaaagtctttttcttctttcttcatcttccaccttacgatacattcttctcttcttcttctcattttatgattcttctcctattcttctttcaacgtattcttccaatttctcttaacactattaatcaaagatccgtttccaacattttcttgttagatttgctaagtttggaggttaagattctcttctactatacttttgtaatctggaagtataagttagctagtgaactgagttttgacaaagaagattatatcatgactcgatcggattgatcccctgattccaagatttgtattttcgatgttatgttttagtttcgtgatacgaaaaaattgattggtccaatttttgaaatggcagtttaaaaaataaacaaaaaagtcaaacgtacaagaagtttaaacgtacttatatatatcatatctaaccaagtctcgagtttccagatgtttctaggtgacggacaacactcaacaagagtagttgcataacatgcaaatttaaactttacgaaagtaaaaattctccgatcaaacccatatttgcgaa

SEQ ID NO: 19439 - DNA, 2114 bp, Arabidopsis thaliana landsberg
  unsure (1)..(2114): unsure at all n locations
tgacgagccgtctacgtgcaatagccaggtggtattgagtggattttcccaggcctccttagtgggcagttcgacgataaaatcggctgaacctgggattttgcacatgttttgttccgatactcgatgtcatattcgctgagctcgattgtccatttagctaggcgtcctgattggcttggactgtgtaagatagcgcggaggccnatggatcccattactatgatggaatgggactgaaagtagggtcgcagtttccgagccgacattatgactgctaaggcgagtttctccatttgcgggtagcgagattccgcgccggtgaatgtttgcgagacgtaaaaaatcggtttctgttcatctttgtcttctcggactaacactccgctgactgcagtatccgatacggcaacatacaagtatagtggttctccgattacgggttttgcgaggatgggtggtgttgcagatacttcttgagttcctgaaaagcttcttcgcaccgggtcgtccattcgaatttcttgttcccccgaagcacatcgtaaaaggcctttctcttgtcggtggatcgggagatgaatcggttaagggctgcgactcttccatttaggcgctgcacttctcgcttgttttgaggcgatgccattcctaataacgcctcgatttgattcggatttgcctcgatgccgcgatgcgtgactagatatccgaggaattcaccggaccttaccccgaaacgatacttggttgggttaagcttgacgttgtagaggttgagctgctggaaacattcgcgtaaatgggatatgtgttcttcctcttccatggattttaccaacatatcgtcgatgtacacttccatcgttttaaaatatcttatattcttgttgtgtgtattcatgataataaacaaattttagaatcttggatataaaaattatcagattatacatgaagatatatggaaattgatatttagattcaaaaatgaatctaacaataaaaaatgtaagttcataacatgagtctaattttactaagtataaaataacaaacaacaaataaacataaattagcaacaaaactaattaactttttttatctaaacaattttcaaaacaaactacacgcgtagcgtgggaattcatctagtgttcttaaaaatgcttttgactagataccaaaacagaggagtttcagcgatacgtcgaacaccacacacttgggattgatcaaagacggatggcaaaaacgagagaaaggatataaaaagtgtaattatgactcaagctacaaacaaaatggtggagatgtgaattttgggtaaacttcaattgacttaaggcccagtaatctttaatgaggaggttaaagatttagatggatctagaattttctattaggtattaggagttatctaatcctaattgtattaggaataggaaaagttgtacccctatataaggatctctttggttgagttgtaaccataagagttgtgtgagaatattgagagaccttggtgcttagttttgagagagtttctaatcatcaataaaagaaacttattcttttaaaagcttgtcttgtgttcttaagaaattttatcaatgcaggttggattttacgtgatgtggaaggttattatatagaagcaacacagagcaaagctcagatctgcaatacgattttggaagcagaattacaatcgctactcatggcgatgcaacacatgtggattcgaggtcattggtacttattctttgtaaaagctaatcactggtgaaacaaggagcttcacacttcgtaatttgattcaagaaataagagtttggcaacagaggttcacaagtgtgaagattcaatggattccaagaacaagcaacaaggcagtagattgtttaacaaaaaccagaagatataatgatgttgcttttacaaatcattttttatgtaccttgattccttgtaaacatccttcatgaggatcacatttcatcatcttaatatgacgccacacacaaggagaacgttccttcttcgtctttacaatgtcctatgcttactcaatctaactacacagtatgggccatgcgaatgagggctatgct

SEQ ID NO: 19440 - DNA, 275 bp, Arabidopsis thaliana landsberg
tcggctccaccattggatgatgggggcgacagaccgtacgcttttttaggatggatgacggacaatcttagtgcataccggcaaccacagcttaaccctgtcacagatagtggtgcagcacatgacattcactattcctttaactggggcgagaaggagccttctcgttcagcacaccacatctctgtgcatccacttcggtcatgtgcgatgcatatatgacatggaacggcggtatctgaacttgcgcgcgtctaatggactcggagggagtg

SEQ ID NO: 19441 - DNA, 470 bp, Arabidopsis thaliana landsberg
ttggtattgcttccacgccttagctttctcgtgaccgaccgagtcgtcctcgtcttttttgtttctataaatcaaatacccaaagagctcttcttcttcacaattcagattccatttttctcaaactcttaaatcaatctctcaaatctctctaccgtgatcaaggtaaatttctgagttcttattgtatttcttcgatttgtttcgttcgatcgtaatttaggctctgttctctgattttgatttcgttaatctctgatcggaggcaaattacatagtttcatcgttagatctcttcttatttctcgattagggttcgtatttttcgcagatctgtttattttcttgtcgtttccttgtatttgatccgatttgttgaaagaattctgtgtgttctcgattatttacgctttgatctgtgatttttatctagatttggcgttagtttcttgtttgtgcgatcgaatttg

SEQ ID NO: 19442 - DNA, 853 bp, Arabidopsis thaliana landsberg
agacttgctttttatttttataaaatagatggtaatgacgacgttagactatttgtaatggaggtgttgaataaattattcaactgtttaatcaatgtaatggggatgttgaaaaatgaaaaaaaacttatgtggatttcaggatgttgaatctatccaacttgttcaatcaaaattttttgggcccacatgccacatgtcatcattttattagaaagtactgttccacacacctaaagaacatgtaaaaagttttttttttttatctcaccttatctatttacaatcaattattatataacaaaacttttaaaaaaaaaatatttatatgaaaattcataactttttaaactctataaaaagaaacttggtccatttcattaagacaaatacaaaaaaaacattatttctatcataattattttattatcctctaataaactcttgtttttattttaaatttaattttagagtttgtttttattatcctctttaatttaatataattttagttgatattttaatctatcaaaaattattattaatatgcaatcacaaacaaataaatgtataaataaatataaattataaaataagaattgtagggtagagtgttgaattttattaaacaagtggttaaaaattatgtgggcgtcaaataataatgtggaagaaagagaagatgatgtgcaatgttaaaaaattataaaaagggttattgaataaatctgtcattgcccataaccttagagatgaaatggttgattagtcttcaagtacgtgtcacatattgcattaaaatatgttagcaagaaatagatcaatttgcttagagcaatcatgaatgatgaag

SEQ ID NO: 19443 - DNA, 1052 bp, Arabidopsis thaliana landsberg
cacgttcctattactgtgttatccgtttgtatttgaattaataatcatatcttacgtttaaagttgtcaagcaacaacatgagatatcgaatccaaggatttgttttatttgtttgtgacatgggttatggggttagttatgatttttaaagttatttatcatgtggaataatcggagtcagaacaaattaatacaaaatagtaatattagcaattagctggagtagctcagttggttagagcgtgtggctgttaaccacaaggtcagaggttcgacccctctctctagcgattcgtttttcttttaaaattctgtttttttttttaaatgataaaacgcagttcgctcttacacatgaatctttttttccttgcatctgaatctttctttctttggttcttaatcattttaatacaaaactttgtaccttgccattgaaactttttttttttccattgaaactttcagcagagcttttacagagcaatgaatacctatgcaattttgacgacattggatgattctacgaaagtcaagaacgaagctgatataactatatttcttaatggtgataacttatcaaagccgtgactaaattcaatttgtaatcaaactaatacaaaattgtaccttgtcattgaaactttcctgaaagcttttacagagcattaaggaacccaaacaactttgaaaaactgaatgattctgagaaagtcaagaaagatgtgacacaactctattaattgtgtgaattaatgtcaagttatgactaaattaaatatttagacttagggcttttttcattaaaaatgatcatgttgcattttagagttttcttcttttagtttcagagaccaaaatttaatgagtacgacatgatttttttttcttcctttttcttgtattcattttcttcgccatttcgcagttatgtattattatataatttaaaatttatgatatgaattataaaaatgtgcaatatgttctaaaacgtctcgagcactcaaaagtttaggcaaaaccatcatttccacctctcttgcttaat

SEQ ID NO: 19444 - DNA, 645 bp, Arabidopsis thaliana landsberg
  unsure (1)..(645): unsure at all n locations
tcgtagcgttcgtcatccgctatggtcattccactatggtttcctgtaagacaagtagaatcatgagttatctaacattacccactgagctgggtctatgcacaaataaatctctagggtttaatcaactcaataagtaaacttaaccatcagagatcacaaagcacgtaataaacatattatcatatacttataataataccagaatatggagccaaattagacacatgaatgaaccttgggcccagcatactgccaaccttaccaaagaggtgcaccacaacatcagcacaaactcccgcatacatgtatacatgttctccacatgtatgctaccacacacacgtacgtgcacacccacaccacaaatacgtacataactgtgaacacccgagctatagccacaaaggcttataaccggaacatcactttaatgcatcgtcatgcattacccgacatacgctccgagtcttgtgccatcatgtaagtgaccactcaggatcaagacttactgacacaatcattacacataaaggaagccagtagcttattctatgcatgatggtatcgggtaaacctagaataccacttagacacaataacctcatgtagtactatatataagtatntaccacaccccaaaca

SEQ ID NO: 19445 - DNA, 1300 bp, Arabidopsis thaliana landsberg
gttgtaaagttttgtatgttgttgtaacatttatcaaaaatttcattttgttatggtatgttatatagaaatgagtcaaatgaccataaaaggtttgaccttttccataaacgacgcttcgccctctcctaactctttccctcactttaaaaagattcgatttttgactgcaaaaaagagaatttctaaaagcaaatcggagagcttcggcgatggcgttatcacgactttcttcacgatccaacactttcctaaagccggcgattaccgcctttccctcctccatccgccgtcatgtttccacagactcatcaccgatcacaatcgaaaccgccgtccctttcacatcgcatctatgtgaatcaccgtcacgctccgtcgagacttcatcggaggagatcttagcctttttccgtgacatggctcggatgaggaggatggagatcgcagcagattctctttacaaggcgaagctgatccgtgggttctgtcatttgtacgatggtcaagaggctttagcggtgggaatggaagcggcgattaccaaaaaagatgcgattatcacatcgtatcgtgatcactgtactttcattggtcgtggtgggaagcttgttgatgctttctctgagcttatggggagaaaaactggttgttctcatggtaaaggaggatctatgcatttctataagaaagatgcttccttttatggtggacatgggattgttggtgctcagattccattgggatgtggtttggcttttgctcagaagtataataaggatgaggctgtgacttttgctttgtatggtgatggtgctgcgaatcagggacagttgtttgaggccttgaacatttcggctttgtgggatttgcctgcgattcttgtttgcgagaataaccattgtgagtttattttttggttaattgtaatttgtttggtggaattgttgagacttttgtgttgatttggattgtttgatgtttagatggaatgggaacggctacatggaggtcggctaagtctccggcttatttcaagcgtggagattatgttcctggcttgaaggtgagactgagttgtcttttggcatgatcttgagctttacaatgcttttgctttgatgagactgagttgtctatagcacgcttttagttgatacagggtttccttgtgtgttttagaccactgggtcgactatggaacagctaggtagtgaggatagggttttagacacaaattgaataagaaaggacaaaccttcacagttgtgtgttcggaagtgatcaagggtagctttgt

SEQ ID NO: 19446 - DNA, 836 bp, Arabidopsis thaliana landsberg
cgtattaactggacgcaagatggttttgatctggcagttggtcttgacaaccagctttgggatactgtttccaatcgttaagtgagaacattgagaggtggtcacgagtcaagaataggatcattggcatggaacaatcacattctaacaactggaggaatggatggaaagctcgtcaacaatgatgtgaggatcagatcatctattgttggaacttacgtgggtcacactgaagaggtttgtggtcttaagtggtcagaatctggaaaaaaactagcaagtggtggtaacgacaatgtagtacacatatgggatcgttctctcgcttcctcaaaacaaactaggcaatggctgcataggtttgaggaacatacagctgcagtgagagctcttgcgtggtgccctttccaagcaagtttgcttgcaactggtggtggtgtaggtgatgggaagattaagttctggaatacacacactggggcttgcttgaattcagtagaaactggctctcaagtttgttcattgttatggagcaaaagtgaaagagagttgcttagctcacatgggtttacacagaaccagcttacactttggaagtacccatctatggtgaaaatggctgaactcaatggtcatacatcaagagttctttttatggcacagagtccggatggttgtaccgtggcttctgcagccgttgacgagactctcaggctttggaatgtttttggagaaccacctaagaccaccaagaaagctgccccaaaaaaatatacggatccatttgcataatgtaaatcatattaggtgaatctactgtgaagactaacaaggag

SEQ ID NO: 19447 - DNA, 1391 bp, Arabidopsis thaliana landsberg
aaggccaaagcgacagataaacaatataatgcaataaaaaagtcaattttcaattagtaagactcttgcaatccaagggggacgggggacttttttttttcttttttttttttggcattatatattataatttaaaccttccgacgcctgaaaccataaagaatgtcgtaggcaagtaagggtattgttataatctaatgttggagacttttagcacaaattgaccaatattatgttatcttcattctttgttcatgaacagcaatgaacaatgaataataacctcctctgaataagatcacctacccaggaaaatgaaatttcttcactggtttttgcatcttttgatcatagcttttaccgttttgagatcagtggaagctcaaaatcaagcaggttcttaaaacatgacgatgttttgattgctctgttttggtcacaattagatgttttaagtgttttctttgatgattatatatcttgttttgatcatgtacaggatttattagtttggattgtgggttggtgcctaaggaaactacttatacagagaagtcgacgaatataacatacaaatcagacgcggattacatcgacagtggattggtcggaaagatcaatgatgcatacaaaactcagtttcagcaacaggtttgggccgtgagaagcttccctgtaggtcaaagaaactgttacaatgtcaacctcacggcaaacaacaaatatttgatcagaggaacctttgtgtatgggaattatgatggcctgaatcagttcccaagttttgatcttcatatcggtcctaacaaatggtcgtctgttaaaatactaggagtaacaaatacttctatgcatgagataatccatgtcgtaccacaagatagtcttgaagtttgtcttgttaagccaggaccaacgataccattcatatcgtctcttgaatttcgtccattgaacaaggaaacttataacacgcaaagtggagcactgaggttgttcgccagagtatactttccatccagttcactatcttacgtcaggtaatattttcaggcaacatatagtttactacttattattctttgtgtgttttaagttaacaaaaagatcatctcttcaggtatgatgatgacatacacgaccgatactggaattcatacacagatgatgaaatcctctcaataagcacagacctcccggtcgatataagtaacgtctacgaggtgcctgaagccgtgatgaagaatgctgctgtcggtaaagatgctacagcgccattgtccgtatcgtgggagcatgatgacatctctgcgaatttatatttatatatgcatttcgcagaaattcagactcttaaagccaatgagattagagaattcagcatcacctac

SEQ ID NO: 19448 - DNA, 1043 bp, Arabidopsis thaliana landsberg
aatttaatatcttctcagttggattgtgaggctataatatcataataactgtgttgcattgtgttgatgtgttttggctcctaatcaaactattggctactgttccactaccatactaaatgaacaaaaatacagttctattctttcttttttttaattatcatggtgtttgtatggtaagtcattattaaaacaagttatttggtctgctttctgttctgtttatcaaattgattaccttttcgttacatattcgttttaaaaaattatgcgtcatctgttgtttataaaatgtttatatcggtttaaaattctaaaaatcgaacgaactatttaggataatctcagaaaaaatttgcacaacttgaattagaagaatggatagtagaagaaggatcaatgccacttcttgagactctcgatactatgttttgacaaaagttaaaaaggtatttcatgatacattacttctttgagaaaacttataagtcagtagtgtcacttggcccacttcaaatgtttagattcataacaaacatatttggaattttaaacctctctttccatgggttgttttggcggttgagatgccattgtgacatgaacttggccaagaaaatattgaagtttttgactatgttggcaactgatgcggtgaagtatagttaacaatcactagacaattgttaaatcttgtaaataccagataaccgaacatccttaaatctactgaatgttcaaattatatttgaagacaagaaaagagttgacagcaagacgaaaactctctactttctttgaaacgagcaaaacatgatagctatttgattgtcttagatgatttatgaaaacagaattaatgtgactgttgtagcttttagctattttctaaatctagtttctactttctacaaagcataagtttttgtaaatcaatgcaaagaaagccatgtggggagctcaattggtatatttgtcaagatttgacggagattaagaagatataatatattcaaacaccattatgatcttacgattgaaat

SEQ ID NO: 19449 - DNA, 1618 bp, Arabidopsis thaliana landsberg
atctaaaactgtgaaaggtgtagttcacaaatcattcagagatgcggtttttgttttatgttttgcttgacgatgacaaagagtacatcaacgcgattaaagatgcaaatttttggtgctctgccaagtatgttcgtaggctatttgtcatcatgctactttcagaaagtttaaccaaaccagagatggtatgggacgaaacctggaggattctatctaaggatattgagcgtacaaaaaaaaaagaatggaagtgaccaggtctgtctcttcaatatatatatttaattatatataaatcagattatatgacattaactattcatagacatttatattagttgtgtgactaacgttcaatgtctttataaatgttgcagatcttcagctaagtgatgaggaaagacaacaatattgtttgcaagagatagccaggctactaaccaaaaacggggtttcactttcaaaatggaaacagatgccacaaatttcagatgaacacgttgaaaaatgcaaccattttatattacatgaacgcaagtacgaccgtgcatatttgacagaaaagcatgaagaatggttgactatggtgacttcagagcaaagaagatatatgatgagattatggatgttgtgttacatgacagaggcggagtgttttttgtttacggttttggaggcaccggaaaaacttttctatggaaattattatctgctgccgttagatcaaaaggagacatatcattaaacgtcgcatctagcggtattgctgctctacttttagatggcggcagaacagcacactctaggtttgatattccgataaaccccaatgaatcctctacatgtaacatttcacgtggttcagatcttggtgagttggtcaaagaggcaaaactaattatttgggatgaagctcctatgatgagtaagcattgctttgagtctttagatagaactttaaaagatattgtgaataatccaggggacaagcctttgggtggtaaggttatagtttttggaggtgatttcagacaagtgttaccggtgataaatggtgctggtagagaagagattgtttttgctgcactaaattcttcttatatctgggagcactgcaaagttttggagctaacaaagaacatgagacttcttgcagacattagtgagcatgaaaagcgagatatcgaggatttttccaagtggatactagatgttggggatgggaaaatttcacagcccaatgatggaattgctttgattgatatcccaaaagaatttcttattaatggggataatgatccggtggaatcaatcatagaggcagtttacggaaatacttttatggaggagaaagacccaaagaagagcgattatccctattatcaaggaagagcgattctttgtcctactaatgaggatgtgaattccataaacgagcatatgatgagaatattagatggtaagttaaactttaacgaaacactattgtattttcgctgaaattatttaatctcaaatagcgttttattaaaatttggccttccccctgtttgtcggtgccgcgagaaacaaaataaattctgatagtatagatccccctgacataagggatccc

SEQ ID NO: 19450 - DNA, 674 bp, Arabidopsis thaliana landsberg
atatatatatgtagattctaaacaaacaaaaaaaaacttgagaggatatttttagattttcatcctggaaaaataagtgaggctagagaagattttgatgaatgaaatctttaaattttaaactcttttggaaatatcttgaaaaaggattttccctgtaatttataagcggaaacaattcggaccggggccaaaacatgttagaaatatgtggatttgcagatttctgttcgggtcggccgggtctgcctagttgtctagttgactaaggttttgtggacgggttcgttatttttctagcgactaagtaaacatgccctcttccatgacctggcgtctagaagaatagtcacggaacgtgtgttccacactcgttatagaccgtattcaactattcaagtttgcccaaagaaattacttaaagaatttaattagcaagttgggtcttattttcttatttccaatattattttagttttatgagctgtcgtttgaaccatgtcaactacaagataacgtgcaagacattcgtgtataagaaatgtgaagaactccgttttatatggtaaaatgacattatttcatctgctataaacaattgtcaattgtgctttggaatgcttctcaaagtgaatattgaataaactttttttactattctcgaagtcttcatt

SEQ ID NO: 19451 - DNA, 532 bp, Arabidopsis thaliana landsberg
cccagacgttaactcgccgatctaaccccgttaacagacgttaatgagttctgttaaagacaaatttttttcgttttgtactaacaaaacaaatcaaaattcccaaatcgaaaactcaatccctaattctctcaaaatccctaattctctcaaaatccctaattccctcaaaatccctaattctctacaaccaaatcccgaattctaactttggtgaaatcgtgtttgttcttcgatttatctataattcgtgttgtgattgccttagcaatggaaggcgaagtccacattgctcatgttccaccacgacgtgaagttgaaaccggagatggagtttgatgatggagttctagctttgccggctgtttttgtagcagagtcttttgtcggagttgaagctccggtttcacagcggcttcgaaaacgaaaaggaaaaagagtgagacttgaagaggaggaggatgacgcacctgaattgggggttgacgcttacaacgaagaagactgtggtgtgtatggtgatgaagactgc

SEQ ID NO: 19452 - DNA, 430 bp, Arabidopsis thaliana landsberg
gggtttttctctctgtgggattctcctgagagttttttgtatatatatcttccactgaaattgactggggagagtttgacatctgtatttgatcttgatttggtgatggaataaactagcttcaggatcctggtgctgctgaggcatctatcagaaatcttcctccttctgccgatggagattctggccattttgatgccatgggtcttttagccgcaagtaaaggcaaacccatggaaggcattgttgagcaagtccacgatggcagcaccattcgcgtttatcttctcccggaatattcagttcgtacaaggattttgttgctggactccacgtatgttatcttgtctccttgtttacactgcctgaggagttgacatcttaatttcatggtgtaagagcgcctggaaattttctatgtaggctccat

SEQ ID NO: 19453 - DNA, 1070 bp, Arabidopsis thaliana landsberg
cagtcttgcgttcatcagcaaaccccaggttgatcctcttagtttcttcagtcggccgcatagaggtcgcggctgagttcgtttgccggtaccgtgagtcttcctcaggcttagagttcgccagtgtagaaggaaccgtcgatggcttggtggtgagggctgcttggatggccactcggaaacactctgcggcgccttggaagtcggcgcgcacagttatgatcccttgtggtcctggcatcttcagtatcatgtatgtgtaatgcggaatggccatgaatttggccaatccaggccttccgatgatggcgttgtacccgcagtcgaagttcgccacttcaaacctcaggaactcggttctgtagttcttcggagttccgaaggtgaccggcatgtagatatggcccagcgggtattccccttccgtcggcacgatgccgaagaaaggagtgtccgacttgtggagctctttgaggtgagctcccaagccttggagtgtccgggggaaggtgacgttgatgctgctctccccgtccactaacaccttcttcaccctgctctcttgatcaccggatcgacgaggagcgggtatttgcctgggtggtcgaagttgagccattgatctgcccgagtgaaagtgatcggtgctccgaccatcggtacggagcgggaggaccggtggtcgccaccaatatctggcgatcggtgagcttttgttgtcttctgttctcctgcgatccgtgtccactgaagatgacattgacctccctgtcaacgcgtgggaaggctcctcctcctccctcctcctgctgctggggttgtcgtggttcttctggtcctccccgtggcggaggaggaggtagagcttagaagggtcggccgtgcccgacggagtgcttgaagtccctgcagttccgaagggtgtggcgcatgtccttgtggtacgggcactgggcgtcgaggatgtcgtccagcgtgcgttgcctccgcgaggtcctccctgggtgcgagaggcaggtggtccggcggcgtgcacttcctcgcacggtctcttctcgccagcgtttgtc

SEQ ID NO: 19454 - DNA, 616 bp, Arabidopsis thaliana landsberg
aacacactgatgctatgtattgaattatttgctgcgttggacctaaatgcttattacaacccgaagaagacgatgaaccctttaagagacgtcatgaagatcgaatggaatctgctgttgagatcgctagacgggtacaataacccatatatatgaattgattcatgtgttactcgtacttgtttgaatatgtttggagcaagtttgatacttttggatgatgatatcgcaaattcgttatctttttggcgttataggagcgtgaagaacgaaagaaacgaatgagatttgataggccaacacgagtctctcagccggcttttcgtgatcagtatagagatactagagtttatgatcaaagcaagcttcctcagggtaaattatatactttgccacttcctcaaaagatcatgttaggttcattggtatgtggtttttttcttaacaggttggctagattgtcctggttttggtctggagataggatgtattattccttctaaggttccacttagtgaatcttacaacgaacatgttcctcctggtaaaagatacactttcaaacaggtggttcgtaaccagagaattaatggaagaagagtaagtttagaaacac

SEQ ID NO: 19455 - DNA, 600 bp, Arabidopsis thaliana landsberg
gattggctctttttggtatctaatttatgtttcgattcggtattcaattgtttgtttccatatgattttgcatcctctttttcaagcaagaaatggagctttctttgataggacttcaaaatgcaggaaagacatcacttgtaaatgttgttgcagtaagtataatatgcttcccttttgatattctctttaacacttagatgatggtggttggggatctgatgatgtctactcttatctttttacttgattagactggtggatacagtgaagacatgattcctacggtaagcgttacactacatgtcttataaagttcatctttcacctaacttgtggaataacatgaagagatatctcctttgtgtttttgatcaggtcgggtttaacatgaggaaagtaacaaaaggaaatgttacaatcaaactatgggatcttggtggtcaaccaagattccgcagcatgtgggaacgttactgtcgcgctgtttctgccattgtgtaaggatattccacccgggcctctcttcactctgtatctcccacaaattagaaatcatgttgattacatttccaggtacgtagttgatgctgcaggtcc

SEQ ID NO: 19456 - DNA, 932 bp, Arabidopsis thaliana landsberg
tgcattgtgtgttcttataattgtaaagcttattataattgtataattcttgttttattttttaccctgtccctcgcaaacccctagcaatttgcgaggatttccaacgacgactcgcaacttcctcgcaaacttgtaacctacagctttgcgaggaatttactacggatccacgcaagtccctctcaaatttgctagggatttactagggacctcgcaaccacctcgcaactttgtctgaaaaacctaatcgaatctttgtgtaaccccacaactttgtgagggatttactacaaagactcgcaagtccctcgcaaaattgaagcgatttcattcgttgtttagtcggttcctcgcaaagccctagcaaagttgcgagggatttgcgaggctatttaagtttataaatacaatgcgaacgagtttcagcgaagctcaaacccagctgtctctcatccgaaccctaatttctttcttcttcgcttattctctctcgatctgacgactgccgaagctggtcgccgccggctcgaacttcttcagcgattccttgccgtcgtgtcttcatcttcttcgccgccgtctggagcttctcatccacgcctgttcttcgtcgccgtgtgtcaggagcttcttcagcgacgcctgttcatcctctccgccgtgtctacctcttcttcgccgtcgtctggaacccaaaggtaatgtttcaaaccctagagttgttcttcattctatagttagggtttttgttttgttttttgtgttgatctttcaaaccctagagttgaatcggttttaatccgtcttattcgagtttatatttgtagatctaattggggtttcttgcttccggttgattttcattgtagatctaattagggttcactattgcgtagctgttcgctgtatttcgaattagcctctactaa

SEQ ID NO: 19457 - DNA, 643 bp, Arabidopsis thaliana landsberg
gggaaacctgctacctgaaatcgccaagtctgtcaatcgacacaacttgggtgtttctctacaccaagaaaatatcagagcagatggtcgtcggatgactcttggtgactccaacagaccggatcttttctattccaatcggtctacaatccgaccacctacgtttgacagaagcgttttcgagataaaccctgctttctatactcttgtgagtatgcacccttttcatggtgaaccacaagaacacccggtggatcacattgagcggtttgaagacttggtttcaagcattaaggcaaaaagtgtttcttatgactaccttccctgcaaggtcttcccatattctcttactggggaagcatctttttggcctaagtagttgaagcctggatgtttgacaacttggaaagaaataaatgttacttttctcaacaacttttttaatgatgcaagatccgaggagttgagaatggagatctctaccttctcccaagaagcaactgaagcatttaaagccgtttggatcagattcagaggatatcagagagattgcccgcatcatggttttaatgaggttcagttgttaggactcttcttcaaaggagttgattggcgatatcagatggctttaaatgcagctagc

SEQ ID NO: 19458 - DNA, 1498 bp, Arabidopsis thaliana landsberg
ccgccttcagaggggattatgccgctattaaggtactaaaaggtttttttggcctgggcaacaaaacaggaagagtctgggggaggagggattctcgcggatgacatgggaatgggaaaaacaatacaagccatctctcttgttcttgccagacgagaagttgacagggcacagcttggggaagctgcgggttgtactctggttctttgtcctcttgttgctgtttctcagtggttaaatgagattgctcggtttacatccccgggaagcactaaggtccttgtataccatggggcaaagagagcgaagaatattaaagagtttatgaactacgactttgctttgacaacatattccactgttgagagtgaatataggagaaacataatgccgtcgaaggtgcaatgtgcatattgcagcaagtcattttacccgaagaagcttgtgatccacctgcgatatttttgtggaccttcggctgtcaaaacggcaaacaatctaagcagaaaagaaagaagacttcagattcatcctcacagcaaggcaaggaggctgatgcaggagaggataagaaattaaagaaatctaagaagaagaccaaacaaacagtagaaaaagatcagttaggttcagatgacaaagagaagtctcttttgcactctgttaagtggaatcggatcatcttggatgaggtcagaaccaaaacttactgtctgttgttggtgttaacctttttcacaattttcgttgaaattcaagcatgtgagatacatataggaaaccatagtaaacttattgtcaccaaccatagaataactttaagggcgtcttttctttcatattgttttgggagactagatttatggatctgacattgattactagagctcaatttacatttcttcataccaggctcattacatcaaagaaagacgtagcaatactgcaagagctgtttttgctttggaggctacctatagatgggctttgagtggcactcctctccaaaatcgtgttggagagctttactcactggtttgttaacttttcctgaattttgtatatagcacttgaacattactatcgacatggctgatgtgcatatttttttttccccagatccgcttcttgcaaattcgcccatactcgtattacttttgcaaggattgtgactgtagaattcttgattacgtgtaaatttttatcacacttaattttccagtcatttttcgtatttctcatagttttgtttaatagttaataacaatttatgcggttctgttttctctggtggtgtttgcagtgctcatcaaagctgccctcactgtcctcataatgcagttcgacatttctgttggtggaacaaggtaactttggggtgacactttttttatatcacccaattttttaaagcaggatgaccattttatatcttttccgtgtggttgttagttttcctattcttgttagtatgtggccaagccaataacagtatatg

SEQ ID NO: 19459 - DNA, 1605 bp, Arabidopsis thaliana landsberg
  unsure (1)..(1605): unsure at all n locations
atccctgcacatgcgccattttccgctttttttctgcaccatcacaacattggagagccacgtggggtaagccactagctcgatgaatttagcctccaggaggcgatgcacctccgccttggcgcctctgtcttttcgtctgacattttgcgaagcctctgctttttgggtcgcaccgaagggtcaattcccaagctgtgctcgattatggctcggctgactccgaccagatcgagggcagaccaggcgaagacatctttattcttggccaggcagcagagaagtctctcttcttcaagtgaggtgaggtcttcgctgatagttactgtctgcttgggcgtggcctgatcgagggggacagtcttggtcccgtcttggcactgcaactgtgccttgtcgtgctgcttatcggttgggctgatgggcgtggggacctcgcgctgggtcgtgagacagtgtacgttcctctgaccaggcacgaagtcccgctctatgttgcgcgccgtctgctggttgccgtagattgtaatggcgcctagcggacctggtatcttcatacataggtacagcccgtggatggcagcttcgaacttattgatggagccccggcccatgatggcgttgtacggatataccatgtcgacaatgtcgaaggttacttgctcacttcgggcattgggtgctacaccgaaggagaggggaagctctattttgccaacgggaaaggtgcctttgccgtcgtagccatacaacggattgtccgaaggcttgagcaggctgtggcttatacccatgcggtcgaaggcgtggaggaagatgatgtccgcctgactgccattgtcgactaggactttgtgtaagtcccagcctgccacgctgcaattgatgaccatagcgtcgatgtggggggcgctgcgcaggtcgacgtctcgtgcgtcgaaggttagcggtatgtgggaccactttgtctgcacgactgggccagtgacggcgacatggttgatgatgcggtagtggtctcgcttctgccgcttggtgtcaaagtcagtgctggaccccccagttatcatgtgaatgactccatgatatggttgatcggcgaagtcttcctgctttggggcatgggggatgttttgatgttgctggtgtggtggtgggggtggaggaggtacgatttgtacttcctgatggtgttggtaagcgtggtgcggtggatgtggggcgggagcgtggatatatggtggagggggttgctggtaattgtgcgcgacaattctggggttgtcggctggctgcgcccatgccattctgtctctggtggccttcgtttcagggcagtctttggtttggtgggcgcagtcttcgccatggaaaaggcagtagaatcggcgcngcggtgcgcacgccctcggcccctaccacgagttccatttccgcggccctggggggatattcctggcgacgaggggggtcagcagcgggatgctggttggcgatgttgtgtacttgctgctgactgcggccgtctcgactggagtctggctgcggagtcctcgtccacgtgcggctggactgtggggcatctttgggttccactgtgactca

SEQ ID NO: 19460 - DNA, 773 bp, Arabidopsis thaliana landsberg
ggagaggtacttgagttacttgaggacattgaatgtaagacaatgaagtatgtaagcgaggcttatgaaagagatgatggaaagttgtggtttgggtctgtttactggccagccgtttgggttcttgatcgcaaatgagtgatcatgttgtatctacttataattatgttcgttttgtatattaataaatgtttatctgagttaaatcagcatttgtttgttgcgggaaaataaatgtgaatcctactttttcaaattgttttttttttctttgtattaatgctcccaagatgtttattgaactgaacacactagaatgaattatagcttttgtaatcagtcgagtagactagtttttttttttccgatttaattttattaaaatgtcaacataacaaacttccaaacagaagtcttttaagaattttggaggctcaaagatttttttttctcgatttttttttactctaatttggaccatttggtctgagaatacatttagaaattgattcatctctatctcccgtatatattttaatatatttagaaaaaatactaaaataaagaaaaatagacgagcttataattttatatattaaataaaagcttaaataaaagcttataattttatatattaaataaaatcttcaccttaaaactattaaaataaataaatatatatatatatatatatatatatatatatagttttgttatcggtattaaagctttattttgtagtcgaaagaataaaatcatttaaaacaattttg

SEQ ID NO: 19461 - DNA, 363 bp, Arabidopsis thaliana landsberg
  unsure (1)..(363): unsure at all n locations
gtttagcctatccatcaacatctcaaataagatactaccctcaattgcattcatatttcaaaacacaaacgaatcgagaaaaaccagagcttgataattgcattccctagctacatggcaacagatccgagaaaattgaattcacaatccaccaaggcaaggattctccagggaaagttaagattgtaaatacaaaaatcagaatgttcgattcgatctacgaacctgtattcttcgagaaagcgatcatcgtcgagatctttgtcgtcctcaagatcctcaagctcctcctctgtcttcttatcaaaccatgccctgatccttaggagcctgaagacntcgtcttccgccgggagtatacgc

SEQ ID NO: 19462 - DNA, 425 bp, Arabidopsis thaliana landsberg
ataagcctgcatagtatatggtcccatgcaacttaatatgcgaagaaaagaaaacctaacactttaatcaaaggaagtaaaaataatcagaaagatgaaaaagaaacaaaattattcaccagtaaaccaataaactacatatttgtcatcatgaaactcgaaattctccctaaaatagtagtccaacaagattaactgagtttatacctgtaaatgatgagcgactagcattgttatagatatcgaattcagggtattgtgtgacgcattgttaaccccatgcgctttggcccaatgcttaatctgacatatgacaatattcacattagcactaaacaattgacagtgcttgtctcacaagcccttaccgctcgaatgatccacgacaagcttcagtataatcactgcaattttaccaacacaca

SEQ ID NO: 19463 - DNA, 448 bp, Arabidopsis thaliana landsberg
tcctataaataaaaatcaaaatataattatacaatcttaaaccataaataaaacaaacaatattaactttacaaatacagcttaaaattcaaattttttaaaattgcatctccattattttataagaagtttaaaaattagaaacatttaaactttatactacgactgaaatcatagaattgatggctttggatagatactaatagagaaatttccagaaacagcacaataatatgggattggtaaattatgtgtaaaatcttagaatcaataatcacaatataattatacaattttaaacactaaataaaacaaacaatattaaaacaagtataacataaattttaatttttttaaaaaatgcatatagattcttttataataattctaaacctcatcaatttaacctttctactactggggaaaccctacatttgccaggtttggg

SEQ ID NO: 19464 - DNA, 1853 bp, Arabidopsis thaliana landsberg
aacgactcaacgctaagaagggctcgtgggccgacgagcttgaaggagtactctggtcacatcgaacaacgtctcgtcgagccacaggtgaaactccattcgcactagtctacgatacagagtgtgtaatccaagccgaaatgacggtaccgaatctgcgtcggagtctgtttctcgagcacgaattggataatacttaaagcatgctcgacgagttagatctgatcaatgaacgaagagattcagccttagtgcgaatacaaaattaccagaatgatacggcttgatactacaactcgaacgttcggcagcaaagatttcaagaatgagatcgggttctccgcaaagtatttcagaacactgccgagcgaaacaatgggaagctcggggcaaacaggaaaggaccatacttagtctcgaaagttgtccgacccgacgtctatgaactcgccgatttaagtggcaaaatcattccacgatcctggaatgccatgcacctcaggaaatactacaactaaatctgagaggcacaaacttgaactacgaagtggtttgatacctgaaaagggtaagtaggcagctcgtctctgggggttttcaactacttcccccctcccataaaaaacgggggagtgggtccgtatatccatactcccacttttatttgtcttgtaagttctttacctatttcggcataaataaaagttctactttttataattttatattacaacgagcgacggctcggagtatcttttacgccgccttggctacaacgcgctatataaattttcgagttagaacttgccggaaatactttacgcaaaacctcattctatcttcagaaaacccggttaaatcttaacactggtaccccagctcgttgctaaacgctcgtccaagggtgagtagaatcgggtcacaactgaaatgattttcacaaaaaaacttaagctcagttcattcatagtggctctatccaatgaactgttcggagttagcaaagcagcttcaacgtggttagattacaaacaatcaaactaatcaaacacattggggtctaagaagcaaacccaagttcttaaagatcagtggataaagccatccatgcatatgttctacagaaatccggatagataggtctaggcacgtagtcttaagatgaagctgtcctaccatggatatctactcatgctgttcagtcgggagagtcccagcagcgggcaagtcccacccgatctgatcggtgactcccacctcattcgcaagagtctcgaccgatctatgccctttggggcttacaggagccggtacgtgcacaggggttgtgagctcatccttcagctcagatgtgagacgaacaaggttctcctaggcatctgcaaaatccttcatccactccgcgacctgttttttctcggtcgccaaagatccgctgtcttcgagcgccttgatcaattgtgcgttagcccgcgcttgggacaaatacataaattggtcgttagcatcctcgaagcgacatcttctcctcggccaccttgagcttggcggtgaaagcctccgaagtttcttgcctcgccgtttgcgaagcccgagccatttcactgtccctaagtcctctcgcctcggcaagcagtcgtctgcaacgaacaacctcggagtctatttttaggttgcgctcggccatcttgatgggaatctccttattgacaaaggcttctctctccggctcttctctcaccaacttcgcctcggtcgcctcggagatcgccgcatctctcgcttgttcggcctctttcgccctggtctcagcttcagccaacttattaaccgcctccagattgtttcgcatg

SEQ ID NO: 19465 - DNA, 1195 bp, Arabidopsis thaliana landsberg
taaactacttttaatccattggatctggcgacaacgaagtttgaagaaatgaactttatgtgaacattcggtattggcccagtaaatatatggaatacaggttacagaaatactttgtagatataatataatacatgtaattttatcataaacaataatcataaaactgcaacttgatacaacatgaaagtaaattgatgtgtacgatttgacacacaggtcattcagtaaagaaaaaattagatacgtatctagtgcgttaaatgcgaagacaatgtaacatacatgttctaatgttgcattggggcaaatggtgcaagttaactttttttaaacatgtatattataagtataacagaagggagaagcattgacgtaccacaacacgaccgacacgtttcatatgacgtatttgccacgacagatatatatggcccaatcttgaataagatctgcgaaatctagacctcgataagtgggtacatggtgtagtgccaaaaatatatgtaatattttttcggaacatgtattagtaatcattgatacctttgacgggacatttgcaactatccagtgtttgggggggtggtgggtaaatcttaatgttttcaaaagtgtgttgctaaaaagggttttgtcactgtttgtaagaaatatttaactggactgtagacctacttcaatgggatagcttctctatataacaggtgagatgagtagcatttatcgatcgcaccacttactctttgaaaaaaacaaaaggagaaggaaaagttacagctgtcgtaggtatgccataaatggaagattaggtttccacaatccatgttttctttagttatcagtcttggtttttttgtttttttccgttttaaatttaatgcaacctttatttcatgtcttccttctgtttgcagcaatggttgtcattaccgaaacatatcccgagatatacggaccgtgagcggaatctgggcaatccaactagatggtagctgggttttcatccccaacacgcataacgccggaaagaagggtcagtattcaagacggggagaaagtagctgttgttcgagagttactaaaggaatcctatggatcggtttacgtaggacgtgagcatcacatgtcatacctatggactgattggatggggaccccgccaatccctataaagacagatgaggcgatgtcc

SEQ ID NO: 19466 - DNA, 1734 bp, Arabidopsis thaliana landsberg
attttataattaaatgattttaaaaattaattattttttagttgaaatattttgattggctagaataaaaaaatagtgaatataaaaacacaatatattgttctttgtgattatactgtttacattaatgttatactatatgcatttaaactaaattgtttgttttgattgatattgcttataagggtgttttcattggccaaaccacaatatttgaaattgtagtactatttgatattgcttctctggttttttgtctatactatttcagtttttagaataccaaatttttttacttacaactacttttctattttgtaaatattggttcatattaaaaaattcaaaccatgacataatcataaaaaagtctaatgtttttttaataaagtttagaatcggaatcagtttattttaaagagatattttagcaaaaatatgtaatggggtgtacaaataatagtatccaaaaataataaagaaataacaaaatggaattaacccatctattgtacgttaacaacgtcagcatgagcatgtctaaagtcttgcaaataaggagtttgtggatatttcatctcatctgtatgttacttacttaattttagattttatagtgctatatccttaaataatttatgaaaataggttacttttgcaattcaccctaaaaacaataacatttttattttaagcgaaaatgacttatatctattattaattacaaaaaaatccaatacatagatcctttgtcaactatcaatcattagttttgtattgagttgctacctcaattattaataaaaaatttacaagaaaagagagaaatgtaaatgctaaaatactagcatgtgtgtataaataacacttcaatgagaagactctctaagttacctataaataaatttaccaaaagaattttataacaataattgagacctctcaatctttctatttctaattggtctttgcatattggtgatgtatacggaaaaaatctatgtttacggtcaagaacgaatttagtcgcaaaagcaagaaaatcatcaattgcattgtaaataaaaaacaataatattggtataaaatatatcaaaattggagaagttatgtcattaagcttcaagacaaatgtttgtagaaccacatgattttggagcgatatatataaaagatctagtgataagcattttataggttttactgcatatcaagcgcaagctttgttcgttaaagatagatcatcgtataattggttatttagggatgatggaatctattttcataacgctttgttgcctagttactataagttttattggaaataataaaagacaaaaaaaactactactttatttcataatttgtagtagatgtcacaataagtagatagatgttgtatacaaattttgaccaaaaaaagatctagtatacaaaaagtggactctaaaatctataggattgctttgaagtacttgtaaaagaaatagtttattaagatatagttgatcgattaatttcgacatttgcattttttgtttatactaatataatgtacattataggtaatagataatgaaggttaatattagcaacttatctgagattttattttggtgaacatattgttcgccacaaaagatataatgcaaatggatgagataacctaaactaggatggtacttagaagttcatacacttatttctgtccaacatatatgaaagtctcaatga

SEQ ID NO: 19467 - DNA, 1130 bp, Arabidopsis thaliana landsberg
cgatctcgtcatattaaatccatatgcaataatatactaaccaatctaattaaaccaaataattattatcgataattcaacgactataccaaatcaaagaaagtaaactgaataattattaaaacgtttgtcgaagtttggatttaatgttttgaaaacagagaatataacaaactcaattataaagcagtataaattttagaacgatacttggacgtgataaggtcccatcactaacaaagtatattaatcaatgggaaaattactagattgaaccatattttatacataatgaccaaaacgaaatgctaaaaatatgagttatatgagtaataattatacctacaatatccctgttttcctttgcagaaaaacaatattacataaatgccattactatttaattccagcatggcaataaaaccacatttatttacgaaaatgccatagtcatttttggtaaatctgtggctcttgttgcgacggatttgtttaagatcacagattttttggtcaaccacagattttttacaatatacttgttttgtaccacaaactttactgtgttatgttacaccagaattttttgttcatattcttttaccgtgacttatttgtttcatatagtctctaccgattttttaaaaaatttcaaaattaagaatgttgaaaccaaatgtgtcacttatttgttttccataccgcaaatttttccttattgtagcaacatattttctatttgtaaccaaaaatctgttgtgttataacagatttgttaacccggaaaaatgttatatagtcatgacagagttgttttgtgtgatcacagatttaattaatttgttaataaatctggtgttttacaacagatttttttgttaaaaaataaaattattagacagtcacgtagtgataacagatttgtttttaggaggagatattggataattgaatttaaaagaattaaaatgaatagaaaagtaaaagattttaatgtatttgacaaattctatccaaatcacaccataatagttgggatttgtttcttcacgtttttgtctttgatttcttttaaattctaatcaaatcacattgccaataaaacaattttaatgttgaataacaataga

SEQ ID NO: 19468 - DNA, 430 bp, Arabidopsis thaliana landsberg
gaaaaactcggtcaacactctactcggaacgacttcttcatcgtgaggttctttttctttacgaattcactaattccgacttgatccagtctaaatgaaaaaaaaaaaaccaaactgaaaatcccctaaatctaggtgcaaggaaaacgcgcctaaataatcatggtggattgcagcgatgtttacatcagcttcgacagaagtgaggatacggtgcggtactcttttgtcagccacctctgcgccgctttccgccgcagaggaatatcttcgttcatcagagaaaacggctccgattcggaaagcaatggattctccaagttggagacgtctagggcttctgtagatggttttctctgagaaatactcgtcatccaagtcatgcatggaggagctggtcaaggttttccgaacgccggcggaaaaactg

SEQ ID NO: 19469 - DNA, 616 bp, Arabidopsis thaliana landsberg
acaccacctccatgtatcattgatagattaaaataatttgctaaaattgcttaccaatggattagctacaagcctacaacttttccttatgataattgataaagataattcgattttaaatttaatgataaattagttgatacctattatattatgtatctatttaacaatgactcaatcttaatattttattgtttattaatttgaaagtaaaatgaaatgtaattctgttcaataaatataagttaattttttttttatttagtgaattacaactcacgatggttttatgaaccgcaaagttgggaagaattaccaagatgaattctcctctcgttagaatacattagagttcttaataacatgttacaaatatctccaacatctttggaagagttttctgaatacaagctcttcactccatctaactgcaaacattaaccatatatattgcataagcccaaacgatttacacgatcaagttaggaaacgatcagtaccactctcaggctttcctgatgtttagccaaaagctcatcgtactttttttaaagataagagaaattgtgtattcaagtgatgagttctacaaggtaaacatgtaacattaattaga

SEQ ID NO: 19470 - DNA, 1392 bp, Arabidopsis thaliana landsberg
cttagttaactcccttttttttttttaagtttgacaatgttaattgaaaccttattgagatattcactaaacaaaattaagttgttggctcacagtaccaagacaaccaaggtgttccgaaccaactataaaacgattaatttatttaaaatgtagttaaacattttaatgtttatttagtcataaatattttaaatatatattattaaattattttataacattttttaactttgcctaccaatgcgacatttggtactctactttgatgacacgtgtacttatcattaattgtaatttgactaaaataattttttaatagatatatcatatatttagaaaaatagtcattaaactatgaaattactacatattaaactacaattttgaaatgaattttttctagcataattgcaactcccttaactaattacaaaatcaaatctttaaaattttgacatgatattatgttttagactacaaagtaatagttcactactataaataattctccaattttacaagaatttttccatctttagttttttttataccataattaattaaaataattttgtttcaatattataggattaaaaaattaaaaaatctgttaaaatttgatatcttacatttgctcatattttaacagtttttctttttctatgttattaatgcatgtatatattaataaacatatcatatcttatttttataaaataaatgtatgataaagtaaattacaaaaataatttgttgatataaactcatacataatagttccaattcattttattttgtaagtgacaaactaaatttgttttcttataaaatcatattaattttaatataaaggattttttattaaaaccccaaggacaacttctatctattcacatgttccttactacatgaaaaaggtaaattggttttcttatcatatgcaaattttaccatgttctaattttaaatcagaaaaatcctataaaagtttaactattagttacatttctttgttctccttattttaacttctcgaatcatatcaacatagtttttgtaacatcagtttcttctctttagctttttttatagaagaagttttttgtcatgtgtcaaaagctgatcaagaattggagagaagtagtaatgattccttgatgagttagcgtaatgccaacagtcgttgccaatagacattgcattaccaatcattctccacagaaaacatgtcttttacataacttagggtagaaatatatatacaaacttttcactcatttgctataagtagttaatttattttgtcctaccacatacaaatctacattacgctaccaaaatatgctaaatctttttatccatataagaagtttaatttttaataattag

SEQ ID NO: 19471 - DNA, 311 bp, Arabidopsis thaliana landsberg
gatttcgtctttcatggcgtatcatccggcttatactgagactatgtctatggtaggtgggtcaagccatgggggcggccagcaatacgtgccgtttgctacgagtagtggctctttgagggttgaattgttacatggtaacttagacatttgggttaaggaagctaaacatcttcctaacatggatggtttccataacagacttggtgggatgttgtctgggttaggtcggaagaaagtggaaggtgagaagtcttctaagatcactagtgatccttatgatactgactctatctacggagctgtgattg

SEQ ID NO: 19472 - DNA, 389 bp, Arabidopsis thaliana landsberg
  unsure (1)..(389): unsure at all n locations
aaagggcagctgtctcgtgctccgtctgattangcgacggcggcttanctgagtaaatgatctgagacttcttcatggtgtaatgggagctcctcttgctcctattcatgtctcttcctctgatcctttgcctcatcttagtatcaaaaacactccaatcgttagtctcactctctcctccttcttcttccttgtaaagttcagatttttcatcattttccttcagatttgcaagttcatgactttgaaatctttgatagtggtggttggttttattaatcgaattttctttacttgagaatgtttttcattggtcgttggttggtggaaattgatgtcatattctttggcgggatttgatgtttcttacaaaccataggcggtattaa

SEQ ID NO: 19473 - DNA, 989 bp, Arabidopsis thaliana landsberg
aaaaatgtaaaattaggttttcggaccaaataaaaacttaattatataaatctcattcactacactcttcaacgtcttaaactcttacaagttagaaccattctctatggaaatacctccatcacctccgccggagacggcggcctacacattaaccacctcttcactctcctacaccataccaaaaacctctctctccctcctccgcttcccggcgactgagccaccctcctttatcctccgcaacatcactctcaccgctcatccaaccgagatcctcgccgtcgttggcccttccggcgccggaaaatcaactctccttgacattctcgcctctaaaacctccccaacttccggttcaatcctccttaactccattcccattaacccttcctcttatcgaaaaatctcctcttacgttccccaacatgactctttcttccctctcctcaccgtctccgagaccttctccttcgctgctcgtctcttgctcccaaacccatcattagtttctgaaaccgtaacctctcttttatcagagcttaacctaacacatctttcccacacaagactcgctcaaggcttatccggtggcgaaagaagaagagtctcgatagggttaagcctccttcacgacccttgctttcttctcctcgatgaacccacttcgggtttagatagtaaatccgcttttgacgtcattcacatcctcaaatccatcgctgtgtcaagacaacggaccgtgatattgtccattcaccagcctagcttcaagattctctccatcatcgatcggttgttacttctttcaaaaggaactgttgcgtaccacggaagacttgactccctcgaaggtttcttgctcttcaagggatttactgtccctccgcagctcaattcccttgaatatgcaatggaaatacttcaagaactacgagaatccgatggaaacaccgacgctactgatctcccttcaatcgaaaaccgga

SEQ ID NO: 19474 - DNA, 1437 bp, Arabidopsis thaliana landsberg
aagaacctggttttcggtaagactttataacttggcacatttcgaagcgacttatactctgcttaataacattatcttccgctatgaaacttgaagatgaaagaaatccacatttgggctacttcaccaaagtaaatatatcagcgaacaaaaaagaataattgggagctaaaaagaaagaaaggacaagataatgatcatgaacacctttatttcaacagttaagcatggtttatgatcctcaacttgacctgaaagcagtgtaggttattaaaccaaaaaccatcgtcaatttggattaaccaaaagataaatacaagctcacatcaacttttacttgcagtcaagtagaacagtgaaaagaaagagcttaattcacgaatagttgattacacaaaattaattaatttaccatgggagaaaatggtcaaatcatccatgagaagcgcgaaactgcggttagtatccacactgagtgtattagctcgccaagaatgacgctgagacgttactatcttcttaacagactcaagaaactccttttctacaggaaggcaaatctacaacattcccaaatcatcaaaactaaaaggtcaaaaaacctttaaaacatcctaaattaatgcaacttggagattcttgtaaccgttataacgtgttacaatcatggcaagggagacttactccaggagtaacatatttgtgacccaacaaaggtttcatgacatgtttgacaaacaaatactcttcaatctccttgttcttgcaagatacaagatccttaacgtctccccaaataagcttttcatgagtagtaagaccattttcacttttgtctccattttcattcccatcctttggcattttttgtatcctcatcatctttcccaacttcacacataacacacacaaaaaagagaaacaaacaatttagaatcaatgttaactacttcttcctaatcccaaaaaacgatgaaatataggttttgagaaacagattcaaagaggagactaacgaaagagggagaagatccagtgtaagcaagaaccaaattaacagctccttcgcctctatatgaccaatcaactgcatcttttggttccaaaacaatctcctccatctgaatccaaacaccaacacagattaaccaaaattctcgtttattttatatttaacatcagatgcgtaatcttagagcaatgatcaaatcgaaaacaaactatgaacctttgatttgatcacaatgtagtccacttgcacctttgatctgatatgtgtaacgtgttgcagcagtcaggttagaaaaattatcactaatgatctcgattagtattaaaatccaacactcgtaatttagttctacaggtttctttcctctctctcaaaaaaaaaatatctgttcgaaacaaacgcattgcatgtatccgttttttttt

SEQ ID NO: 19475 - DNA, 1181 bp, Arabidopsis thaliana landsberg
tctaacgttttagattaagaattaaaattaatatgtttacaagtaataataaaaatataattagatgaaagcattgatattttaggtatttgtattattacaaatcatttggatgaagatagagataagcaaacgaacaacatctcattcggatggtccagttaaatgaacctactaaaaatgaaacgaacaagagtcgaatgaatcatctagatgaacatgttgaatgaatcagttggatagatctgtcaaatggagaaacgaacagggctttacaagaaaattgctcacccgacatattacttaccactatcattgggtcattttattcatctcaactcctccttttgtacttgttttacatgtgttaatgtcttttcaaaaatcatttaagttttggctcgtaagttttatccgtggtataggtttacaattattattttttgacaaaatctattaaaaaaagaaaaaaaaaaaaatttgttcgaaaataagataagagtcaatggtcaaagatttgcaatgatctgtcggtgcctcacgtagcctttccgtataatatagcacaacaaaaactcttgtgttgtagtgagcaaacgtacgtatagagggtcagaaccactaagtacatacataaaaggtccagaaaacgccctcacactactttgagataatgaaagagttcggtcctaccttccctctcggtgcacccgcttccacctgattttcagcctatcatatggggagctcccacgtggcttgaccggatgttccgtgtcgaaaacaaaattcttaaaaacgatacaacctcttctccgttgtattaaattttgttgtcattcttcagatatttttagctattttcttggaattttcagtgaatttatggatcatccccggaaataacggaaactgcgagccaaaaaatcaacaaaagaatagaaaatacgagctgaattgtgacgtcatcttgtgatgttatttacgaagagattttcaattgcgaattttataactcaaaaagttaagaatactttttaacgaatcatttacgaaaggaaaattaattctggaatattagtatgaagtttgacaattgagaaaaaaagtttgactaccttggagaatatcctctttctggtacgtcaaaaaagttacctaagtatttgactgggtaccga

SEQ ID NO: 19476 - DNA, 935 bp, Arabidopsis thaliana landsberg
acttcacatacaaatgccgaataaaaaataagaaagaaaaggtaaagttaaaagtatgctatgaagcaatataacttctcggtttctgaggataggagtttcgagagttccccactcccccgttttggcactttttagtgtcatgtggacctttcaaacatcctcaacgttgactttcataataccacttcggctcggcatctcggtaagggccgcgttcgtaggcacattcaattgaacaagagcatagaacagttgaatctgaagcagctggatctaaagcacttaaatctaaagcagtagtagccttaagaaaggaagagaaaatgcaacgctttccacaaactacacaaaaaggtctagtcataccaacattggcaactacttcagctttgccgtatctattgcctggcttgaagtaatacatgtctccaagtacacagttgatatggagtgtattcccacaatcatcacatccataaaaccatacactcggatctgtctcttcctcacaaatatcacaccacaatggaccgtcggtgtttccagctccatgatgcaacgataagtcatgaccgtcgcatgtatgtttcacttttcttggtaaagtggcacaatccatgcctaaatgaaactcacacacagtacaacttaagacatactgtgtaggtctatcacatgctccacaaatatgagacttctcttctggtgaaaagatgtggtataaaggatggggatgcagttcatggtgaaaaggctcagaaatggatccacaccgcacatcaaatttatcaaacgttgtcttgtacctgaagccatcgaataatttttgacaacttctacacttgtaatggttgccagccttattttttacccttagatcaagcttgtcgatgtgcaagatacttcgtttcctccgagggagactagcacat

SEQ ID NO: 19477 - DNA, 2844 bp, Arabidopsis thaliana landsberg
aatgccaaacccaatggccatgtctcgcgtttggaaacacttgcataattgatttgttgatgctctgatgtctatcactcacaaaaactaaacctggtacatctggtataactgttttcagcttgttaaagaaccacgaccaactagcatcgttctccctatcaattacagcagacgcaatgatataattgtgatgattaggatcttgggctgttgcgaaaactagcataccgccgtatacggtcttaagaaaagtggcatccacaataacaactttcctcataactttgaacccttcaatgcaagcacccaaagcaacgaataaatatttgaacttttgttgtgcatccacttccacatatgatattgtcccgggattcacctcctttaatacgtgcagataagagtacaagtcggtgtagcttttttcaggactaccacgcacatcactaacgtgttgtcttttccctctccatgcggtagcatacgagcaatgcaaacccattcttccccgaacaatactcattatgcttttaggtggtggagtttgaaactcacctggataatcctcatgcaaaatagacgcgattaatcgtggtgtgccggtatgtttacaattgcttgagttcttatcagaccgcttgcatgtgtgcatcttcctgtgaactctaacactaaaacaatctgaactctttacttttgcacatcgtaaataccatcgacaacctgttgttttagattgccgacatcgtaacatgagtcactgtggatctgacgctatagttgtggtcgcaaaacaatacttatttgcagctctattaaccaaatcttgcacggcctccttagaaacaaattcttggtgcaattcaatccccgttccatcttcccattccttaacactctgatttttctcactactctgacttccttcaccagcacatggaagctcataatacttaattctaccatcaataccattatctttatcaacatccatctggctatccacatgctccctaccttcaataactacattctccatagccttttcaaaaatccggctatcagcattctcaatagcctcttctacacaattaggctcttcaataatcggttcatcattcacacaattacctcctgcaatttctactccaaaaatcgtcactactccaccattctccacatcaaatgcattcaactcctcaaaattaacaccaactgaacttcttccctctgcccttgaaatttgttccaccctctcagattctttatttactaattccacgtgcaaagctggtctaattcccttagcattcacaaccattatataccctaaaaagtcatcatcatctacaatagatgtctctctctcagatgtgcatagaatgtaactcaatttcaccttccttgaggtttcatctattccaatcttcttgcatatcttttctactaacaacgagtatgttacctttgacgtcttcaacaatacaccgcttaaagaattgtttgaaatccactcatgctcttctgaataatacccattgtcaaattgtatgaatgtgtgcttgttcttcatcgtctcctgtaattataaataaattataaaaacataattacgtaatcattcagatgtagacataattgtacctatattataactcactaataccatttgtaccacctgtcatattgtatctcaataaaacacttgtaccgcttatactattatatctcagttttaccatttgtcccagttcgtcaattctgggtttcacaaatcgtaaatttcgattgaatactcactaaattctctgattcaaaacgataaaacagcccagaatgaacaatacaacaattttatgttatgaacaactaactccaacaagaaattcatattaatctacaaatcaaaacgagatcggatttacttttgccgttgaagaggaagctcactttgggagcagattatcggcttggaagctacgacgatatcggaagctaactcgccggtgaaattagagctcaaatcgccggcgaaatcggagctcaagtcgccggcgacgaagtcgaaaaaaatcacgtccgaagtcgtcggagagaatcgcgggagcaacgaccgttttttttttttttttttactaaataatttactctttattttgaattctccctcagttattcattaaggagagagatgtaattacacatggtcgagtggtactcagaataaatggatggtactcagaatagattttccaaaatgatggcagaatagaacgtggctcaaataccgagccctagtttagttagttagaagtaacttaaaaagagttcgtgtcctgaaaatcaaagaaaaagctaccaaattttgaatcgttgtctttaacttgattttccccaaatttttcagaaatcaaaatccgccggaacaatgtttactcccgatcccaatcccaatccaaatccaaatccttccgtctctgtagcagtatcgactccaatcgtcaccgcatctgaatctccggtgacacaacctaacacagtcataacgccgtcgtctcaacctcaacctcaaacaccagcttcgtcgtacagagccatagctccgcttcatcgtcatcatcctcatcaaaatatctacactaaccctttaccgattaggcgttcgaattccgttactaattcgcctcatcagcctcctcacccagacccgtctagtctgatatacccgtttggttcttcgggtcgagggtttccgacccgacccgttagacagaattccaattccgtcgctgatccagttggtagtcctagtccaggtgggtatactcctcgagggccagt

SEQ ID NO: 19478 - DNA, 1189 bp, Arabidopsis thaliana landsberg
  unsure (1)..(1189): unsure at all n locations
ccacaaaaccatcttcaagggctatcctgttcatgtttcattgccgctaattccgagacaaaaacattacaaaaccctagttcagaaccttgttcttcactcggactctttggtcacaagacggctgagtaccaaaagacggagacgaaagacccaccaaaccctaatttcccatgtactatgtctttgtgcctaatggagaacacaagccgcaagagacgtgctgtggaacaaaggaagcgtagtggtggagtcaagaaagcaaatgttgctcctttttcacaaacggcgagagagacacctgagtggcttgtcaatgtgatgacaaacatgaaagaagccaaagacgctaaattgatctttgagaagactctgttcgtgactgatgtaaacccaacacagaaccgtctctcaatgcctttcaacaacttactccgaaacgatttcctgacgtctgtggagtccataatcataaacgaagacatcaacaacaataacaagattggagtgggagcgattctcgtggatcaacggtgtaaaaagtggggtgtgatgttaaagagatgggagatgaagaaggaatcaggtaaaggaagctggagttacaatttgatttgtgggtggaacgacatcgttgaggctaacagattgaaagaaggcgacaacattactctttggtcgtttaggtgctgtggaatcctctgctttgccatggaacagagtagctcttcccttgctctctgtctctgctaagtttcttgtgtcggttgagactataacttgattgatcaacacgcacagcgatctaatttcaggagattctggacttcttttttgtctaagagtttgattaagaaaattagtgttccttattagtaacttgttccatatattgtttcagatcattataaccgtatgtactatagtatgaaaacttagcatttttgacatgaatcttgtttgttgtttggtctactttagttactgcattgttacctttcgattccttgtaatatatctccaagtcttattttgtctaatgaaattgatccaatcaataaaagtgtttttaatacattcattagaaatgctcgatacaatcaaaacctgtgttttgttctactcagtaagaatctgattntgaaactcaagtatgaagagcaaaatgatcaaatcaggaaccaaattt

SEQ ID NO: 19479 - DNA, 479 bp, Arabidopsis thaliana landsberg
ctaccagctttctctccacagaaccattcctcatttattttttaactttcttcactaacgcagccaggatattccctcaacttatgtaaatatctataaaccttgttttctcggcccgtggcagcacttaccttcaacaaagccgatatctctgcctcctccaatgcaataccttcagcttccatgtgctcttctacctcataacccttttcagcctccaacttctcacagaaacagagcaaagccggcgcataggtcctcagacggggaatcgacacaccaccaacagaaacaaagtccttaacaaccttgaaagcatgatcaccatcacctttagcagcagccagcctagccactgaagtaacagatgcctcattaggacttatccccgaactaaccatacgatcaaaaatctcgaaaccacggtcaatggcaaggggtttgaagagatgtgtcactaatggaaagtgagcataggt

SEQ ID NO: 19480 - DNA, 808 bp, Arabidopsis thaliana landsberg
gaatgacccaatgaattgctttcactaaaccctgaaatagatgatagaaagaagatataattaaacaaggcaatcgaaagttgaaactaactaaattaagttagtaaaacttacactttgtttgtctgatattattgctacgtttcttccatcttgaagatccaaagttcttgatagcatccttacaaaccaatcccagttgtcatcattctcaatctctacaactgcccaagctattggtactattctattatctccatctcttccagtagcagccaataaatgtccctttatgtcccatttaaggaatgcaccatttattcctataataggcctacatgtttgcttccaagactctttttgtgacttaaaacagatgaaaagacgaagaaacctttgtaagcttccaatggttggttcggggatagtctcaatctcaaaagttgtcccaggattgcttcgaaagatttcggcttgataatcccaaatccgtgcaaagtgctcttgatgagtagcttgtctttctctcataaccattgtcttcgccttcgaacattgatcttttgtcacagtgagtttatactctctcttgatctcatccaccatctcttgtttggttattttcggattctttctcaacctttccctgaataaccaagctattgttctttgcttcagcatctttgagtaacccgatctaacacacgaatgcccatctttgtataccttaacttgaatcttctgtttcttcttatcataggaacagtagcatctccattgacaattgacatcagtaacagtgcacttc

SEQ ID NO: 19481 - DNA, 757 bp, Arabidopsis thaliana landsberg
atgaatactaatgtagttgagttgataacacatgaatacacatgattttgcgttgatcttgatcatatattatcaatagcaagtaatcaacttacaacttacaattatacaacttgatcatgtgtatttattaacttaatcgagttgagatattatataaattaatatagaagttgaccaactattattttattattttgtaatgatcgtgaaacttgaagctagagaaagttgatttaagaaaaaatctcaaatcagagggtcgaccctgagattttagaggccacacaccgactcctgacgaaccggctccttgacgaaccggctccctgacaaaccagctccctgacgaaccgcctcctgacgaaccagctccctgacgaaccgcctcctgacgaaccagctccctgacgaaccagctccctgacgaaccagcttcctaacgaaccgactccttgacgaaccgcctcctgacaaaccaagcttgtgacaatctacaccgaataaatggtctagccgaaccaagctctccatgccatgttaatctcttcgaaagactccctcaccattacgtgacaagtcaagactccctcgtcgtgatgagccaacattctcaccattactagccaacgtcttttcctctagctaaaccatcccgcacaacaaagtcgtctcgcaaagtataatcatcaagtaaaacatagccatcccgccaagtagagccatatctccaaacgaagtcgtatcgccaaaccct

SEQ ID NO: 19482 - DNA, 630 bp, Arabidopsis thaliana landsberg
ttgtgtccctgttggacggtcaacggatccgcttatagtgcggtccgttatacaaagttcaaaccctaagaccgagggatggagtatctttatgttccaacggtccagaatcatcaagggttctctaatattcaaacttttgttaccaacgtttgaccgtccgttatttttaagtgaaagcaaaagttaaaacattcgcaaccgaatctcattgcttccaaaaacttaaaacccgaaatatgataaccttttaatattttggctttccactaggcattaatttgtaaagtcatttgttgtctttaaatttttcaaaaactcagataaaatgcacttgttgtaactttgttttttttggtaaatatattttgcattcattcaaaaaaaatatatataacagagtttatttgataaaatctcacaaaaagccagtgaaaagggaaaaacaatcatatgaaactaagtaatcaatatcctcgtacggtgtcgaatcttttattcattactcaagcctctcgctaaatgcttaagaaattaccatgaagacgtaggatagctattttaatgatctgacggatcatcgcctatgtaaccttccgatagtcaacgcatctaaccaaaactgccatt

SEQ ID NO: 19483 - DNA, 564 bp, Arabidopsis thaliana landsberg
agttaactccgttagttttctattaacgaaaatttcacggcatgtattaaatggccaaatcaactaaatttagccattcttttagaagtcaaccaaactttaggatttaaatgagatttcaaaagttcatgtttttcgtcccaaatttgatagttgacgcatttttctacattttccccataataaaccctagaactagatcttaagtctataagtaattaaattcaaattgatggagagtttgatagtttccaatatttagagaaaacaaattggatgtaattcgacaagtaaattaatgcaagtatttagaaaaaaaatgtatagaaagtccataaacatttcatgaaaataatgtaactttattgtaaattacactgtaaatcaaatatataaacaaagtccatattttttgttcgaatttgttctaactttttaagttataaatttaaaatgggtcaaaattaattattaacataattttttgtcgaatttgttctaacttttcaaagttttaaatttaaaaatggtcaaaattattaacatgattttttttttctaaac

SEQ ID NO: 19484 - DNA, 1530 bp, Arabidopsis thaliana landsberg
ggaggcagtgatgttggccggactggcctttaagagttagtgttagaacaagcgtaaggccctagggcggccttatgatagacctaatattgtaaccggagccaataatcaggtaaaccaaaacaaaaattgattaaattttaaaccggtttaggtctatgtttacattgactcaatttccggttcaatacaggtttgcttggagaaatttgcaaggtattttgaagtggagcttaaggaagtgaagctgagagaaggatattacgtgatggaccctgacaaagcggttgaaatggtagacgaaaacactatatgcgtcgtggccatcctcggttcgacactaaccggacaattcgaagacgttaagctcctcaacgaccttttagtcgagaaaaacaagaaaaccgggtaattgaatcaaaaccaactaacaaattaattttatatacttttgcctagaaatattacaatttctaatgtgagatatatttgcttagaaaatattttattttttgaatgaatataaaacttattaaccaaaacaaaaccatatatgtttacattatatgcttccttgtatcgaatggtgttttaaatactgattaaaaaatgttttgcttaaaaatataacaatttataatgtgagatattcaagcattctaatatcaaaccgataaacaacaacaaactgattattaatttatttaaccggtttggttccggtttaatatatttgtagatgggatacgccgattcacgtggacgcagcgagtggtgggtttattgctcccttcttgtatccggacttggagtgggatttccggttaccgttggttaagagcataaatgtgagtggtcacaaatacggtttggtttacgccggtatcggttgggtcgtatggagaaccaaaaccgatttgcctgatgaacttatcttccatatcaattatcttggagctgatcaacccacatttaccctcaacttctctaaaggtacattaccatatcttatgtaaagtttagatatatttatagattaatgttttgttaattcttgtatattaccagggtcaagtcaagtgattgctcagtactaccagttgattcgtcttggatcctaggtaaataataactcaataaagaaactaaaacgttactaaatccaatcgtatacgtactagtataatatacaagttgtattatactttatgactacaaaaggtcaaaaccaagaatgtactatactttgaattaaacgttcctaacatgactagttttggtattgtgtaattaataatgtttttcttgtttgatttagggttatcgcaatgtgatggataattgtcgggaaaacatgatggtactaagacaaggattagagaaaacgggacgttttaaaatcgtctccaaagaaaacggtgttccgttagtggcgttttctctcaaagatagtagccgccacaacgagttcgaggtggcccatacactccgtcgcttcggctggatcgctccggcctacacgatgcctgc

SEQ ID NO: 19485 - DNA, 600 bp, Arabidopsis thaliana landsberg
cacaacgaaagcttcttgatgagcttggtattgtagctgaagatgtaccagtcgatgagttcactcccttgggacgtatgctgtacaaggctccttctgatggcaaatggggagagcatgaacgtaaataccatttctcaagactcttggttccctttttcttgaacagaataataaaaccttaagcttcttctgtgttggccttccttttgcagttgattacttgctcttcattgtgcgagacgtgaaggttcaaccaaacccagatgaagtagctgagatcaagtatgtgagccgggaagagctgaaggagctggtgaagaaagcagatgcaggtgaggaaggtttgaaactgtcaccatggttcagattggtggtggacaatttcttgatgaagtggtgggatcatgttgagaaaggaactttggttgaagctatagacatgaaaaccatccacaaactctgaacatctttttttaaagtttttaaatcaatcaactttctcttcatcatttttatcttttcgatgataataatttgggatatgggagacacttataaaacttccaagcacccaggcaataaaaagtgttgttttat

SEQ ID NO: 19486 - DNA, 525 bp, Arabidopsis thaliana landsberg
tggatcttgtacatttaattattttcttcattgattgatatatgtctatttttaatatttttgaattatatatacatgaaaaaaatctaatcctttattaactatatgtattttatatatgataaaaataaattagatataagaaaaataagtgaaaaaagaatcatatatatatatatatagttatatatatttaatgtatatagatagattttaaaaaaatagcaattaattgcatgtagttaaatagtataatatttaattaaggatataaatctagcataatattttttgagatagattttatagagagtaaaaactaaatactatttattttagagatttttggaccaaaatctttaccataaaagtatatgtagatatattaatatttatatatttatgtttcttgatgtaattatgtattatttcttttttagttttcttattttaaaacagacattcggtctatttaaagacatcatgttctgcttcaaacatcaaacaaactcaatttaaagataa

SEQ ID NO: 19487 - DNA, 366 bp, Arabidopsis thaliana landsberg
aggattgatcttaagaggatgagccatggtcaagctcactcctacaacagcctggtccatgttaattttctcttctgaggttctccactcaaaaccctgcaccatcactccaattgcagttcccataatgacataagctagattttctccgggacaacttcttcttccgcttccaaaaggaaggtacttaatttctttctctcttctctcctcctcttgttctgctcttgaagaagctaagaacctctctggcttaaacacaagaggatcttcccaagcatcaggatccctcatcacagcataaacgttaacaacgactgacgtgttctctggaacatagaaccctctgatcctacacccttcttt

SEQ ID NO: 19488 - DNA, 5185 bp, Arabidopsis thaliana landsberg
agttttgttagaacaaactctcccccccctgccccgcaaactaaggacagggagcagcatgtctctatacaacctcccaacggataactgtcctccgctcaacctggcttacccctccaagcaggtccttctgagatctgccaacgagttggccaagctccgcacaatgatcataaacctgatcaacataagcaaaaaccaagaaatcgtgcaccacaatagtagggcaatagttggctaagctccgcgcaatctactcgcgcggggcatgagatatagcgcgatatcgcgggcaaggaaactcctccccaggaaactgagatcccttcccagatctccatagatttgacaggagctgcttccctgacagatcccactccaaggactcgtttagacttcgcctcgatagaggtctaaccccctcttaagcggaaggtcaccttcgtaccagcacctatgcacatcgaaaacccaataatagggaccaagacacgtacaacggctgttttcccaaggctactgataataggtttttagtcagttatcctaaaacaccaatcatgtcgttgtagtattttaggttgtcaatccaaatgagtgtgatgctaataatcaagatgcaatcagagttcacagagtcaagccaagcaataacaggtttgggtgtgttctagcagccctaagtgaacattcagaaaacagaagtttaagcagaacagtaaaaacactcgaccaacacagcttgttgccaagcactgggtgtggtcgagtaaacagcagagacagtgacaaagatactcggctgcacagtctgttaccagacaactgggtatggtcgagtatcagagtgataacaggagagaaatgcaaaaactaagcaacatgtaacaagatgcagtaaacaacagcagagtaaacaaagaaatcaattagataaagaattctcgaggatgggataatcgagtaggtttgtttactggtgattgacatgctcaataaattatccctagacaacaagttcgataaccaaatctaagtgccaccacaatagagaccctcaagttaaaccagtcccaaactcaatcaccattgacaagagctaacctaacaggcattacgaatcaacaagttaaagccaaaacgctctatgtaaccaataccttgatacagagccacgaatctctagaattagtggttcagacatttcatcgaacaccttttgggtgcagaaatgtctaggctcaaattccagccgatcagaaaaagcaataggcattaagaacaactaatccagaagggatctatcaatcaatactcaatcacctagcatactgagaattctacactactctaacccatcctcagaaacctattcgctactcagacatcatgacagaaagcataaacgttgaacaggttgaagacatgataacagcagtatgataacagaatgaataacagtaaacgaaaatcaagaacagaaactgaatattgaatactgaatagataaagagaaatccggattacaaaaagtctagaacacaaggtctgcggaaataaaaactaggtaaaaaaaactctcttgcgaaaatgagaagtacatactacttatagccaaatatcccgaaaccctaatactcaaaacgacgaagtatttggacgggttaagaactgtactcgaccaacgtggtcgagtgagagctcgagtgaatagctggagtcttcttttcttccttgtactcgagtgtctggttgagtgcggaatgaagaaggctctgaagcttgtcatcgagtatgcagtcgagtggtgtgatggcgatactcgacctctaggtagagtgaagaggtcgagtggttgtctggtgatggaggtgaagacactcgacctcatggtcgagtgaagtgatcgagtgatggagacgagggcactcgacctcggggtcgagtggtgaagtgaagtagtgatgtcctctactcgacctggtggtcgagtggtctcttgaggtcttgaagctcctactcgacctctgggtcgagtggtttgtcatgatcaggtccgcttcttccagatagctcgtcaacagctccaaatcacctgaaatcaacgcaaatatgcaacacgcatgcaaactatcctaaacatgcaaagtgatgacaaatgatgtgaaatggtataaaacagtgatgatattatgctaaagtgatgacaaatggatgctcaaaacatgcaaaatacacacttatcagttagtgttttggagtcaaatatgacaagatatcaagtgtatggttgagcataagaactagaaccgcatcaggttcccaaaagcttaagtagtgtttccttgttataaaaaaacaaagccaaagactcatacagaatttggctacaccatcaaagctttgagaagcaataagaagactagttagtgttttgaagtcaaatatgactagatgctttgtgtatcaatgagtataagaactaaaaccgcaaccggattccggaagctaaagtatagtttccttgttagaagatacaaagccaaagactcatacagacttctgctacaccatcaaagctttgagaagcaataaggagcttggttagtgttttggagtgaaatatgacaatatgtcacgtgtatgatgtagtataatgatatgtctaaaatttgcatgttttcagtgtccattcatcatcgttttgagtccagtttcgtatcattcatcactgttttatatcatttctcatcattcttgcatactttgcatgattaggatagctttgcatacatattgcatttctaagttgttttcaggtgatttggagctgtttgcgagcaaattggaagaaacgagtcagaaacagaagacatactcgacccccaggtagagtgactttggagccattcttcccacatactcgacccccaggtcgagtgactttggagccattcttcccatccactcgaccaccaggtcgagtaacctcagctcaggccactcgatgacaatactcgaccccctggtcgagtatcacttcgccacaccatcaccatcactcgaccattcgctctaccaagttactcgaccccctggtcgagtatcaacactcaccaccataagcatcactcgaccggacactcgatcacgtcttcacagtctactcaaatccgcactcaaccagacaagctgagcacaaggaagagaagaggagaagacaaagtgtttggaagcggcctggacctccatcggatcacgaagcccatctcggcccattatctctctatgggccgagcgattaggttattggcccgtctactatcattttatttcgttttgtataaatagatgtcttagggttctgtcctcagatatccggtcgacattgagtttttttgcttcagttttattttctgttttactctactgcgccggttttgcttctgcaacctgtaattcgagatttttccaagttattcagattccgcatttgatttcatctgtcatcttgtttctctactctttatctctttacttatgcaatattatcgtttatctgcgtttatgtctttgagcatgttgtctgagtagtgactttgaattcttagggatgggatagagtagttgtggaatccgtagtctgtagaatggttaagttttagaattgattaaatccctttaggactagttgcgtttactgcttgtttctttctgatcaactggaattcgatctcaagcattcgcgcacccagaaggtgttcgatggaatgcttgatccactagttcctgagatatgcgtctctatcccaagggattggccgtttagagtgtttattgactttatcagtctgttcttattgcctgcatagttagattccgttaatgcgaattagtctgggctagctttgcttaaggatttctatcacgggagtgaattgatctgttgttgaacctgttgtcaagggataacttgattgcgcttgttaaccattcgaataggctaggataccactctactcgattaccccatccttaggaatttctcgtctatcttatttctctgttttatcgttatcgcttgatcgttctcattgcctgtttcttagtttttacaatgactcgaccaacttactcgaccacacccagtgtctagcaacagactgtgcagtcgagtatatatgtttcatatcctgcctgttactcgaccacatcctacttctggcattagcctgttgtggtcgagtgattttagtaattttgttattgtttctgttttctgcatgttcacttaggactgttagaaaccccaaaacttttattgcttggcttgacttattgacttctgatcacatctcatttgtttgcatcacactcatttggattgacacctaaaatactacaatggcatgattggtgttttgggagaattgactaaaatcctattatcaaagctaatgatgctggatgtgctaaaaatgaaacattgttatggaaaaaccatactgagcagtttgcacaatggcttaaaataaaggtttccagctgcagcttgtcttcttgattatttgttatacagcttgttaaattatattgactgattaccttgttaccttcatgctaatgattagattgttagcttattgcttagcttgatgactgattttcgtggcacagattgttagcttcatgatcatgttttgcttaatgactggttagcttattgcttagcttgatgacactttttcctggcacagattgttagttttatgataatgttttgcttgatgaatggttagcttatcttgaagcttgatgactggttttcttagcacatattgttagcttattgcttagcttgatgactggttttcttggcacagattgttagcttcatgatcatgtttttcttaatgactggttaccttattgcttagcttcatgatcattttagtacttcagcttgatgatcaagttttgattttactgtggcagattcattcagattcaataaatattcattctaaggagacaaggtggttggcatttggaccaacaaatgttgccttagcacataaaggatttatcgttaatgggcaacagtttcatatagatgcgaataagcagaagacacataacagtggagtaacttatgaagcatttatcatgtgtagatctagtgttc

SEQ ID NO: 19489 - DNA, 531 bp, Arabidopsis thaliana landsberg
  unsure (1)..(531): unsure at all n locations
gaggaatcgttacccggagaaggaggcagctttggtaagtcatgtaaacaactattcaaggaaacacctcncttatgcctatcgaaacgcgcaacgcctgtggctactcttcttttcacacccaaaggacgcaatgtaaggtttttcttaaccttaatggaagagtctctactctctacaggagctgagggagaaaggttcatcaatggtattgaattgcaacgggatgacgactgagaagggctcaacgggggcaaggaaaagaaggcaaatgaaggctgagtcatataccgtggtccggaaggagaagtgatattgtccgatccattcattgtttggattgaagaagaccaacaatggagtataaatctgcatcatataaaacgatcactggctgagtcatgtttctacgtataactcatttttcttacattgaaaaaatgaaaattaaacttaaacataaaaaaaaaaatagtaattaacaatcatatacaaaaattggaataaataacaattaaaatgatcaaagac

SEQ ID NO: 19490 - DNA, 1116 bp, Arabidopsis thaliana landsberg
gttgtttggtaaataatagccggcgtaaactgagatatgtggattctgtaatttcggattatggatttctgagataagtttggaaactttgttattgaaagaaaaagcaggggaccattgtttgagatgcatctagtataacagtgttatacgatacctctcacagaaaaaatttgtcaatcctttaaataacacgttattcaattaccataaataataactagccaaaatacatctttttactcctaaatttactaaaggaaacctggttacgcccgtaaatgtttaaatattttttatatctttatttatttaaattttggatatatttttaattaatataaagaaatactctacattagcacataattgacccttgtttttatatatttacaattcacatattttatttacaatccgtatttgatttatactaacttgaatagttctaaagtttgtatgaaacggtaaaataaattttgaaaaatataagaaagttgaagaagcattataactttgtacgacaaattgtaaaacttgtatttctaaaacattgggagaatctgaataatatatatgttactaaataacttagactatataatttgacgttttacatttttgttgactgtatagtttatgaataaaaaatgacatgacaaaaaaaaactaatacaaatgagaattaaaacaagtcttctttcattaaaatttgcatcatttctcgtacagtttttatataattcactgtcttccggcgctggtgtagctgttgctcgccggcatcggacgatgtcttctctttgttgctccgctcttctcccaaagaattaaaacaagtctcatctcaatcttttcaagcctttagtccatcatctccgtctccttccatcttcaatcttgccgttgcgtcttctcgattgcaaatctgttagaatcttttctctgaagttcattggctcaccaggccgacgtgctccgcctccttctggaagaaccagcaactacttcgttaccggctcattttttcgatttttccctagcaacgcgtttcatctttaccggtggttgttgtttccgtgacctatcttttcgagatctctggccttattgatc

SEQ ID NO: 19491 - DNA, 2154 bp, Arabidopsis thaliana landsberg
taaatacaaataaggctgcgtcatagaggattgctcccatcggatctcaaatgtggtttctactacttacacttctgactcatgcttaggctccgaacacaaaacttcgaatcttaaaattaatagccttagatgtggctattcattcagtaaaacttttatttttaaatataacaatgtccctccaactataagatccaacggctgatatcattctaaacctttacagctaaatctgaatctccaccgtgcgaatcatcaactaccttcttcttcgtcttcacctcactcagacctcaatccccaccgaaaaagattaaaactcacactatctctctctctctctagaaaaagaaagaaagaagaaaaacttattgttattcccatttcgcccctatccgaaaaatggttgaagctcaatcatggacaacgcggcggatgagcaatcctagattcgacgccgccgcaaccgccgcaccaaccatcgtagacatccccggaacaccaccacactcctccgcttcttcaccactcaaacccttcttcctctcttcccccaccgtatcaccaacaatcctcacggcggctataatcgccgcctggtttggctcaaatataggagtcctcctcttaaacaaataccttctcttctactacggtttccgttacccaatcttcctcaccatgacacacatgttatcatgcgccgcctatagctccgccgtaatcaatatcgccggaatcgtgccacgtcagcacatcttatctcgccgtcagtttctaaagatcctctctttgtcagcgatcttttgtctctccgtcgtctgtggcaacacttcgctacgttatatccctgtttcttttaatcaagctattggagctacgacgccgtttttcaccgccgtgttctcttttctcattacttgtaaaacagagtccactgaagtttatttagctcttcttccggttgtctccggcatcgttcttgcttctaactctgaaccttcttttcatctttttggtttccttatctgtgttgcttccaccgccggtagagctctcaaatccgtcgtccaggtattaatcggtttggtgtattgaattttccgttttagtactaagagaatcagaaattgcgttcgaatttcgattttattacaaaacatcactcttaaatttttccgaatccaggtttattataacaaatctggaagaaatttagttccagttcgaatccggtttttattcttagaactgaaatgagtccggtttagttcagtctctgtctgaatttcaatctatagcatttaaacagataattcagattctaatcgatcggtatgatcgaattgcgtctattggatctcactattggtttggttgaaccggattttgtgtattttgtaggggattattctgacgtcggaatcggagaagctacattctatgaatcttttgctatacatggctccaatggcggcttgtatcttactaccatttacgctatacattgaaggaaacgttttaagagttctaatcgagaaagcgaggacggatccattgatcatcttcttgttagccgggaatgcgacagtggcatatttagtgaatttgacgaatttcttggtgacaaagcatacaagtgctctcacattgcaggttttggggaacggaaaagctgcggtggctgccggagtctcggttttgatatttaggaatccggtgacggtgatgggaatagccggatttggtgtgacgattatgggtgtggttctctatagcgaagctaggaagagatccaaattgctaaaccagaagtgaaaagtgtgaagagaaagattattggatttaaaccggtgaagtaatttttactttttaatttttacttcttttttttcggtttagtttcttgattctttggaattctgctattgtttggaaccggtttggttcgttttgagagggggaaaatcaatttaattgtaaatggttgagattggagaaaaactatgaaaagaaaagtggagatatatttatgtaacaaaagtgaaacaagtagggagcacaattaaaggaaataagattgtatctttataattattttactttcttttagttttttcttttcttgtactattatgttttatagttctg

SEQ ID NO: 19492 - DNA, 1285 bp, Arabidopsis thaliana landsberg
gatggtccggagagactttctagtggaagttcaaaactggatgtggaagtcagcaatggtgctctctcttgggatgactcttcacccatcccgacgctgaaagacataagtttcacaatccctcatgggatgaacatcgctatatgtggtactgttggttcagggaaatcaagcttactctcgtccatactaggtgaagttcccaaaatatctggaaatcttaaggtttgtggaagaaaggcatacattgcacagtcgccttggatccagagtggcaaagtcgaagagaacattctgtttggtaagcccatgcaaagagaatggtaccaaagggtgcttgaagcgtgttctttgaataaggacttggaggtatttccgttccgtgatcagacagttattggagaaaggggtatcaatcttagcggtggacagaagcaacggatacagattgcacgtgctctttaccaagacgcagatatctatctgtttgatgacccttttagtgcagtagacgctcatactggatcacatctcttcaaggtaataatcattttccctttttctgattatcttgacttgaagtatatagactcttaccttttactttttgctggcttctgctatgcatattgatatgatctcttacgcttatcgtttctgttacaggaagtcctgctggggcttctgagaaacaagacagtcatatatgtcactcatcaacttgaattcctgcctgaagctgatcttatactggtttgggcttcttcgctctaccatctttccaatgcgttatctaattacatatttattatatcagataatcatttttgtaggtcatgaaagatgggaggatcacgcaagcagggaagtacaatgaaattcttgaatcaggaacagatttcatggaacttgtaggagctcacactgatgccttagctgcagttgattcatatgaaaaaggatctgcttcagcacaatcaacaacaagcaaagaaagcaaagtttccaacgatgaagaaaaacaagaggaagatttgcctagcccgaaaggacaactagttcaagaagaagagcgggagaaaggcaaagttgggttcactgtataccaaaagtatatgaaattggcgtatggaggagcacttgtgcctattatattggttgtacagattctctttcaggttctaaacatcgggagcaactattggatggcttgggtaactcctgtttctaggatgtgaaacctccagtgagtggctctacattgattctagtctatgtatttcta

SEQ ID NO: 19493 - DNA, 849 bp, Arabidopsis thaliana landsberg
  unsure (1)..(849): unsure at all n locations
atggaaaagtgatctcccaaatgttacattcaatctgattgtgatgatctccttttcatagcatgtttatgtttcttgtaaaattgtgttaaaacgacttgtgtgtcaatttttgcaggttaattggtattataaagccatggttcttgatgggcttgtatcttcaccgtcaaggagacaacaatgtctaaagaagcagtgggacgagttgggtagctggtcgactcttattcagaggcatcaatatctcttaacagctttggctcttttggctttcctctgtactgtttatctttactttgcagtcactttaggcgctaggcactcgtcctgctatggcttgaccgggaaagacaaggcaatgtgtcaattacaacttgttcaagctctctccaaagggaaacttaaattcttctagactgtttatctatcggtgaaagtttgaaacccccacatttattgttcttgtactaaaacattctttttcttctttattctataatgcaatttatgtgtattattacatggtgaaataaaaccagagattcataattgaaagataactttatttcatcagatgagatgagagtatacatgtgcactgttttgagtcggatcgtcacctccggttgtatgtcaagcctctattaggcgctcttattagagctcatgcgtttctgtatatttgggaattcttaccagcggaatgatgatagcagcgggatataacttctactacctacacaggtcgagactctgaaactgaaaccataatgcttgaagtcaaacattttctgacacatcgttgactcctagacaagtnnagtttttcagtcatcaaataataca

SEQ ID NO: 19494 - DNA, 909 bp, Arabidopsis thaliana landsberg
atggtgtcgaggggcggatatcaacaatcttctgcttcccattgatcatggacagcatagctattgtcatgacaatgctatacttaaaaaaatgacaagagtgcctttttttatttatattacttttaatgacaatagtgactttataattacttttttcttttgatcacatttaaaataattatatatatgtcaaaagaatatgagttacctttgtaaatattatgaaagattcgtgagatgcaaatgatccataacatggcatgttgaaacaagagtgagacatggattatgatgacaagaataaaagaaccttgtctgtcgtatttgcttagctactttcccggcctggtgaaggcaatttaaattgactataattattatcatcataaacgtcatgttagtataactctgaattcttgagcaagaaatttgacccaatgttaactctttgaaataccgttatttatataacttttacccaaaaaaattagaatcataaaattaacccatgcatgcatacctagttgattgcacaacgttcaaactaaaaatgtttataacgcccatagaaaaaactctcagtaaccctccacatacacatatcacatacatcggaattcacgatatgcgattgtaacgtctctaaaaattactcttttcacagtcgcgcgacaggaaaaaattcactgccaccaaggcaaacaacgttatcgaactttcgatagactaagaccatgaatggtaacatagaccgcacccaaaaccgcaccgcaacagtactgtaacagtattaaaatctctacatatatatgtatttatgtctttttgttactatttgacatagatcttcttatcttttattgttgatgtcggctgattgtgcgactagaaaaagagcactcccag

SEQ ID NO: 19495 - DNA, 3206 bp, Arabidopsis thaliana landsberg
gttacatatatagagtcatcatacaacaaacggagcctttgctatgataagttaatgtatattaaaaaaaacaattatcattgcaatttgcaaatgcgaaaacgtaagtttatattttctttttttgtcaacgtattattaattcatgaaaaccaatattcgtgaactttagcttgttcactttttaactttatctttagtgaaaaactaaggaatatatttatattcctatcaaaaaatttgcaatgttttaaccattctaaagagtttattacataaacatagtttgtaaaaagcttctctactcactgtaaaggactttggaggtgggtgaagaatcttctttccttagcatcgttgcgccattatatataaatgtatatatattgcaagtgaatctaaattcatttttttcttacagtaaaaactattcgataacaccaaaacacattaaaatgaaaattctaacaaaatgcgatatgtccattaataaagctaaactactaacgttgacaacaacaaaagaaaactaaacacaatccacaaataacgaaatcaagcaacgcataaactttagtaaatgactaggtgagtacccacgctacgaatgggttgttatttgaaatttgtttaaaaataattatgtttaattatttttattgctaatttatgttattttcgtagttaataaagttatattcattttatgtaatatatttgtatagttagattcacttttgattcaaatatcaattatattttttttcatgtataaatcattttatctatatacccaagtttctaattttttaactattattaaatacttacatcaacaatatgatacaatgctacttatttggtttgaaagttgcctaacttgattctaagcaaacaatttcttgttccatatattctctcctaatctaatatttcaatcacatcatgataggctcatggctaaatattggattgacataatttgaataacaaatatataaactactcatttgctttaaaagttttcacatgaaagagaaaaaaaaacataaattaaatagtcttttgagtcaacacttttaggtttctctctgtgcatttgcatatatccatattagagaaagcgtcgtataataaactttttggtatatctaacgtctcaaaatatcagtacttaaaaaatatgcatgtcactattattgttaccaatttatcataaacacacaaaaagaccatatcatgtaaacaattaatgtaataaaaagaaaaaactaagttaaaattactaaattaagaaaggttaagcagcaaacagttaagttgtaatacacgaaaatttctagtcattatcaaatgatgactattataaaaatagcaaaaataagaaaagtaaaatgagagtagtgtttgatacattaacatgattttttgtattttttcttttaaatgaagatattttgttaagagtgagattagtggatgatttaatgcaatgtgaaacttttaaatttttatcactaagttttgttatactttaatgatattaatttagaatgacatgtggcacttattggtgtgatgatgtgtcacccatatggagagagttggccaactttcatatatatgattttattgtatgagtttgaattgaatgttgttgacttgttgtaaactattcacgaaagttattagtctgcttacattttacattacccgacgacttcaacgtgatcacacacgatcatatttatcttgccttgcctcggtgcagcttcggttcgggactacaatttctccctattttcttaactctttttttagtgaacaattcttggatctacttttaggagtgaaccattgtagtcaccccttttagtttaattaaatcattatgccatatcatacaacacaaaaatagacatgtttacatacacaaaacaaaagtttcacaaaaaaacaaaaagagcaagacatgaaatatttttgtactcaacgaacaaagatcaatagtctaacttaagtttttgtatgtttgtggttaatcaatggcaaatgtgttaatattttatcatgcatactcaactttttctgataaaccataagttaatataatacatgcaatttttatgttaatactagttttaacaataatcctaaagacaacatatcgttacctctctttttttttttatatatattccacacaatttaaggtctagtgttaagtgttagagtacatatatagaattaatgtaacaagtatcgttgatataattagagtttatagagaaacaagagaagactaaacaaaaacagtgtgatttctgttacagactaattatcatcatcgactcaatgttagctgtcatgaatttgacttattccttctatgatctggattgatacaacgaaatcaatcttcttttatcatcaggtaaaaaagaaagcaaacttggtaataaagaagtccaaataaacgaactataacatatggcagacaaaaccatgagcggcataattgatattagtgtttaaagtaaacaaagactaacgacgtgcccactattcatttttattaatatagagatttgtcaacgtcaatatcgatgtataagatagtgtatcaagttgcattgatataattagagtacatagaggaacaactatattgatgaaccaaagtgatattacccccaaatattaatttacattctctccatctctgcaaaccgcaaaaatcatggtagagagagcattttgggacgattacaagttagacggacatgagcaccttatatcttacgttaaccatcgtgatggtttggaatacgatgcttgcgatcgattgtgagacgcattggttattactttgtgagttattagcgactacacagtcacaatggacgcaaaatcgttccatatttacaacggatatacatacatagtaagtaaataatcttatataatcgattattttacgactaaaaaaactcgcaatttaattagaatgtaagaagacacggagagcgaccctcaccaacaggaaaaatggtcaaactgattgataaaaatgttagaaaccggttgagtactctacggcaagagaaggtagataagaatgtgggaggactccaagtgtggttcgcatcgagataacaatgagaatataggaattcataattatgctaataaaagtgtgcattgtg

SEQ ID NO: 19496 - DNA, 464 bp, Arabidopsis thaliana landsberg
aacctcataacttgctcttcaaactctgttggtgcaacacccttatccttgtggatcttgttctgacccgaatacatcttcacagatctacaacagtaacaagataaaagacacaataattagccaatcatttttggtaacaaaggtaactttcatgattgtgacatagcaaacggtatttcaacttgtaactaaatccacaaatttgatcaatttcccgagaaattaggtccgtcatcaactgcaaattgcaattaactgatctttaaaaatacagtgcccgggccactaaaataactcctattggttatattagctgtgagcggcccaatcctttaatttttcatttcagaaacattaaccccgttaatgagggcttattatcggagaaagattattagaccctataagaagtggtattttgccgcttggggaaattaatcgagtgatccggggatgaaaaa

SEQ ID NO: 19497 - DNA, 631 bp, Arabidopsis thaliana landsberg
tcttattagaaccaattaagtataggaacttttttttcattagaaaataaatcattacaatttaacccaaaacccaaaacacatgattatatgagttacataagaaagtaatatgaaaaataattgagtatataacttttttgtctaaattttgcaccgtaaattttgaaattcaaaaataaaattttagtaaatatttaatcaaatttaaagttaacatttttgaattgatactataagaaaaaagttactattgcttaaaaatatttagcaaataaaacaaagaacttcttaaaaaactaactattaatacatgaatagttcatatcttaaaaaatgtttatcctcttaatttagttttgaaattgaaaaaacaactaactattataagaattgatgcactaaataaatatacaaaatatatttatattggatatcaaatgtgtttttttgttatacaatatcaaataaaattaatatttttaatattaaaaattagttttaaatattttattggtcaatggcggagttagtcaaccagttaacctgagattatatgtttatgatgttgacgacatgacaccatataattcatatatgtggtcatgcagtccatatgtgtttggtagtt

SEQ ID NO: 19498 - DNA, 695 bp, Arabidopsis thaliana landsberg
catttgagagggattgagtgcaatccttgaccgaagtaggtcaccacaacgtagagtaggcattggcgaaccacgggataaaaatcactgtgtcttgtgtccatcttcatcgtgattggttttcttctaaagtttactttagcaacttggtcttaaattgactaacatctcataaccaagttcttgctatttagtattgaattttacagaatcacctattcacccctgatagcacctagagggaggggggtgaataggtgatcctgtaaaaacttaaaacttataaccacaaaacttggttaagtgttagtacaatgaaaacaagtggctaaggaccgagctcttgcaaaacacaatagttacagtgagaacaagcacaagagacacgatgatttatcctgtggttcggccaagtataacacttgcctactccacgttgtggcatcccaacggacgagagttgcactcaacccctctcaagtgatccaatgatcaacttgaataccacggtgttcttgcttttcttttcactatatctcgtttgcgaggaatctccacagcttggagcctctcgcccttacaaaagatgttcacaaagaatcacggagcaagggagggattagcaactcacacacgacacaaagatcacagcgaatacgcacacacaagacccagacttgagctcaggagactag

SEQ ID NO: 19499 - DNA, 461 bp, Arabidopsis thaliana landsberg
gcttcgctgggaaactcggcaaggtaaaagcttcatctggttttcattgaaatccgacgtaaaaccgagactaatatcaccctttgattttgcagctaatcctggaattcaactccgtcttctacagtcatgaagatcagctttctgacaaagatagcgaactcgacaacttcaggcgaagtgaagacgagaacgctcatacggtggagagggccagcagagtgttgaagcgtatgaaagacgttgaaccccggatccaggaactcgaggtgaacaacattgacctcatggcgaaactagaggtaggtaaaaatgcctatcttgctgcagccgacaacgagaaccaggcctgagctgaactcaacgtttgcgaggagaagctaaggaaacttgaagaggagcaggccgggaaaatatgacgtcgccaggaaggaagaaaggaagaaggtcaaagctcgatt

SEQ ID NO: 19500 - DNA, 854 bp, Arabidopsis thaliana landsberg
ggtgttgtaggtggacaacattagcaaagtgattttttcaaaactaatgaatgaatggaaattgatgcacgaacttgcggtgttgcgtgccatttatttgttaggttcaggtatgttttatgtgctttaacctttttggcaataggattgtaactggaatcttaacaaatcctataaatttttcaggggaccttctgcagcattttttgactgtcatatttgataggctgggcaagggagagtcatcaaatgatgattttgagttgaacataatcattcaggtaaccaaatttaatgaacttctttcttagagacacttctctcatctttatagtctccagtaaatagattcactgtttgttaactgtttgcttctgtatcactgttttctgttgccgtatatagtgtttatacaaacaaactaaatttgaaattgtacaatttacaggaatcaattagaaattcagctgataccatgctgttaagcagtcctgatgcattggtggtatctatttccagagaagggtgtttggacagagacaaagatgataagggtgacataatacccctttcttcaactcgtaaaagccgcgttaacagctttggaatagattgtctcgagtctctcaaattcacatacaaggtctagagaaacaacttagtcttccatccaattcgtactggtatatctcataggccacatctatgtgtatttgaagagctgaactgttttcttttttaaggtgccatggccacttgagcttattgccaatagtgaggccattaagaagtataagcaggtaaccctttctcatccagctaaccagtccaaaacagtttgttgttcctctatg

SEQ ID NO: 19501 - DNA, 475 bp, Arabidopsis thaliana landsberg
tgcctgcctctagaagatagcggatccctgaagaagttcagctgcttttcagcaagaacactctaggtttctcaaccctaaccacggtcaaccatagaacgttaaagagatttttgcttttcaaaaatagcttttgaatagagaggtttgagctttggcaaagaccaaccttctttttggatccccctttatagtacgacgattcctatactcaagttaaataaaataaaatgaagtaaactccttgagtcattggtgtctcatgtgtgatttctccatggcattgcttcataaggatcacaaacatctttgtctcaccttttgaagcaaactcaaatcaaaccctgtgacttgtaccatatcaccttatatgagttcaaatcatggcttcaagtcaccttactgatgcatcaacatgttgtaactcttcatagctgattagtcatcgacttagtgcaagtactctcttcttcac

SEQ ID NO: 19502 - DNA, 755 bp, Arabidopsis thaliana landsberg
acaacctctatccaacatcttattaaacgatgcctcaatcttagaatcaacaccagcatcagcaagttctccattgggaagatacaatggacaaatatctctaaccttatgaagaggcaaaccaagttgcctcgctaaaaccccaagcggattcccattaattccggtgagaacacttacaccaacatcagccattgcctcaacaccatcaccacctttcatcttccgagacttaacccgcccacccggtctatatataccttcaagaaccaaaaccctataccccattgacatcaactgtctagctgcaacctagccagctgaacccgtccctacaacgacaacattaggcggctctacgccatcaaacgacctcaatttcgcctctttaataaccggagcaagcccgaagttaatataaccatgctcaagaaggaaattgtaagcagtatcaactaaggttttgtgttcagcacgtatagactcaagcgcatggtctcgcgttaaccaattcgatacattagatcgccacagagcaataatgtgattccttacaacaatgtaattagcttgatctttacctccgatgatcgaaaccacattagcttcgatttcttcctccgtgagtgaataaaccggaaaccctaccgacattgcgattagcgcttctgaatccacctctttgccgacgctagtgcggcgatttcttgagaaagctgggtttgcgttaatctcggtgaagaaacgtttggtac

SEQ ID NO: 19503 - DNA, 659 bp, Arabidopsis thaliana landsberg
  unsure (1)..(659): unsure at all n locations
tgcagtttaaagcagcacatccaaactcattctcaatagatcaccagttgtagtagtagctatcacaagagagatgtaatttccaaagtgattcatcggcaatggtggattcattcttgatctattgccagcagcaagcctgcaagtagtttcttgatcatttggtagttttcttgctcttgtaatgcttctccatatcaatgcagtcagcgactgcaaagaagatatctttgttgttccgcattcttcattcgcctttgattttagtgatctcactgtttctgatgagaaatggaacattctctccttcaaaaccggacgttctgattgactaatggactcatcatgttcactgaagggaaggctgtacataggaccggacacttcacgaaagattggaggattcttcagacagagaaacttgttgttatcttcttgagaattgaaaatcttggacaaagagttgaagaagtgccagaaggaacttccatcttcaagcgaatgattcatatacaatcctatgaacactccatctaccaattctgttacctgttccattgtataaccagaaaaagattcagcattctttttttcactatgacacagtanaacactactacaataaatcattaagtaaagcaatttaacttttattacta

SEQ ID NO: 19504 - DNA, 2017 bp, Arabidopsis thaliana landsberg
aggtaaacaataaaattgcattaaaaaatgtagtgatttttttattttttaataagaattttctacttataatgtgaacaatactatgtggatacatacaatactatgtggatacatgctagtatgttagcaatgtgaacaatattcgtgataagttaaatattattttaatttattttatgattgttatatctcacctaaccattattttcgacatcaaacgaaaattaatgttatatattcctagtgtcatagtaaaagctttaagaaataatccacatttaataagatatacaaatcgtaatataccatataatcacgcaacactgatattaatcagcttagtatagttaacctatcagaaaattgatctctttataataaaattctatttctttatggtaataaggagccaaatcaattactaccaaaatatcggttatgccatatacagttaatttgtaattactctggttagattaggatattatcaaaatcaagattgactttgtccttctagcgatcattaactaattttactagagcataaccggctgggtcaaagaaatttgcttttattgcacaaaattctaaatttatttcaaaaacgttgttgtttgacgcttgtactaattatcaagctagtccgtacacatcgtctgatatacactcatttggttgataggagtatttttctcctagttctgggcgtttgggtatttggttcgggtttggatcagttttttcgggttcggatttttcggaactataatttttgaccccgttcgggtatttgaaaacttcggttcaggttcgatccggtacattttgggtttgggtaggtattggtacttccattgaaaatccaaaaagtaaccgaatattattcgatactagtttataactactataatatacccgaacatacttgatactaaccacatataccataaaacctgtaaatttgtaataaaaaaaaacttaaagtaaaatcaataaagcatgacataataaaagtttcatacgttcaagccaaaaagcaagattcaaaacatccaaataaaccattcaaatagaagaaagaagttcaaatcaaaagcaagacataaaaacatcgttcagaatcgaatccaaagcattcaaagtaaagaaagaagttaaaatccaaagcaacatccatacatgatagattctccatgacttgttcctgttacatcaaaaccaaataagctcagttgaaaaatgaaaaaccataataaatattaaaccataaaccaagtaaaaatgaattacgaaatgatcattgattcataagtctagtatattaacattgagccataaaccaagttcagaagtaaaagaaaacaaaatggagtgatgaggttaccttgtagtcgtttcgttgattagtcttttagtccaagttcacttcattttgaaactctgaaaaagattcaatcaacacccaagttgtgttagaacataagagagttttcaaacaacatctaaaactaaaactagtaaactacatagataaagttacctttctcaagcttatcaagtaattctatatcagcaagaagttgtgcatttgttagaaaagtgttttcactcagcttgatttcacttttcaaccactgctcaaggcaaaccaaagtctctaccatataatgagtaaggcagcttctacttggctccaaaagacgaccactggtgctaaaagcactttcagatgcgacagatgacacttgcattgcaagtacatctcttgcaatttctgataaaactggatacttctgactattgagtctccaccaagacaagacatcccactccattccaggaagagtcttaggattttctacctctgccttcagatagatatctaactcatctttaggatcagtaaccctaatttcattaaccatctctttataagacctgtccatcctttcaaactcaacattactatcttcagcttactcacatgcacaagtatctctggcagcagtagatg

SEQ ID NO: 19505 - DNA, 397 bp, Arabidopsis thaliana landsberg
  unsure (1)..(397): unsure at all n locations
agggctcgctctatctctaccatagcgacataactgtaaggaacagagcatcattaggctaagttgtcaaattttaaaaaaactgtggctcatgtgcccaattacttacccactgttgactttgacaaagtgtaggaaggcatagtagagatgctcttctctgtcgagcctgatgatgtgcattagagctgcaatgaactccccatagtctattgaaccattaccgtccgcatcagcctatacaaacacagaaaagatcaggtctctacatctttcgtaatggataaatagcacacacaagaaagaacagagttcttacagcttccattagcagcaggnnnnnnnnnnnnnnnnnccttggaccttgcatagcaagtccctgacttagttcctcaag

SEQ ID NO: 19506 - DNA, 538 bp, Arabidopsis thaliana landsberg
aagaactttgaatgtagtaaaaaaagactagagtatatcacattttatcaaggtgagaacctgtatctaaacaaatgatggataaaaacagccatctgcatcttagcaaactcagcccctacacaaagtctacgacctgcaccgaagggaatgaaagtcttggagacgatcgcgcccaaatcctttccctgaaaattttaatttattaaaagtttttaacacaacctatagctttgattagtgtaaatggagtgaataagtaaaatgatgaatatgaaattatagtcacctcccagcgccatggattaaatgcgtaagggtcttcgtatttttctgaattgaaatggatatgaggatatcccataaaggtccaaccagctggaattgtataatcaccaacttggaagtcatgttcaagtactctaagaactgttggtgctgtgcttatgattctaagcgactcattgataacctgaaccatatttgtattaaaaactatatatgtcaacatttataataaggaatgagttctcttttt

SEQ ID NO: 19507 - DNA, 1349 bp, Arabidopsis thaliana landsberg
aattttatattaacaaaattttaaattgataattgataactaatagttttatggttatgattgattgggctgtagaaattttttaaagccactaaaaaggctacagctcaaaattgaaacaatcatgttttaactttcctattttttcttacaaccccaataatattttttaaattattttggctgtaagtacaagtttttctaaagcacaagtttatggtctttagaagttctgtacattttttttctttttcttttcattttttttaattttctttaaaaacattactataattttcatatatatatatatatatatatatatataactcacattgtttttaatatatatatatatatatatatatatatatatatatatatatatatatatatatatatataaattaattaaatatatgtgtgagaataatattatataacacataagtgcaatttaccaataatattcttttgtttaaaaatacataaaacaaaatttttatttctacagccaatttctttgagtaataatattatattaataaaacctacagtctaatttctacagcaatagaacttcaagctacagccatcacacctacaacaaaaattctacagcaattaatatacagttacagacgaaacaatcacccacttagagtcctgaaatcagactgtaacatactccagttccagtttaccaaaaaagcttgtcctattcaccagactccgttaagacatacgaaattactttttcaccaagtaacatagcttaaaccattttgtttaacggaactaagcgactccattacaaagtactacacaaactttggagcaaagacaaaaccataacaccaactcaccaagtagactcatatatcatgaaacaaagaatgagcaaacaaacgaaaataccaaagaggcataataataaaaaagcatcaaacagctgcatgaaagaagagcttccagtccaggtcttatcactttccaattctgagaaaagtttctctcctttgctgccaagtgtttctcatgcgccttaccaagagccccgattagaaagaagacgataatcagaaatgttacccacatacgtttgttctttggactggttttcacagaattttcaacctgcaagtgaaaaatcagtctttttagacttgaaaactgactacaaagtaactctagtctagttttgtccttgaaaatcaagatctctaaacttacgtaaaaagttcagaaactgaagtctgagagaaagtgaaggatatttcttcttattctctctgaaacggtatatactaattggttttaggtttactcattttaatcgtctttctact

SEQ ID NO: 19508 - DNA, 1645 bp, Arabidopsis thaliana landsberg
ctattgatattatctgatgtcgttactcgacgacgaggacacatttatttctctgaggtgatttttgtttcttgagtgagaatatcagcgtttgccttcttcgtacgtctccgtccgataacccttttatatcttccattgaagtttacagcttcgatgacggcatgtacaaagatcttggtcctgaagaaggtctcattctctatcaaagaattacgtacggagccaaaaagcttataaggtatacacaaagttaattagtcatgcaaaaaaaaaaaacgttagtcatgcaatgtttggggttctcgttagcaatgtagcaattagcatattgttttcttttttgataaaatagcatatgtttttcatccttaacattgattttcttggtatttgatttcgatccttgctatagataacatttactgattcatatatatatttaactctttatataatttcaagtacatatatcaaaattttgtttagtaattataatttttctattgttggctaacttggtttcttggaaacttattttagctatccgttagatcctttcggtaggctatggtctccgtcagcgtccggagacaacagcgcactgactgatctatcgacctcagccccatctatagacatcaccggggcgtctaacaagccgccagagattgttatgtccaaggcattgtcaggagacggcttaatcatctccgacctgcctctcccctcaactgctacactggtatatttggctctttacttctcggagcctcagagtctaggtcggacccagaaacgatcgttcaacgttttcttggacgacatgcaagtgggttcacatcccatcgtaccggtttttgggaaagcgactcaactcgttttgagagatgtagaggccacttcggggtcccaaatagtcttaaagtctactgatgactcggttttgccaaccatgatcaatggtttggagctatattccataagtaacaaccagcacggtggaagcggaggaaaaagcggtggtggtgataacggtggtggtaataacggtggtggcgaggggcaaagcggtggtggtaataatggtaagtttctattcaacctatgtactgtatatgatttttatgtagataacttctttctttcttccaaatcaatcaaacaaactaaatcacacaaaatattcaccaaattttcccatgttttttgtaaacaaccaaaacgtatgaatttaaagaagcaatattttgaagttaatgaatagtgtagtcattttctgacgttaaaaaagtgaggaaaatgacagaaataaacatctacaaacgaattctaaaaggttgggtattatatgaacactgaagaaaaatacgcaaaaaagtgtattgagtttcttaaaggtagtaaataaaattaattttttcatataaagatggtttaatagtgaagatataatcatataactctaaatcatttcattgtataatctttttggatattatagcatttaattactaaatatagataaaaataataacttcatttttagacaaaaaaatgagcttatattatacttccctgcttacttatattactaaatagaataaccctttctatgacattttaggtgggacaaatttaaaag

SEQ ID NO: 19509 - DNA, 463 bp, Arabidopsis thaliana landsberg
tgagacttctctctgtttctctttttgcacttgatggtgcaggctcagattttacatgttacatatttggaggcattggccctcatggggctaaataagaatgaaaaattacaagctatggccccattaaaaacctttctcccccttttgaaaggaaaagggtgccatagaaaaaatgaaaaaagattacatcaaattacacataatatcgccgaagctcatctgcattctaagatctaggtatgtcgttgccgtccatatccttcaatctgtaagaaccgggtcttgacgaagatacaaccagaaaaggacctttccacttcaactataatttcccactatgtctggattggccactcttcgaagtaccaaatgtcctggcttgatattttttaatcgaacctttctatcacgccattttattgttttggcctgatatttattgatgtgctctatagcctga

SEQ ID NO: 19510 - DNA, 2115 bp, Arabidopsis thaliana landsberg
atggatatttccgaggagaaatcaaagcttccaaaaatttgctttgagtatcttcattggaagcagtgggagtacggatttccattcaaggacacatattcacctcgacctgccagcgttggccattcaggggaatcaatgaacttaaacgcttgagacgcacattcaaagatcgcaaatctgtggccgattttcagtttagtgtcatagaaacgattaaaatacccaaagatcttgtaacccttttcgggtttaccagcatcgtatcctacaccgcaaaaacggaaatctttgtcctccttatactcaatccacccaacttgtcttaaccatggattccaaatggtaaccccttggttccaaaagtcacgaaacaataatccattgcaagccgcgatcctggtaaatgcccacttctcagcctcaaaatgaaattgaggctagctcacgcacctctatcttcggatcaacgacgtccagaccgatggttcctatcgaataaatcttgaatccggccaggatgatgaattggggacgtgcaaaacccaagcttttcttgatgaaccatttgtcgttataaagatcgttccagtgtttacatacggatcttagccgaacaagagatccaggtggaagccgacacaatatctcttcctccaactcccacagaagcttccccgacgccattacctttctccgacttcagtggctttagaggagaatctatatatataccactgcgtgtgcaactcaaataaataagaaaagtgatctttttatctgttaataccctttttttgggacaatattaaaaaaatatatcaaaagtaaatgtcatataattcttaataattatttaggaaagagatttatcttccaataataaaattactaaatatttatttctcaaggataagaacatagatttgaggattaaataaataaacaattattctttaaattgttattaaaaaaaagaaatatatctttcaataataactgcatatttttgtaagaaataagaaaaaaatatttatttcttaagagttaagaacaagaagacaatatttggagaaatatcttgtttatatattctgtttttaattgttaactttgtaacctgtttacgacaaaaatagagaagatctattggttttctcagtattagtcagcagaatctaacaagaaactagattgattctcattatacgagattacaagaattgattttatacgagattacaagaattgatttcaatgcaaaacttaatttataattcagctaaaggtagttggtcggtaggtttgacacagaacatataacctaacttttatatgactatggttttgcctatgcgatctctacaattcattgatcaacttgaaagctagttctaaaattttgcacaaaataccaacacagagactaatcaatcatatcaaatctagagcagctgacaaaatcaaaaacattccaaaacaataactccaaatcagacagatgtttatatcactaaatgcatctaaatgtgtgatgttcttccgactaaatcccgataaaacacatcatgttgattgtttgtttcaaattaatccaattagtgttgtgttttctatgtgccattgattgtttttcctatcgaaccagtttagcgacctgcactctcgtatagtcatgccctcggattgatatatctttgtagttttgagtgcttaacatgtattagaatctttttctcatatgatatgacaattatcacattatttttcattaggatatatgtgatcttaatcgcgagaagaagtattctatgaaaggctaccacgcaaccgcactttgacatcatgtccacgaagccaaacttgatattgttgtgttgcctgcagagattagcaagcttattaggcataggcttgactggtccaatgtcatgtataagagtaaattaaagtgaataataaatgatgttctacattttcattacaaaaaaacatttttttttcttatgtttcgtgataatttgtattttctattttgatcccaatccatttctcaataaccaatcacatatctaaaaaaaacattgtcttaatttcgaaaaataaataattttt

SEQ ID NO: 19511 - DNA, 759 bp, Arabidopsis thaliana landsberg
cttgttttctccataaaggaaaataaagatataaaaatctttattattattacaaaagagagaacaagataagaattgaaaatatattagctcttatcctaagccaactcactccttccttgatgtatgcatttttgttttgccataaaatcttatacccatttgcgggatgggatctatgaggcccattcaggtgtaaaagattgtaatattttttagcgggaaaaagaacgataaatacaaaataatagatagcgataaagacaaatggtggtatcattttttctgtattactaaattatttcggtgtttttttgtttatgattgctaaacatgaaagttatatacatcttgtagttgcgaaaaagtgttactaatcaatcaaacccaaaaatggaggtatagttatttaaaggataatatcactatttataccgagatgaatcaaaaattatgattataccaatgttttctatataattagttctctctataatttatgtaagttagacaaaaacgcccttatattgcatatatcaaattatttagcaatgtaataaaatagttatcgatatttttgttatcaatttcttcaagaataatatattatgaattagatgattatctatatgataataatatatatatgcctgtaaataataaaaatttatgttaaaacatatgatatcgcgataagaagaatgttaaggagatatacaattagtaatgtgttaaatttatttttaacatactaaatta

SEQ ID NO: 19512 - DNA, 1372 bp, Arabidopsis thaliana landsberg
taccaaaagattatcatttacaaacgataatctcaaacaaaccaaacaaactagctttaactaaacttttataacaaaacagacacaaattatgttcttaaaactaaagtacgtaaagagggtgaagagtacgtaaagaggtttatcatcatattcttaagtttctagatacccaacattaccatatattaaattggttaaggacgaacattgtttagaaattgtatatataatgcattgttaagaacattcttagaaacatatatttgaatactaagaatagtttttttattgcatgagtgaatgattagataattaaaagttaaatttaaattaaacaatacaaaatcatctgagaaaatcgatgtgtcgcgcgggtgatcgcctaatcatatatatgaaagaagctgaactctctcaatttttcaaccacatcagcatgagagagagcgacatatggcatataatttcagaaaacaataaaatcataatatcaacgaatccacgtctcccgactttagggtttcacatttatgccttcgaattttaatggagttttacctcttcctcttctcgtccgtttaacgttcaattactagaaaaagccattgatttagtgtcaaatcaacaaaagcatagcgacgcagaaaaaaggacacgaggattagtaaaaatcgagcactaactatgggaagcatgtggtggctgcaatgacgagcgtgtgaagttgttttttttttttttacaaaaaaaaaagaaagaaggtagtgctgatatgcaggtcatgggaagctttgcttggatgaatttgcaggttctctcctttccaactttaattgaggttgggctcccggctcagaatatgtcgaaattctaatggaaaatagtatgaatttttctatttggtggttattattcatcctatatttgatgatatatggtttatggaaaagagtatgaaaggttgaaatgtttatttctgaaaaacatagattttatttttccactaacattatttcgttgcaacttccttgatcatatataggtgcgtgacatcctcacgaaagttttacttgacaacttggaaagtgtaagattgtgaatgtacctacgaaagtcgatggggttcaagaagctgcaaagatggagaaaattacttaaggagttaacatattctttatctctatttttctcttcctttttaatgattcttgaaaagatgatatctttacttgaccttccatagaaaggggttccaagtttttagctaaatttcctgaaaatctatgatgttaaatctaaggaggctggtgttgcacgaatggtagatcattaagagttaatctgatcatgtctattaaaattgtccata

SEQ ID NO: 19513 - DNA, 762 bp, Arabidopsis thaliana landsberg
ctcgaagtcatggagttcttttgttttacactgagttaatactcgagattaagctagcagggtatgagtgaaaataaaagagaacaaagtaaaaaagacaacagattgattgtattgtaaacgatttaataaagagctaggaacagggtattctcatgaaactattggttagtagatctaatcaaagcaaggttgttatcgaaccattcttaaactcaaactctaattatggaataaccggtgggcgtgccgcgagactctctatatctatagctactaataacctgagaaaccgagaaactatcaacctaaatatgcattcttaacgagttcaattgttcatcttagtagataggccgattcttattacacacctataaaccagactcatcaaataatagatccaactacagatacctatagcgggcatatctattgtctcgattcaagatttagttaattactctagatttagcattagccataattaaagatgaagaattctacagataacctagcaaatgggacaatctactaaaccatatgaatccctaatgagaaactttattcctaacaagcagattactcaaacatattgaatgaagcaaccaacatatttgagtatgaaaacataaacactgcaaatagattaagggaaagaagggatctcttcactgtattaagatctgaatcaatctctgcaaacactcgatgagtagcttatatctctaagtaacagggtttcaaaagcttataagaacg

SEQ ID NO: 19514 - DNA, 626 bp, Arabidopsis thaliana landsberg
tttcaaactctaacagaaccttaacttaaactcatttccaaatatcccaaaaggaacaatgtcgtgggtgatcttgcaactcatttgtaaaccttaatctgaatttaaactcatattcaaatcttaaaatcaatgtagacttaatgaaagatacgtagaacaaaggatcataaaaacagatccaaactaaaacaaaagtcaagactgaaatataattgtaacaagttaaactctaatgtgaaacagaaaatgaacttaagtcaagagaaaaacctgcaacatcttaaacgcaaacatgataactgaaacatgaacttaaactcaaatccaaacatgaatatcaaacttaaaataaaatctgcaactcaacatccatctacatcatccacaagcgactggaaggaaggtagagtctcatcttcaacatcaaatttttcatactcctctacaaatatcacacaaactaacaatgttaattcatagactaagattgtgtgactataaaacttatgaaaacaacttacttaccattttcataacattcaaaaccttttaaccaattgccactgcatattaatgcttgaacatttctccgttaaagaccacttctatacttccttaaaact

SEQ ID NO: 19515 - DNA, 747 bp, Arabidopsis thaliana landsberg
aaataaatcacggaacgggtaaagaaattacagaacgggttttattttggaattgagttatatggtggatgtatttgaatcagtatttataaaattttaaaatattattaatatgctgttttaataggggttaaaacttcagcttttttacaattgtctcatggattcgtggtataacgttacttaataacaattataaattgtaaaatataatattttataaaaataaaatttgcaagttttaatatatattacttttaaaaaataaatcgtcccgcggtataccgcgggttaaaatctagttaaggatagtaaagtttccatcaaaattaatatcttgattgtgatggtgaaaatttaaatataccttttcagattcatgtatggtatgaaattcttaaaacatgtacatgtaagtaatgttgaatttatccgtttaaaattactaagaaaaatatttttcaaatgtgaaatataactgcgatttttcaaactaaaatcagatttttcatatgaaactaaatctgtaaatattagaaaaattcaagcacttactatgaaaaaagaattaataattttaacacacacacagaaaaaatatagaaattagtttaaaatgttttcagcccccagaccccaaaaatatacctattattagttatgggggccccaaaacccccactaatttctttgggttttacaggggctttacaggcaaaaaaccctaattaaaaatccaatatttat

SEQ ID NO: 19516 - DNA, 769 bp, Arabidopsis thaliana landsberg
atatccttggaaaatgacttcatacctaccttagattagaattggtcagattaagaacacttaatttgtttttcttgctaaatctaattattctatcaatagtcgcattctctttttgacatgtgcaataagtctcaaattctattcttttactttttttgttttcacacctatttacgacaaaacaaagaaaaaaacaaaaaaaatgttcttcttctccatatcgcaagatctctacaatctccaaacaaactctttttcacacctatttacgaacaaaaaaaagaaaaataacaatctacatatacatttttacaacacttttataaaataaatcctcaagttagaacttattaacaataaatacaattaactaatattcctaattattagcctttctttatttaacatacatctttatcaattctaattacttacaaaatgggaaattctagaaccatattaatattatactttattaaaagggaaatattataattattaaaaggttaataaatggttaaaatatttaacggaacaatgttcagaatatttattatatgggatatttattaaaattaaataaccatttgaaagaaaaaaattaaattgatttggattataaaacctataattaaaggtttattaaaaccttaatttattaaaaatgggagaattgcaaaactaccccttttttttccaattttggaaacaattcccccctttaagggttgggctaattttttaaaaaaaaacccctttttcccct

SEQ ID NO: 19517 - DNA, 821 bp, Arabidopsis thaliana landsberg
tggattccacttttaattaaaagaactaagttattttttttttaattatgttggttgtttgtataacggagtggtgttcattttgagtgagttattatgtagataataaaggttatttacaatattttaagcttagattcattttttatttgaaatattaatctataattgatatgtataaactgattactcaaacatctaagaacccaatcttggtggactatcatgtatacatgcaaccacaatatatgatattttgatataatggtatgtaattatgtaacttgtgagtgttgaaacttggttaacttgatggtataaacaaataattgtttgttgtatgtactttgcaaaacacacacatacatttcattttataaacaatgcttgacctatcccaaaacacacacatacatttcatctctcggcccaaatgcaatcacatacaacaccaaacacttataaatcacaaaatagatgttatttaaaagcccttaactcaacttagcttcaaatacaaagtgaaattaagtacatgactgatgtaatcgtctacaaggatgagagacctaacataaaacattttccagtggaccaaaagagaatccaagccaagaatgccagtaaaccgaaaatatgaatccggcatgccatatgtgtaaccgaaaatattgatctaaaatatgaaactgaaaatacagagattcaatagatgggccctacaaaaacgctttttatttactgactgtacttactcaacatatggactccactaaaaagtattttgtctttttgcgacagaaaatacacataggtgaacc

SEQ ID NO: 19518 - DNA, 1139 bp, Arabidopsis thaliana landsberg
aagcttgacgctgtccacaatatacttgttcgaatttaatcatgccggcggaaaaggggggggtggttatgtttcaattagctacacccagaattctcagttctagcaaccgctttagaatagcaatagtttagcttcacaaggatctatgatcttactacttaccaagcctccccctccacccgcaccaagaagcaagatagaatcaatgctggaacagattctggatggtcagcagaagatcttaaagagacctatccatagatggactgagagcagcctcacaacgtcttggaattctgcttcaatggaaagtgagtatgagagaggaatttgacgttccagaggcagtgttgaccgacaccatcccttggtgtcgatcgaaaccatcgcatatttacgagacatcaggttgtgacaaagcaaaatcgaccaggctcaagattgatctcctgaatctacattgatagtgtcgaccgacaccacctgggtgtcgatcgacaccaataccaaacagagccattattgacgattgacagagcagaatcaaccaagattgacagagcatgatcgataccaaacagtagtgtcgaccgacactcacctaatgtcaatcgacactggacgcagactgcaccaattagccttcactttccacctaatgttgaacaagtctacacgcttgaaattccttgtccaatgtgttaacaatatatgcaagagattcaggaggaacgctgcaaggttttacagaatcagggatacaaaaggaagacatttattgtctcggaacagatttcagagctgaattaccgacttgctaagggaagaggagttgtagcacgagtgatgatcgacatcaccactagtgtcgatcacacccataactagttgaagcagaatcatctacgatcgcttcttttccagctcgaatccctgctataagtccaggaactactgtcacatcaaccactgcacatctactccttcatccacctcctaaacagttacggtactcatctcctcgtcctaaacctcctgatttcatcaatacaactttcaaattttcaaaaaactgttttacgattatgcaagccacgagattctcgtcgagtgcttgttcgttctttagatgattg

SEQ ID NO: 19519 - DNA, 1453 bp, Arabidopsis thaliana landsberg
  unsure (1)..(1453): unsure at all n locations
cttttattctcccatgccctcttgaagaaaataaaaccttttttcgttttgtgatttcgtaaccttaggtttcctttatctcttcctgcctaaaatgatttcgttgaaaatgtattttcttttttattctcaattaaaattttcagaataatgttttgttaaaagaaaaaaaaaaatcttttttctcaaataatgacgttgtatcttcacataaaatcttatttccacgatgacgttcttttgaattttcatgataggtaattaagtccttgtaaataacgcgtttcatcgcaagatcaagatgtggcgattatgtagtcatgagtcaattttattgatttaaagtatgttaaagttttatgttatttatttaagatttgtaagatttgtaaaaagtaatctaaaatcttcataaatttggggttattggatttatattcttataaagtcagtaatataacaaaagaatctctaattgttaatgctttttttttcttaaattaatatgttattgagatcatgacttctatattttgcttcataaaataaagcaagagaaaggcataaaaagtattatcaaaatctagagattgtctgagaaactttacaagattatattatgaaaaactaatcaacaagattatcaaagactctctcacaatagttgagaattttcatttatttactccctaggatatgaatgaagtcatcaaaatttcttgtaaattaggaaccaataacatcctcttaatctacatctataaatctcaaagagtagttgatagaatcccaaagagtgctatctaaaagagttcataatctacactgatcaatattttctttacatgatgggagtggccggctttgcggtagctctgatggtaacttcactgataatcgccacttgcgctgatggaaaagagttctttcatcaccgggaaattaaagtacaaagatttttgaagcagcnnnnnnnnnnnnnnnnnnnntccattaaggtatcttacacaaatttcatatgcatgcaacatgcatatactccatgctttgaatattcgctcacaaatttcttttgagactaataattgttttgctttaatctttcttacagagtgaagacggagatataattgattgtgttccaataactagccaaccagcttttgatcatcctttgcttaaaaatcacaccattcaggtttgctatcatttacaatctctgggttgtttacacatacatgatcgcgttgttttctcacgtaggtaaaaccaagttttatcccggaaggggaaggtgactctacgtacaccaagaaggagacaaaagctactcaagtgtggcagatatatggagagtgttcacaaaacactatcccgatgagaagaacagaaaaagaagatatcttacgagcaaaatccctttgaaagttcgggaaaaagaatcatcaataca

SEQ ID NO: 19520 - DNA, 1075 bp, Arabidopsis thaliana landsberg
agggagaaacacgaatagaacttttatttcgtggacatatggaccaaggtttttgatttttctctatctgatatctatatatacatttttagtgaggattttgggttgaaaaatcttttatcaatttcctaattgtatgattagtccttacaaatttaatcagacaagatattttcattagaacaatcaacaaatttatcgtccaaaattcaaatattgcattaaatccttactaaaaaatcgatattagtaagtagcacttaaaaatattgcataagcacactcttaaaactcgacgaaattaatgaatgcttatttcctaattattaatttcgataatcaatcataactaaccatatctttagttacttatcagttacataataaattcattgattagagatgcatttattttggttaccccaaacaaacacacaatatactagctgaacttaaatttgtaatacctaaatatattttgagaagatacttcattcatactcaatcatcttcctaatatagatattgtgttataaatctttaccaactaatatattctccatctaatttaaatgtaagacaatcttaccttccaaagatattttaggatttgaatcgcatcatcaactgccgccattcctaattccgagcaattcagtttcatgtttcaaacatagcacaattaaaattttcaaatggttatgttatgccgttaaaatgtcgccagaaaaaatcacattagctagaatatctccaaaactttgctcgagaatcaacgcacaatctaaatacaacaacttatttatgagtattcacttatgatactcatgcatattcctcttttaaaaccattccaaattgtctgtctctattgagctgcgcttagaatcttttagaccgtgtgaaaatttaggattactaacttagtgcacccactataaataaggttgctcatttcatcatcaccaacacatcaaactagctatacatgcctctacttctgcaactttgacattagagaaatggcaactactttcgcttacctcaaagacattatgccttagaaaaacacatc

SEQ ID NO: 19521 - DNA, 1011 bp, Arabidopsis thaliana landsberg
cactaagcatccgagtggtatgaagtagagctcttgctcttggaaatacagtggtagatccaaatgcctctctggcttaaactcttctgcatatggtccccatttttcggtatctcgatggatggcccaagcgttgatgaatacctactcaaccaacatatgtgaatgtgatatatattttttctatatagtttacttatcaaatatgattgtttggtttcgtggtttcgataattatcattgtgccagccggaatgatcatatcctttagtttgacatcttcactaagctgtctgggaattgacaatgggcctggaggatgtagacgaaagacttctttaatcacagcttttaagtatttcatgttctcaacttcttcttctggtacatataacttattcctggaatatgtttggatctcttcttggagttttttcatagattctggatgtcttacgacaagtgtcattgcccaatcgatggccgtgaaagttgttgtctttcctcctaggaagaattcctataaaatatgcacaaaatttcatgtttattaacattgtgactaatttaaatagagtgagtttctaattcaaaggatagtgttgttaacttgttatgcaaaggatgattagtcttaattaccaaaatgatgagcctgatgtcgcttctttcaagctcaaattcgtttgtcttctctagttgaatcttaacaatatatcaacaaaatcaaatgtctctttgttctcaccttcatctacatgttcttgcaccactctctctagaaactccacaaaagttttgcttacttcctccattttacgatccaagccgcggactttatctatccacgccaaacccggtatgtaatctccgacaggaaatgcgcctagaagctccatgacttttctcagttgattttcaaaatcgctagtgttttcctcccggctatattttcttcccacagcaattctacatatcacatcgtttgacaagttaaggagtaaatcactt

SEQ ID NO: 19522 - DNA, 544 bp, Arabidopsis thaliana landsberg
agatttacgcgttaaccacacgtgtgataattaaccccaagacttgaaccttcagtttctttgttagactctctgatacttagagaataaaggcatttgggtcacaactctcagttctccaccttgaccccaatgcagcgacctagcagccgaacttggactccaactccggatacctgagtaaactcactcagccttctaagcctttttgattaaacccactaagcttcagatcacgtgagtaaactcactcagcttgttgaggagccttatggctccattatgcttctgtaatcctgagtcgctccaacgcttcttgaagcttacccactggtactgtcttagtaaagatatctgcaggattacactctgttgcaatcttaaccagatttataaccccatcacttaccaaatctcttatgaaatgatacttggtatctatgtgtttagtcctttcatggaacactgtgttccttgccaaagcaatcgcactcttagagtcacagtgaatatttaccgaatcctgcttaaacccaagttcatt

SEQ ID NO: 19523 - DNA, 351 bp, Arabidopsis thaliana landsberg
ttggttacattctgtttttttgaaagatcttttgatcttcttcctttgagttcaaaaatgacgtgtctatttcagggcctttttttgttgataaattgacaaagacatttaaaagaagaattttcgaagaaaaattagagagagtagaagaagcagctgcagcaatggtacgagcttcatcggcgtagaaaggaggatcaataggaggagacagagtcgacgccaagttaaaacagaggaggagattaaaaaccctagctatagatgaccaattgctactctgattctgcggcgaaatctgattactttctcaaaccttcaaagcaagttctcaaacaccatggcaccgac

SEQ ID NO: 19524 - DNA, 2023 bp, Arabidopsis thaliana landsberg
aaaaaaaggatttggggttttattctttccacaaataataatttattttgatgcaaaataaattaattttaacacaatttctttttttaaaaaaaaaaattattttcagagctaggaagtaggacaaaatgaaatgttgtactgcactcagataaaaaccaatttgggaataattaactaagcaaatatatttcacttattagttttttgatagttatgctcttgtttaattatgaaggttttccaaataaccaaagagttttctaatagtaccaagattacaaagttttaaaatattttccaaactcaatagaattctatgttgaccaacaaaaagaaagacactatttatgctcttaagtcttaacgatactattttccaataataattctatacttcttagaaaaacataatactttttttgaaatattaaatatcacaagaaacaatagcaataaatggtacaactgttttgccactgcaagccaaaatattaataacaaggatttgtatttcaaatatatattttctattttcatttaaaaatttgacaagttacgaaaatgagaagtttttaaatactatcttattagattaatatatttaagtttaaaggtattatgaaaacatacttaatttgtgttttaaatagcacgctcggttatgtaacatctcctttgaagatgagagttaatttcaaaaatttattttatagttaattttaaaattttttcacctaataaattgagaaaaatgaaaagtatgtactactaatatctaagtagagctgtcaattggacgggccgcccatggacttgtccagtccaaatgcatgtgatgtgtgggttacattctggaccaaaaaacaaatggtctaattaggcatatgaccagttttgtccgcggataatatgagcttgaccatatggataatgggctgcccatgggcatgaattgagtcaatagacatgtcttcatttaattatatttttataattttaattacaattacaactaaataatttttaaattacatattttacatttataagtttatatttttatgaaaattttaaattttaataaattatttcttattaaattatttacggttttgaaggaaaagatagtattccacaattttttggaatacgcaatttttagattttaaggttttgacgggaaaaatacaattctccgattttacgaatttgaccgaaaaacgtaatttcgtaaattttcctcttaaatcgcgattttaattggcgagaacacaattttacggttttgatgagaaaacgcaattctccgattttatggttttgacgggaaaacacaatttttctgccaaaatcgtgattttattttattggcgaaaaaaacataattttacagttttggtgagaaaacacaattctccgttttggcgggaaaaaacaattttatgattttacagttttggcagaaaaaaacaattccataatttttccgccaaaatcgtgattttattgtattggtaagaaaaacacaattttaccgttttgtcggaaaaatgcaagtcttcgatttttacaatttttgcggaaaatttctttaaaatcatgatttttgatttatcaataataaatgagctgaccatgggcttgcccatatggacatgatctttattgggcatggacatttttcagaccattgtccattatggaccgtccaacttggcccataaaaaaaactgtccgtacggacacgcccaatggtccttggacggaccatttgacagctctacttagagatacccgcacgtacactagctactgaggagtctgagctacactatctttttcttgtttcactagaacacattcccattcactacaacttcaaatatgatacaaggacacacttttaaaacaaatacatatttctaattccttttccttggaacattttcatgcgttcaaagcttttcttgtgaatcatacgacatatctcctcgtgctagtaaggcacgcagttacatac

SEQ ID NO: 19525 - DNA, 2449 bp, Arabidopsis thaliana landsberg
aggggaaatctattaatcatatataccctaatgaaaactctaaccctaacaagaagactactcaaacttggagattgtagcaaacaacatgattgaataagaaatcaataaagaaaacaagatgagattaaagtttagaaggatcttgtccaaagagagtctccacagggttttgctcccaaagtacaaaagagaaaagcagattagcctccccaagcttaggtctaaacaatgacctttaaaagtatatatgacctaaaatgtgatgggacttctttagaaataagggaaatcttcaaaccttcaatgatttgcgtctttgaattaccgtcaggtattggtgacgctcgacaccaggggtggtgtcgttcgacacctacgcgatttttagtctgctctacttagtgggcttggtgggcttttgtgggctggcttggtattttcgcaggtggattcttggaggggaatccagcttcaacatttgccccccagcccattgagtgagtaggcgaactcgatgagcggacatataggtcaggtaagattgcgaaaataaatgtggttagatcagttggttttgaggataaaatcaacaatttcgttttaatttcagattcctttaaccaaaaaatttcgaggagatacgcgagataagtcgctgctgatgtggacggccgagctggagcgtctcttcagcgcactgcatctgacggtccagatcaggcgcggataatagatttctgcaatcttaaaaatcgtggtgatgatggctttaaataactttccacctctccacttgacgtcacgtcaactcacacaactctcaagataacttctctcctcctttattatttactgcgctttgttttgtagaagtagaaaaatctcgtttttatttttttgctatctccttcgtttctctgctattcccaacttcccgatctgcctcctttgcttttttctttcatctctctcgcccttctccgtcgaaatccaaagatgagcgacttcgaagattctcagaacaagagcaaccacagttacggcgatgattcgagttcatacgagacaaagtcggcggcgtcaccgccgggagtacagagacgcgccataaccctaggcggaatgggtccaattcgtccgccgtcaaccagagccgacaaaccgaaaaagaaaaaggttgccaagcaagggggaggcacgccgatgacgaacggcaacctggtcgacctctggaggagatgccaggttccggtggaggtacatatgatactcccaaggccaccgctgcatcctgagaacgtgccggtcgggtggtgttgcgcttatgccaatttcttcgagaaatacggcctattcttcccaattccggcatgtattctcgagatgctcaactgtctcggcctcgcctatccccagatgtgtccgaacttcgtccgccatgtgctggcgttattcacccgggctcgggaagtaaacagaaaattcagctgccatgacctgcttcagctctgccaggtcaagaccaatgctaggagtgaccaagggacgtactacatcagtgcacgtcccggatctctggtcctcggcggtttgaaagcctgtcgagacaccaattggcgatccaagtatttatttttcagagtagatcgtcattcagttggcaattttgatcccgcgaggataacaaggacctggtctaccaacctgggtcagatggagacctgagcctcttgatttttctttgttgtttgtgttgaatccttgactgcttttgctaatcgttagtactgaaactaattgcttgtttttgatgatttgcagcaaggaccaaggaagttactctcttggagacggaacttgagctgttaacccttctccgacgtggtcagactgactggtccactttaagaagagatcgcatcgtagctgctcttgccgtagctccagcagttcccgtagctccagcagttcctgcaatcgtccctccaacagcacagctagatccgatcgaagaggtcccgcggattgaaccggttctcgaggctgatctgcctataggtacgagtttcgttatattttctttggtttaaaaaatgtacgagttatcgagatagctgagcaactcgaattgctaactaacaaatgtcgtgctctatttgttcagttcctcctgactccagctccacttcagaactcccgctcattagaagaatgaggcgtccaagtcttcgtgttcaacgagccaatgccggagctcttgctcgtgctggtgatctgtcggccgcgatgaccgcggctcaaaacattctagctgtttgcagcgcatctgcctcagcagatcatccctcgcattctgaggtcaacaccgggacctctactgcagcacgtcagtcaggtaacattctggctgctcaagtatctgggccatctgcagttgatcgttctg

SEQ ID NO: 19526 - DNA, 591 bp, Arabidopsis thaliana landsberg
attggcatgtttaaaggagatccgcctatgggcccctttgtgtggtaaacccttccagagacccaaaattaaatgaaaaataccaaaatgaatcagagacgctccttatgaaagagattttttgatatttcagggacctatacgtgaccaaatgttattggcctatgaagttttgtcgacaaacataatttttcacgcgttttggtttcattttggttttcacctgtttggtttcattttcttcatcgacgattgtaactctctccgacatcgatctgtctcgatcgtgaacacgaagagaacaagacatattacatatatgtttggtttagtccttaccttagaaatgatcgatcaaaaggaggctacgccgatcgtcataaacatattacatatatcatgtgcacgttagataaggcccacttataactgggccataggagataaactgaaatcagagtaaaaagcccatgattacgtaaactatactacctaactaacgagttgttatcaaagcaggccccattcttttcctttatagtataatatagagaaccagttcagccacgagcagtcaccaccgaacacaaa

SEQ ID NO: 19527 - DNA, 559 bp, Arabidopsis thaliana landsberg
  unsure (1)..(559): unsure at all n locations
agctggtggcagcaacaggatttaagaacgcattaaagagacacattctgatcttggagattcttatgttgttgtccagaaactgttgccgtatcttgaaccggtttgtgccacaaaannnnnnnnnnnnnnnnnnnnnnnnnnnnaacttgaaggggagttaactgactcaaagatgaggacggcttgtgttacacaacatcaggtatcaatttttgtcatggaaactagccatcatcatcaagtgttagaggattttgatatgcaaatggtcattgaggatcaacaacctatcgtgacagaagctttgcgtttaatctctaaagatttccactgggacgtggctgagttgtgtgagcagttaacatgtgacgagtctcataaaccgaagcaaagactatctccaaagtcttggatgtttaagtatagaagggaccataagatactacacaactctactatgtctaggaatgtgagaatggtggttttcagaataatggaagcagcagagaggatncaatatttggctacacataaggttcatgagggttcactaaaa

SEQ ID NO: 19528 - DNA, 1221 bp, Arabidopsis thaliana landsberg
aaaaaaagaatatcaagaaaatgtaaaatttaaagtaaaagaaggacgggactaaaaatacaatcatcgtcttcggaggaattaaaagtctgctgtgagacttgatgccaaacgaaatttaaaacattaattccatattaatgtgaagcatggacccaaataagaatataacacttaagaatgtagacataaaccagatcataaaaatttcaacctctcatttactaggttgcctctctatattgactctacaaaccctacttcaagtctaataatacaccaacaaaatgtaagaaaatcttgttaaaggcatatacctgtggtagcgttagcttctgtacaatggtatcattcctaactctcatgttacgtttcgataaagttagcgtaagctcattgatgttgcacccaatcaatttagcaacagttgacaaacctgaaaaaaaacaaatgcagcacgtaaataatctccctgccagattgaatctgcatgcccacaaatgcatacacatattatgcagcaaacattcttgtttccaacaccaggacccaagagaatgaaacaaaaaaccttccaagataacaatcgtaaaagaaatatcaggaatatacaaaagaaatcagtaagcaacaacatagaaaagcctagtgggcatgcagaatcaacgttcacacgaaacatttaactcaaacaatataggcatcactaattagggactgaagaggcttactttcatctgctacaggttcaacatggttttcattgtcaataacggtgaaggaaacgtttcccagccataaaactgcagcaagcattgcaaatacactttcttgatcttctttactaacatgcacaatgtccagagcttcctgcaacaacagaaacttttaaatcaataaacagaaaaataaaggtctgaaatgagtagagaagaggaggaagaaagtatctaactgaaagagagaattaccttaacagtgtgaaaacgttcagcatcgtcaactccgttaattgaataacaattactctgtcccaaatatttatactcatgggcgcttgtcagatttagcttctctgcattcaaatgatgaatgtggggaaaaagaacataaatcaataactgtccaccagttacaataacataggtaccaccgaaaattacgataattgactttaagaactgatagttgacacaactttattttcacttatggagatgc

SEQ ID NO: 19529 - DNA, 1175 bp, Arabidopsis thaliana landsberg
  unsure (1)..(1175): unsure at all n locations
gtcctactaaggccatctccattgcacaaataatataagtgtctttagattttaaatgaataaatttaataagtaaatgtctttaaattagtgcagggaaggaaattgtgtctttggggagacattaaagacatgtttttagagacatctaggtgacaatatgtcattggttcttcttttgttcttttattttaatcacaactaaagacatccacttaaatttgtgcattgtagatgctctaatctctttaaaatgattgtaatcggccaatagactattcatcggatttcctaattaataaacctaaaacatttgcattatttcaattggccaaatagaagtaattaaataattgaaaaatatattatcaattgtttatttataattatgtgattatgtcgttttcaatcaaatatgtttgttctatactttatttatattaactcttttatgtgatcgaaaaatgaatgtacgtattcgcattccaatccatgcaacacgtagcttataccacaaacgagaaaacgttaaaactccacgtcccttccttgagacctcctccatgcaaaaaagagtggtcgtggttctttataaaccaaatatccaaataagaaaacaaaactgaatcattaatgaagatattgtaaagccacatatttttcaatatgatacgatcctcatataatcgatgatcccttggttgaaggatctttgattagtttaatctccttcatggctacttctccaccacacgatctctatataaaattctccacctccattcctcgccaaaaagaattttatcttcctctttttccttctactaaaccacacattttccttagaaaaataaaccaagtccaagaaaatggacccatggtcatggatatgtgagcttccagaagatcctgagttcagcgagtctgattcacacgcagtgtttcagctcgctggcgatttgacacgttcgatcaaacttagagccgaacggactttgggttctgaccaagaatctcactctctcacctttaaagttgtagcagagggttttaacctccttaagtcgtcgaccatttgggtctccaacacatgtcccttgtcgtcggagaaaccgntcctccctcttgntctncagcttcttcaagaactaatcacccattcccctacacacacg

SEQ ID NO: 19530 - DNA, 535 bp, Arabidopsis thaliana landsberg
  unsure (1)..(535): unsure at all n locations
gaaattgaaagaaatcccaaatctttcgaaagccactaatctcgagacattgaaccttactcactgctaaagtttggtggaacttccctcttctatttcaaatctacacaaactggagattctgaatgttgaatactgctctatgctacaagttattcccaccaacatcaacttagcatctcttgaggaagtccaaatgaatagttgctcacgattgagaacttttccagatatatccagcaacatcaacatactcaatctcagatatacaatgatcaaagatgtccctccatcagttggatgttggtctcgtctttatcaccttaacattagcagcggaagcctcaagagattgatgcatgtaccaccatgtataacttcgctagttcttatcggaagtgatatagagaggattccagaaataggtttcactcgtctacattggctgaatgtcgatagctgcagaaaactcaagtcaattctgggtctcccctcctccctcaaggtcctagatgcanatgattgtgtatcactc

SEQ ID NO: 19531 - DNA, 1177 bp, Arabidopsis thaliana landsberg
gtcttattatgtttcttcccgtggaagaaatctattttcagagtcacttttttccaatctcacctattcgtctatttttctatttaaaaaagggtattggaactaaaatcagagttcttccggatcggaaaaagagaatctccattcttaacgatgttagtggaatcatcaagcctggcaggttcattaactatccctagctatctgtttttcatttttgttttcgactccaaattgtagcactgcaaaaactaggtaggggaataaaattaattgtatgtagctgataaattttatgatattttgatattagtccattggagattttgtgtgtctctgaaaaataatactccctttgttctttattatttgacattctagaaaaaaaattgtttttaaaagattgattttttaggttttatatgtaaaattaattggcaattattgatgaatatcaaactttcaagataaataattaaatatcattgcttgagagttataaaaaaatgtaaatcacaaaaaataatatatttataatcaatttttaatgtgtttttccatatatgtatttttctagaaaatcgattattaaggaacagagagtagtattttgcaccaaattaaagctaccacattaagaacaatgtagttgaccagaaaaagaaaaaaaaaagatttacaacaatgaaaaaattctcagtttgcttcttcttattacagattgactctactattgggaccaccgggctctggaaaatcgacactactaaaagcattgtctggaaagacagaaactggactaagagtaaatacacttcaatctttgaaagacatcaaaaaatgctttgattcgttatatagaatatattattcgagctaactgataaaattgtgttgttgaatggttagtctacaggcaaagtgacatacaatggtcatgaactgcatgagtttgtgcatgaaagaactgcgggatacatcgaccaatatgatgttcacttgccggacctaacagttcgagaaacattaaagttttccgcaaaatgccaaggagttggcacaggattcggtatgaaacactatcccatttattccactaagtctcactccaaactatttattgacatgaaaaggttgaaaacagatatgcttgctgagttaatgagacgagagaaag

SEQ ID NO: 19532 - DNA, 560 bp, Arabidopsis thaliana landsberg
gttggaatcacttacataacaatcaggagatgtgtgctcgcattttgattttagaataagttcttcatattttccagaaacacactgtaaataaatataaccacaaattctaagttagttattttctttttttatatcattcacgccgactaaattgcagattgtgtgtaaaccttgtcataatcttcgatgagtttcaagcattctgtgttaagaggatctacaacactgtagcttcctccacaacttgccttcaacgactacaaagtaaaaagagatttgaactggtttttcaactactttgttgtgctgaaaggagacaaaatatacaatatatcctaagtcatatatgtaattgtacctcaaagagttcatcagagatgagtgctactccatgagcaaatggaatgcgaaagtctttatcatgatcatagtatgctaccgggtttccgatcacatagccctgttttttggtggtgtgcaaacaaatagctctttaattataatgttcaatattggaaataatgtaagaagccagcatatatatagttatggacctg

SEQ ID NO: 19533 - DNA, 622 bp, Arabidopsis thaliana landsberg
acgacgccgttttgtttaacagtaaactgtgtcgtttttgagataacagaggcaactaacgacacttaaacagcgttaacattctctgttaagcaacttaacgacatgtctaaaatgactggtcaaccgaaactttgcgatttaaatttaaagtcaacagaaactttgtgatttatttgtcttccgcgtagttgaagatttaatcgtcccaaatttgaaagttcatgctttttttaacatttttcccgaaagtttatcataaaagatttgttcttctttttgacgaaaagacttcttgtttatcattcaagatttggtcaattaatatgaaaaattagagatcgattactctaaactactttatggatgtgtttcttctacgcgtcagattgatatgttttcaccaaatcagtgttaactgttgatattcgactctaattggttttaaattaccgtagctggaaaactagctcaattttctataatttttatcagatgctctaaagctaaatcctaatgaaaaatctttatctgttcgatcttttagtactttggaatggttcgaatcatcaattatcgatcttctttgcatccagtgtgtattctatttttttatatgaaa

SEQ ID NO: 19534 - DNA, 865 bp, Arabidopsis thaliana landsberg
tgacttgactcttcctactcaaagcatctgccacaacatttgctttgcctggatgataatgaatctccaactcataatctttgatcaactctaaccatcttcgctgcctcatgttcaactctgactgagtgaatatgtacttcagactcttgtggtctgtgtaaacatcacatttctgtccatacagatagtgcctctatgtcttcagtgcatgaaccactgctgccaactctagatcatggattgggtaattcttctcatgaaccttcagctgtcgggacgagtaggccacaactcttccctcttgcatcaacacacatcccaaacctgtgtaacaagcatcacaatacaccgagaagggcttgtgcacatcaggcaagactaggacaggcgctgtagtcaacttctctttcagcgcttcaaaggcctcttggcatttctgggtccactgaactcaactttgttgccaataatgttgtcattggtctggcaatcttggagaaaccttcaatgaaacaccgataataaccggccattccaatgaaactcttgattcctcgaacatcttttggtgctttccagtccaagatagttgttaccttctttggatgtacaaccaatccttctcggtttataatatgacccaagaataggacttcgctgatccagaactcgcacttgctaagcttgacatacagctgacaatcttgtagcctctgcagtactttcctcaaatgctcctcatgttcttgttcattctgggaatatataagaatgtcatcaatgaacactactacgaacttgtcgaggtagtccatgaacacactgttcatcaagtacatgaagtaggatggcgcattcgtca

SEQ ID NO: 19535 - DNA, 1237 bp, Arabidopsis thaliana landsberg
acaataaatgaagtgtgacagatcaaattgtggatgtgaattagtatataaaagtgaatggacacacacgtcttctttaaaagttgcatctttctagtagtccatatgacagggctaataaaagtttcaaataattcgtggtcaggggcaaaactgtcttttcatcagatcagactggtaacgtactggatttaccgccatttcataaaaggttcaaagatattttggtttccacttttaaggcaaaaaaagaaaatactaacatatttctgtgtgttgacgtcatttatgaaggatgaatatcggtcgagattcatggaccagcactgaataaggatgctgtatcatttagtttatatatgtcatatgaataaataagtaatttttaatccttgttgagaattggaaaaataacatgcatgttaaaatgcatctgtactacaacaaggtctatgagttggtttttcctcttgtcgaaggttacagagttcctctaccgttggaggagagagtaactagtgtgacatcattctttcgtaagagattgtggagactagagaccgagagtagtacagagaattttttttaattgttccatatttgaattagaactctatcaagtgtttctttttgtgtctaatctcaatattaagcagtgtcacttccatgtcggctgctggataaatccagctttttccgtttgggtcgaaaactaatgggccaaattttattgtaacgggcttggaagttgggacttgacaatgtgaagtgttgtttttcttctacatgttttcagacagaataagcctatgagtggtgtctcatcttcttcctttttttttttctccatttttctctcttgtgctctcacaagtcgcagagatcgaaacggaagagacgatagataaacaatctgttgatgaagtatgaggaatgagcacataatgtgattttccaatgtttctttgctttcacataaacataggaaaatacaatggagaacaatcagaattatgttcagctagcaaagaaaataaaacagatcacccgaaacagagcaagtaaagaaacatgacacaaaaaagcagagcacaaggaaaaagctcggcctaataacaaaaatcattttccttttattcaaggccgatcgattttatgggcctaatacaaaagcccaataagcttactgattcgcacaatcaatttcttatgagacccaccgtagcaaggtatgggg

SEQ ID NO: 19536 - DNA, 470 bp, Arabidopsis thaliana landsberg
gtacatgagagattgttggcacaaaatctcctaaacctttcaaattccacaaatgaaaaaggtaactcattaagcattatcatctcattcacagatcttctaaacaaccctttatcatacttgattgttatcattacaccactgttatctcgagctaaaactttttgactatcactttcttcatacaccttggataacttgaaccatctaatgtgattggtcattgcacttgttcaagttttgactatgtcacactatatctctgtgccacagtatcgacagttgcttacagatatattgtcttccttttaaataaaatgcttccacacagatgctctatgagctgggttttttcctcggttatgttgaaataatcgaacttgatatctgagattttgttattttttctccaacaaaagaggtatgtggaccatcttctccatcaatctcttcactaagaatgccatcat

SEQ ID NO: 19537 - DNA, 2016 bp, Arabidopsis thaliana landsberg
tcaataatttagttgttttctttcttgtttcagtgagaaagcgagaaaccgactcatcaaccttgtttaatgcaatctcgcttaaagctggaataagaaagtttgagatcaccgtggacgaggccgtcatcgtcccagcctcatagtcggagtcgcagccgtcacactacacacagctttttcaaaaccctaaaatttttacaagtctgggcttataattgtgagttgggcttattgattgtatgttgggttttgttaagtgtattgagcttttatttgttgtatttgtaatagaccaatttcttttttaatgtgtaaacaggataaaccgaagaaaaaaaggaatttggttcatattcggaacatatgttttaggctataaccgacccgaacaaaccgacgtccgaaccgacccgaaccgaatttcaattcgggtctattcggtgagatttttagaaaaccgaatttccaccaaaccgaataacccgatccgaataacccggtttaaccgaactcccaggcctagtttttcggagcaaactcgcaatatattgatccaaaatatctaaagagaattgatctctgatgtaaactcatgtaaaaatttcacacttcaaataaaaaccattagtccacccaacttgattaatatgaaaaaccattaatatattttttagtagttcacttttagttatagtttagccgactaaggttacaaactttccaccaataccctgagaatctagacatgaagaagacaagaaaacaattttttatattttggtttttttttttttttgtagtcactacgcatgaagaattgaattcgtgcagtagttatcatttaataagatacgtaattatcatagacttcttctcaagaaatgaaactaagaatagagtcttgacgaaaacaaaagagaggtgagaatagagtctcctccgttgacaaagacaaaactcgacaacgaaaaaaacacaagggaacacaacaaagtaatgtgccaaattcgaaaagcccatgtatgtaatattgattgcgtgcggatgcaagatccgggtttgttgaatcaaaaatactggaaaaatactagcatcggagtgcatcgattaatcaaaaatactagtccaaagatcatcgacaacgtggaccctatatgaggatgcaactcggagtgcctaacctggaaaaccggattccggttaaaccattgcacatttatttacatgaccgctaacggtagatccgccgttttagaccggtgactgttatgattatctaatatcgcattcaattccattaattctcattataactcttcttttaatctttcgttaacattcctaattttacgtttcttttcccacaaaaccagtttttaaaaacttaacgatttatatttgtttagggaaaattagtataagagctttaattattaaacaagttatatatgatccctttaattaacccgtagataaagcaaatgaaaccccccacctgcaccacgttattagtctattgacgttagttcatatacttaagtgaaacttatttttttaattaaatcgtgttgtaaaaggcaacgaatttgcgttgtcttttttttttattagtaaagaaatagtcatttcattttctttaattcggtcacaagtctcttgacattttcgtctatatatatattagtattatcaagaaaacgatccatcttcgagggaaagagaaagatcacaagaaaagctctctcagaataatcgcaatggcttcaaagctcgtgatcatcattgtgttcattctagatctcattgctgttggattagccattgctgccgaacaaagaagaagtgtcgtaagaatcacttctctctctctctctctaattaggttctttactctcttttagatttcttgttctcttgaagtcaaattttggtgatgagattgtaatctttatttggaacatatgtaggatatagtgtttcgactttcaaactagttttgggacaaaaatacgt

SEQ ID NO: 19538 - DNA, 1227 bp, Arabidopsis thaliana landsberg
gcttctggaagtgcctagaccgaaaactatgggcattatgatcccgtctctattgagcggtgattaccgttgtttttccaatccctcttttccgtttgatcagaatactaagaccaagcagatgcaaatcaagaactttgtgggtattattcaagaaacaagaagtttgaggaagattggcattatgatccgtctccaaggagcggtgattaccaatgcttcctcaacttttcatccccttattgcctgataaccgagcccaatcatgtgcatattatcaaagtcagggataacattctttcacctaaaagcttgaagctcatgtttggttacctttttcatgtgtcatgccgaaggcaaactttgcatgaaattcttaatctccatggtcatgtgagagagaatccacctgttctgttacgacttgtctaccatcctctgctatgttttgtctaagctgaatgctctatccacgacaactctagcttgcaatcttaagcatcagatcaccatcaccttagctcgattctatgtcaaagcgctacttcgtgtagattttctcgtgccggcttgatcgcagactttgatcccatctttaacgccactctgtctcttgactgcggccatttgttcatctatcgactcgttcttggaagaattgtcgatgacctttgatcttacatgtaccaaaaagctagttagctttcggctcaaagctctcaaggatctcttgtgtttttaccttatctatcctttaatctttgttattgtaattttggggtttgctccttatcattgtattgtaatctttgggaactcagtttcctataacctctatatttggcccttgttctaatggaatgaaaacataactttgctaaaaaaaaaaaaaataaattattcttctaaattcgaattttttcagtttattgatattctgaattctattaaatatatggttttgatggtaatatcattcgaaaattatttaatagaaagtccaaggagatgtttacttgacccttccaatctttagagaggtgatggaccatttattgattatcacctagacgttaaatcggcaccggagttgtcagagggatgcataaaagttgtaggttctgatttcaattgaacaatagagaacagagtaactgataggatgggtgattattagcaataaataagaccaagcatatgatggatagagaatatagaaagattctt

SEQ ID NO: 19539 - DNA, 523 bp, Arabidopsis thaliana landsberg
gaagcatggatccacatcacgcattcaccttcgattcccaacccgcaaccacaatctctttcttagccttggttttctcaaacgactccctagagaacaaagccttggcgtagttacgaacactggtcaagctctcagggacagaccagttcttgtaatgaccaagagcaacctcaagatggtaaagctttggtgctaaactcaaatccactgcagtaatcttctctccagctacaaaaggaccagaatgtgtcttcaagtgattctccaacgcttctaactcatcaaccaaagccttctcggatccgtcattagcgtctttgctcttcaagaaagtcacaaaagcaccaaagattttggatcctacagaagcaaattcaggaggagtcttgagagaaggctctggatatttctcttcaagaagtccaacaattacgtcagaatcagccacccatttgccatcaagcttcaccaccggaactttcccctctggactaatgtctaagaacctataaacacaaaa

SEQ ID NO: 19540 - DNA, 546 bp, Arabidopsis thaliana landsberg
aacgacgtcgttttttgcattaacgaatactaattaacatgtgcttacagagttatcgcgtccgttaatgcaagataacgtcatggagattttgccctggtcaactataacatttgtgtgaaataaccggccaacatttttatcatattttatttgaccatacaaaaggtttatgtattaaatggccatttttttaaagttcgcatataaaacaacattttttccattttgtcttatttgaaggtttaacgaccatcattattggtatcttcatctacctcaaaagtgtgttatttaagatacttttgttagttataagacatgtctcttaacataagagttgtttaagagaccattaataacgatgctctctcctctattcttatagctttcagtgtttcttgaagtcaactccatcactcaaagttcattttctgtttcacagctaaaagctcataattgtgtacacgttcatataaaaattttttattatataaaatacttaattttttccaaatgagatgaaaaattttaaaattttatcca

SEQ ID NO: 19541 - DNA, 1419 bp, Arabidopsis thaliana landsberg
  unsure (1)..(1419): unsure at all n locations
caacagcctccaccaaaacggtcaaattggtggttggggctataaatacccccaaccacccaccatgcattgcatccaagttttcaacccttcacacctcatacaagagctatagcattcaatacaagccacaaacaagagatcaaatcctctcccaagtccaaagatcattccaatcaaatagtgactagtgagagagacaattgtgttcttttgagctcttgcgcttggattgcttttattcttcctccattcttgtttccaactcaattgtaatcaaggcaagagacaccaattgtgtggtgatccttatggggacttagtgtcccgattgattgagaagagaagctcactcggtctaggtgactgtttgagagagggaaagggttgaaagagacccggtctttgtgaccacctcaacggggagtaggtttgcaagaatcgaacctcggtaaaacaaatccgcgtgtcacacttcatatttgcttgttgatttgtttttcaccctctctcacggactcgattatatttctaacgctaacccgacttgtagttgtgattatttttgagaatttcaatttcgccctattcaccccccctctaggcgactttcaattggtatcagagcccggtgcttcattagagcctaaccgcnnnnnnnnnnnnnnnnnnnnnnnnncaagaaggagatggagaccggcgaaaagcccactacaagccacgggaaggcttcatcggaagagtcccgcaacaaaaagaaagggaaggagaagaaggtctcctcccacaagtcgcacaggagtggcgacaagaaaaagaaaatgaggaaggtggtctactacgagaccgacacttcatcaccttccacatccggctctgacgcaccgtccataacttctaagcgccatgagccgaagaagtttagtaagatccccctacgctaccctcacacttcaaaatgtaatcctttactctccgttcccttaggcaaaccaccggtttttgacggtgaagattataatatgtggagtgacaaaatgagacaccatctaacctcactccacacaagcatatggaatgttgtggagtttggtgtacaggtaccatccgtaggggatgaagactacgactcggacgaggtggcccaaatccaccactttaactcccaagcaaccactatactcctcgcctctctaagtcgagaggagtataacaaggtgcaaggtttaaaaagtgcgaaggaaatttgggacgtactcaagaccgcgcacaaaggagacgaggtgacgaagatcaccaagcgggaaacgatcgagggggagctcggtcgcttcatgcttcaccaaggggaggatccacaagctatgtacaaccgcttgaagaccttggtgaaccaagtgcgcaacctcgggagcgaaa

SEQ ID NO: 19542 - DNA, 401 bp, Arabidopsis thaliana landsberg
cactaccctctgcggttcgtcgcaaggcctttaaattccctagcctaatggatgatttgaatctttgtttctgttgtttctcaatcgattaggaaccatgtttcttcttacgatttttattttgttatgtctatgacttttaagacccatgttttgtcttaaactttgcagtacatgtatctaaacccatttcccttttcgagattttttggtttatataagcatctaactacaaatcaggttttagtgatggaaatcagtttttcagacttatagtcattttcgtaactccagtatctgattgaaagatattgtacaagttgtcattgaaagtgttggtatatagggatataaactcgttttccttttaatgtattgtgctcttgtattgtggtcgttga

SEQ ID NO: 19543 - DNA, 509 bp, Arabidopsis thaliana landsberg
aagaaacaaatttttataaaagtctatttaaggtttttccttgggtttcctatatagtatcatccttagggtttacttatattgatacaatgggtatttgtataagaaatgattttttggataaacagattaaaattttctggaaaaaattagaacgagaagcataggaagaaaatgaaaaaagaaggaaaagataagatattccaggagcaaaatcgttaaatcatcagttgagaaatacccattcttataagccatgataaatgtacattttctcaagtttttaggcttaaatatgcctatttgaacaaaagcccccatagatcatacaaaatttcaaaacaaaatgattcaaaatgcatctttttccttgaccccaaaaaataaaagtttaagtaaatacaatgctatgagatttaccattacctaaacccatccaattccacaaaaatacaattcttcactcgaatctgtgagcataacttttatttttcactttttttcggttt

SEQ ID NO: 19544 - DNA, 1382 bp, Arabidopsis thaliana landsberg
ttaaaaaagaagaaaacggagacggaggtggagacgtcgcggtggagaagagatcatcaaggtcaagttttagtagagggagaattggattgtgttaataaggagaagcagtgatgagtctatttcgttgccaatcagagatgtggttgttgagatcagtcgaaggaaagaaaaagaaagaagaaaaatagaaaagaggaaagaggaacaacaatatcaagaaggtttattgcagggtgaattcccgacagaccagagggactcagataaggaataaggtgtctatggaaataaaacgctctcaagaatccacatcaactgacagatcttcaatcagatttaaactcaagaagtttctttctgacaagtaactgcaaagtctgtcaaatccaggaaatcctaaatgacagttcgagatggcttattgatgataacgtttggagcttttaatgaagtccgttcatgctgtaaatttgtggagttattcatgatacttctatctacataatcaactttgggaatacgtttctaacggttagttcctgacttttgaatatgtttccaagacagttttatttgaagtaaatagtgatgagtttgtgttgttggttgggaaacgggttcggtttgagctgtgaatttgcaggaacctttaggactcacggattcaggtcttagttgagggagaaccaagctaaagcttatgagaatgtagttgtggtaaaggttgcctaagttaaaagaaaggagaagtgaatcttcatcttcattaagccaaagtgagggtggtatttgcgaaacatggtatcattttcttttgttatgcttcttgacgcatgatatgtaagcttagatatgattgtataggattagattacatgatgatatgactttatgattgttgagtatgatgtttgataatatgatgttatgtatgatattataagtaaatgtatgttaagtatgattatgagtatgtatgtatgatgaatgtaagactggggagaatcgagctattggtcgcggtctccctagtgatgtggacagtgatggacctacgggttaatagctggtcaagaatggctgacgagcccggaatgggagtgtatgagccacgagggccagcctccactcatgaggttctagtcgtcacgatgatgactggacctaacgatacgatatatatgtttatatttatatatataagatgattgttatgaatgtattattagaagttaaagcatgttaggttgattgattgtgtttaagtttatatgttgtgatgatggttgtatagttttagaaagtgttctatgtttctgtgggtagaggtgattctccgcgcttagtcctcaaaaatcatacaatctttttatattttt

SEQ ID NO: 19545 - DNA, 508 bp, Arabidopsis thaliana landsberg
gacttcacggatggaaaaattgctccccacaaaaaatctcaacctatcctatttctaaaacaacgagccagtgaaggttgtggtttctgacagccttgacgacattgtcttaaactctggaaagaacggtgagttactttacattgttaaatcacaaatacctgtttgctcgtagcaaaaacttataaatcagttttcattcctcctatttacttgcagttttgcttgaattctatgctccatggtgtggacactgccaaaagcttgctccaatcttggacgaagttgctgtgtcgtaccaaagcgactcaagtgtagtcatcgctaagctagtaagtcctttctctttcttcacatttgagagtatttgttcttgatcaccggattcttactctttcacttgtccaggatgcaaccgcaaacgacttcccaaaagatacctttgatgtgaagggattcccgaccatttacttcaaatcagcgagcggaaacgttgtggtttacgaag

SEQ ID NO: 19546 - DNA, 1107 bp, Arabidopsis thaliana landsberg
  unsure (1)..(1107): unsure at all n locations
gagttcaaaaagttcagaatttctcagtatgaaggaattgactaatagcttgtgccgtttgttgtacacgtcgatagctctcgagtctgtaggtgtgaatgtggggatagcggtagagtttgaacgagttcagttaggttggtggctaatgggaggttgcgaaaacggaacttgcgtagtaaacgcaaattgtacagatgtttacactcccgatggatatgcaggacaccggtgctcatgtcttgagggttaccacggagacggatacatcaatccttgcctgaaactgagaggttagtcaatctaaagtctttgtacccttttaacatttgtattaatcaaatgaggaatcaaatttcaaccatcatagctagtggagaccaccgctacgacaaggctctccaaccatggtttcaatcaagaacttaagcatttttcagtctccatagttataatttttacccgttttctttagataagttaggaaaacaatacgtttttcaaacataattgtgaaactaatacatatactatttataattggcaaactccccatgtatgttttactgtgctccactgttttaaatacattgtaacccttatatattttttatatttacgacaatgctataagtatattttatacattaaaaaaataaaaataaaataaaaataagatatgcatttttgtttaataatttttaaattttatattagagagtactaaacaaataatatctacacagatataattcactgtatagatatagaccacagtacatatataaattactgtacagatatagaccactgtacaaacccctcaaatctggtaatttgtttgaccaaaaaaaaaaaaaaaaaaaaacagaatactcttcattaactacttcttgtgtgtatgagctgagattatcaaattttgtaacctaaaatataatataatatttataatgtacaactactttattgtttctaacaatttatttcttaataaatntttagttttggcaagaaatgtccagagtaaaaatcttattgctgngggggtgcttctgtatttgggtaaaaccgtacccgcagtctgcttttacttgaagaataaaa

SEQ ID NO: 19547 - DNA, 1392 bp, Arabidopsis thaliana landsberg
ttctcccaaaggttatcttctctggttacatggtttctgttggttgcttccctattatccaaaaaactttatgaccactctaccttcgagcctgcttatatctggtgctaattctcctcctaacctgctcgcgtttctcttggtttatccctcttctccgcttcccttgaagtcaagattagcacctccttgttcttcgatggatgggagctctgcctcgacgtcggagctatgcctggaagcatcaaaccatggatgaatcaacttctacagactgagcttcatcatctacgtctcttgattgggtagatcttgtctcagaagcccccatatcggtcgccggactgcccaaatccgtcctgcagccaccgttgttgatgaggaagagatggagagcgtggctaaacctaatgatgcctcgttttgggcctagcccaaatcccttctgtcctcccaaatcccttctgtcctccttccagccctttaccaaaacctttgaagcccactaagacttttgctgggtcaagcccatgtcttttaaagcccaggtctgattttaactctgttatacaaagcccaattcttctgaaattgttatcgattagggagagtaatggacgcttccctgtgattgtgattatgaatttagcttggcttagtagctctttttcaaaaaccttggtcgctagattatctcgtttggtccgtttgcttcattgtttgagtctgtttttgaatcgtttgaagttaatttctctttggaagtgtcttagagtgttgcttcccgtgccaagttttgctagtctcctatcaagttccctccctttagcaccctctaactctatcttggctagtaatggacgctacgctaatagagtattgtttgtttaggctggattgttaggctcttttgtcgagatcagatgctaagccttctttggactctatccgagactctcttacccaaccctaagcatttggcttttagagttaagaagttcggcattatgacccgatctctacggagtaggtgttaccaaagcttattcatctctctacttaccctttcatcaattatcgagttcagtcatgtattaatctattgcttggataatttgctatcttctggaaggtggggaaagtacggcattatgaccatgtcttcaagaggtggttaccgtctctttctcaacctcgttaacccgctagcctcctccatggagcatcttctcaaacgctcggatgcattatttgcaagagtcacttttgaccacaatgtggtcgaggatttcgcgaagcccgccttcatggtcgaatccgccaaggcctcaacagatttttcaatcattggaaaactcatgaagcttctatctttattttattgtatcatca

SEQ ID NO: 19548 - DNA, 626 bp, Arabidopsis thaliana landsberg
ctaaatgctaagctcaaatctaaagaactcataatctaatctaaataaaatagatacaaaacacaacgtggagattaagactttgggccaacatgacatgcctacacaacaaaaaggacaaagcccacgcggactctttttttttttttggcctccactacatcacggactcaattggtaattaattgcatagtttgagatcttaacaaaaaaagtactgcattgaggaagcttttactaacgtcataatgtactcctcctatcaaacaagtctagatagaatcaacacaacattttatttaacaatacaatagataaaaatagtagaacattggagtttaaatcagataatctaaattacaaggaaaatacgaaatagatactaaaacaaaccaaaaaacagaaaagtgaaaataaattaaccagtcatgcaaccaacaccatatcgagtggtcggaaaaacaagaaacaaagcactacaaacaattccaaccattattggaaaactctccataacttgatccatctctttctctttccctggaaacaaacatcccgtgactcttcgatccgaaaacgcaatcgccataaaaaccaaaacgctcatcactgcatgaacaaagtca

SEQ ID NO: 19549 - DNA, 447 bp, Arabidopsis thaliana landsberg
tatcaaagaataattctttagtattgggagtgacaagtttatcgcgtgcgtgttgagtctaagaaatgggggtaaaggaagaggaaggatctattcttttgatgttggatgctgctttagcaatttcagaacgttttcatagacgaagaatgtgatggaagacgcaggtacatttttcaaaagattagccgttagtaccctgtagaaacccctgagaccttcatatctgcagagagagacccaaaagtgttactcagcgaaactaaccaaaaagatcatcgattcagacataatcgagaccaaaaatatgctctgacctcgaggcttctctgatgacatgtaagctgtctatatatcttgggatacctatggtacctaggtcgttgctgaacaagaaaagaaccatgtttataaaatcctcaatatattgaaaagatcaaaggtaga

SEQ ID NO: 19550 - DNA, 436 bp, Arabidopsis thaliana landsberg
atgggatctttatttacctactttttcctcttcttaatcttgtatggaatggcgtccagcttttcttcttttattacatcacaataatcccaacgtatttcaatgcatttgctttgagcaaagatactactttgtcatcagtttttgtgtctttgtgtgtctagtttgaaatattgctcgtatttgatttttctgtttcagatgaagtggtgtcctgccccaggatgtgaacatgcaattgattttgctggtgggaccgaaagttatgatgtttcgtgcttgtgttcgcatagcttttgctggaatgtaagttcttcaaatcagagaccattaatctactttgttttttttatgtttttacacggggattgaaccacaattgttttgactattttggtcattttggaactgtgataaatttgaaattccagtgcac

SEQ ID NO: 19551 - DNA, 670 bp, Arabidopsis thaliana landsberg
tagtatgtcacgttcttctagacagagtttttttctaatgtaataaacaaagcatggttggtcatcctgatacattatatttacggattcttggtcatgattcatctttctcttaaccttggagaaacaatggtagcaatcatctttgaattccaaaacttatttatcttcatccttctatgcctcttctcactcctctgtcactctctcttcttcaagaaaccaaaagactcaagaagctttgtcctgcctccaagccctccttctcttccaatcatcggtcatcttcaccttctcctctctgtcctaactcacaagtctcttcagaaactctcctccaagtacggacctcttctccttatccgcatcttctatgtacccatcattcttgtctcctcttcctctatggcctacgagatctttaaggcccatgacgtgaacgtctcttctcgcggtattattgctcttgatgagtctctcatgtttggggcttctggcatcttgaacgctccctatggagattactggaagttcatgaagaagctcatggccactaagctactccgaccgcaagtgctggagcggtcacgaggtgttcgtgttgaagagctacatagattttacaggagcattcttgataaggcgactaaaaatgagagcgttgagatcg

SEQ ID NO: 19552 - DNA, 276 bp, Arabidopsis thaliana landsberg
taatcatttttttggcgggaatttgttttttggtgggaaaaaagtttgccagtaattttttttggcgagaaaaataaatttttggtgcaaaaatttggtgggaaaatttcagtttctaattacatgttcctattagatgaggataatttggtcattctgttcaagggaaatggtatttttaaaaaaggacaacataaaaagatattgttgcaaaagggtaataaaaaagggtagttttgcaaatctcccaaaattctataagggtttaggtttaat

SEQ ID NO: 19553 - DNA, 311 bp, Arabidopsis thaliana landsberg
gccctgtcttctttctttatcgcttttttcatgcttattgatcatctatattcacaatatccattggtgtgtatcagatacttggtggagcagaattgcataaaagctttatgtgacatcctggtttgtccagatctaagaatcatcttagtgtctctaggtggactggaaatgattttgattgctggagaggaggacacgaacctaagagacgtgaactgtttctctcaaatgattgaagatgcataagggcttgaaaagattcgagaatttgcagaaccatggtaacactgacatctacgaggaaggct

SEQ ID NO: 19554 - DNA, 971 bp, Arabidopsis thaliana landsberg
acgcaaggggaaatagcatttctgaccatttaaggtactttggggtttagttgaagtgtgagagttggagagagtgcagcatagtgatgaatcaagatatggtgcgttacagcaggaaagattcaaggggtaacttattcctctcgcggacagttcctcctaaggacgtagtcaaaacaagttctctatcgaaaaccggaatctctagtctgtaggtatatgttgatctcaagtcttgaacaagagaaagctcgctggaagaggaggtttgggggattcaatgtgtggaggaagaacaagggttctttgattctttgtgatggcaagagaaggtgaaaaaatgattctgtaaataaatcctacgttggtagcatgtagcatgtagcatgtaaaatctttttcaatttaaatgtgaatgaataatcacattgtacagtagcagattccgaattctttaaatttgtatccatcaatttcttctgtcaattattaatcaaagtacaaacatcattttacttaatagtcaacagctttattaccaaattatttttgcaacatatttgaaatgtctttttaataactaaacacatgagacaatcattaaaaatcaaattaaaataaaatacagatatttgtcgagttttgattattgtaagggttttaacgtaatttagacaaacaaattgggaccctctaaacaataaagagtctttataaggatatcgaatctccgtccgctaagttaatcagaaaccgcatctgtctgcgactcggtcgttcctggtgtggtttcgtgtcgtagtcattaaaatctcatctctctcactctcagttccaataataccccttcctatcagagccaacacgcatccagcatccttcatcagcctttgcgtatgaaaatgatgaaacttgaatagagatcattcgtatttcatcgacgtttctaattcgcaatcacaattgttttc

SEQ ID NO: 19555 - DNA, 517 bp, Arabidopsis thaliana landsberg
  unsure (1)..(517): unsure at all n locations
catntcgaaaaacttatccaacaaaacagccaaaacctcacaaatatcagcatacagcttaaaactctccctcacaacgggatacaacgcgatcaatatcatcctactgttcttagctaaaccagtaggtctcaatgacaaaaacctatcaagtaaccgttgaagatgacccatctttccgaaaatcctttcgggcgtcatttcccttaaaggcgtaacaactttcttctcatctctccctcctcctcctcctcctcctcccatctcagtcatatctccgtaagaccgagatctcttcggtacaccaccataaccattattatcacctctaaagtcaccaccaccaccaccgttctcataatcataagaacgcggcggtggagacctgaaatcatctcttcctctcccatatcgatcatcattattactatgatgactactattaccaccactattcaccgacacaccacttttcctctcaaacaaagctaactcaagcctctgatccaagtaacca

SEQ ID NO: 19556 - DNA, 1287 bp, Arabidopsis thaliana landsberg
acatggagtaacgtggaatctagagttagtagttagtacttttaattattttgatatatggcaaaacaaaataggcaatgggctactcactactagtgttggtagtacacattctacagaaagatggagtaaaggtaaatagaatcgatcagcaaatatgaaatgaaacctttcgctattttgaccttttcagttttttgacatctagttcaaaaatggctaaacattgcatttattgaacctcgcatttcggttcgacattagaattgagttacaacattactgatcaaactttctgaatatttacatatatgccactattattaaagtaagtttttattctatctattttttttttacaaaaagatagtaaagaaaactgaaaaacgaatatgatggcaaattcaaactgtttttttctaactttaacgcctcgtactgtctttgagtatgtgtaaatagaatggttgaacaaaatcccaaataaataaattccttttaaaaaagaattattatatagaatgggatttcaataaaataaaaaaaaagcgttttgaacaatgcctataaaagattgagatagttagtcctatacaaggcctataaaagcttgagatagacaaccatgtccatttttactttctataaaacttattttcttattaacggtcgataactttactaatcatttatctttaagtttaaaacaattttgctttaacgtttaaactatatcgaattcggaataactctattaactaaatgttaactattattaacaatgcgtttcattcatcaaaatcaattcaagtttggaggtattttcatttaatgagataattatatttttttggtcattcctttagttaaagtttttttttctataaacatatattcaatattgtactaattattattaatagatctcattcggaaaaaatgttgtttaatacaccaattttcaaaaagtggtcatttaaaccataaactccatatatggccaaataaaacttagtaaaagcgttgaccggccattttatacatctcaaaacgttgaccaagccaaaaaccctgcgacgttagcagtcgttaacagagtcgataacaggcgttagcaggcgttaattaatccgtttaaacacaaaacgacgtcgttttgtgtttaatcgaaaccaacaaaattcccaattcgattctcaatccctaaaatccccaattccaattctcatgccctaaaattctcaaattcgaaaaatcttcaaattgtcttcccaaatgacgaaaatt

SEQ ID NO: 19557 - DNA, 2764 bp, Arabidopsis thaliana landsberg
  unsure (1)..(2764): unsure at all n locations
gagcagtacggaaaaatgcaatatctggagactactgcttattctggttgcttgaagtttcttctatgtgtctttaccaacaaagaaatacacagaacagattacatttcaacaagcgatactattttatacaattaaaccatttcccccaaaatatacctctgctgcggatggtgattccagatactctcaggtagacaaccagtgattgttgttgttgaaagatttctgtttaacaattcggcattgtcctgctccagaagagagaataacctttttatgcttgaatataaatggctataggaaaatacaacaagagagatgtgtttttagttaccgttggtttctgcaaattcttgtgttggattcttttctcgtgtactagtagaaatgcgcatttgcaagtgaagaacagaagcaaagtagctagagaaaagaccacgagagactccactacaatcacagatcctagaactgcgaccaagtgacaacactattaaactatttgaaccggagaaataagagtgataagaattaagatatgaaactcctctcttatcacttctctacccaatatacatatgcttatcagaggtgtgcctaagaaacaatactaaaccaatcaaaccattttttcaagcgacactagaatccataccaccaatcacctaactctttattacgtgtacgttcatatatgcatttaatatatgatcttcatgttcaaaacagatttagactaaacaaaatcacaccagatttaacctatcagaaccattaacaaactaaaaagcttaattgaaaaaaaactgaatggaaccacaaccaagtatttcataaacgtaccgtgggctccaagggaactcaagggtctcttcctaatgaggtttacgcgagcttctgcgtgaagaggcagtgaaattctctcggtacagtcaaggaagcacccgtagttccccatgtcactcagtttcaaagtcaagaccgcaccattctctcctccctacacaagatttgtgatgataatgtacatatgaggaaccaaaaacatttatctgaatgatcaagaagagaatttacgcatggagcagctgttgcatgaggtcgttgcattgccttatagttccacgaaacctgatcccactagctttgacattcacgtgtttagaaatggcagcatacgtctgaattggctgccattggaacaagtttttgaacttcagctctgttgagtttataagctctgacggtaagtttgtcagcagaaatccgtcagtgacttccaaggaaaatgttactaagaaatgagattcaccacctgaaatttgctttcatcagtccaaaaaaggatagttactagcttgaaagtgatcaagagtgaacattaccggggaaattaacaagatctggatctccaactgagaagttgaacttgtctctttcggggtgaaatataagtgactcactcccattactctccagcattatatattgaggaacattaataaacggtgggtcatttacaggttcaacgaaaaccggaacatccagatggttgatcccattcttgttctttgtagacagccgaagagaatcaacaccagcaaaattctcatttctgaggcaggcaaagccaaagaaaacaaagttgaaatgaataaaacttgaaactctcttaagatgcaacaaatagtacctgtggtttcatatatacccgagatattgaatcgactgaagtgcgggattgataactcctacttgtccttctaagattaagacccttctatcttcacctccattgctaactgagagttttccacttccaggaggtctaaactgcatcaacatcggagacagaatgactgatcccgaaagtgcttgtaccattactgaaatgttctccagcaggtctgagtagcttatctccaggccagagaagccactataataacattcaagaacaggattactatatatagctgaagtggaatttcattataaagataaattaacctatgtaagcaaggaaaaatgaagaatgcttgcccatatctaggactgattagatcttcagttgcttgcaatccgcccgaaaatgaaacaaactgaggaggagcagtaagaacaaagatgtatactgtagctgcggctaagtttccattgatatcagctattgtataaagaaaggagtcatttcctgaaaaattcttcattggcgtgtatctaaggaggtttccatctctcagaagagaaccatgacctggctaacatcccaaaaccaatagaaaacaacagtttaaagacaaagattttgctactgtcaagtgatttaactatctgcaaaacagaggaaatgaaacattcattcctcacttgtgagaaaccgagcatgcttgcattgtcgccagcaaaatagtcgttttccagtggattgaaagatattgactcatcttcnnnnnnnnnnnnnnnnnnnnnnnnnnnnnnnnnnnnnnnnnnntctaaatcatggcagaatctcaaaaacatgcaaacgaagaatcatatatggtgaaagaagaaaagtaatggacttactgctatacacatttacgtcgaaggggcaaggttggatatgtttattgtcaaaagatatgcacattcggtaagtaccaacctccatggccagatagctaccagtatatgtcccatcattattatctacaaattcccatgtagtgaaactataatgtattagctgaggtgatctcaaactttaaccgagatg

SEQ ID NO: 19558 - DNA, 3303 bp, Arabidopsis thaliana landsberg
gacgggatagcaaacgctgaaccccatcgttggcttccgttgctggagtttgattcgccgttggaagtcgtgagagatatggttcgcaagggtttaaaatatgattgcaagaggaaaaaaggaattgaaaacaaaaggagtgtaacaagagaatagaggaaacatggcagagtagcaacgtcccgacgccggcgattttcacctccgccggcgccagaaaacatggtcgggagagacttctcgataactgtgtctaggaggatattgacattaaagcatcaataagtaattaaaagcatgaagttaaaagaaaacttcacagccctcctctcttagttatttattccataagaataaggattataaattgaaaagaaaatagttaatctctagagtgtcgacgactgtttgaactggtatatttggattacatgatactacacataaaaactctttatccctttcacttgaggagatcatttcttggtagaacatagacactcttgaccttttccgtttttcaaaatctcgcaattacttcgcttttcactagatcctgcttaaaacctgatatactatacgccatgcattgatctttttcgacatggtgtaaactcgaatatgttttctaacttctgttttcatatagatttttgtttacattcaaccaagtttcatataaaaagctagtttttaaccgatcaagtgattttcggatggcaccacaccagtatcttcaccgtacttttcaaatcattaacatctatttggcccgcagagatcaaacatgcattcagtgcgcaattttcaacaaatatataacctttgtgaagactaccatttaatacttgtattttagagtgctatcaaatttaactatctccaaaactatttttactgtcccgaaagtatttgaggaaatgtataaatatactaagttacacgatttgaccacctagtattttgtcatatttgaaaggggcgattccattcttgcattgcatgtcgaaatttcaaagattaatcaatgaaagtttaatagattttacttggaaaagaattttaaattgcaaaatatctctaagtaattaagcactagatgaaagtgcattggtaatgtccaacatttaggattcggtgcataatttttgttgtatttgtttgtaaccaactacaaacataatggtccccaatttatcataatcttgacaagatctttgaaaaatcaacccacttcataaaaatcaatataaaccatatggaggcatggactaaagtagtaatgctccaaaacttgagggcagttttgtaaaatgctgacctaacaacatttagtcaacccttcaacaactacaaaagcactaaacaaaactccattaagtccacttcaatagatcttgtcaatttcaaagcattgtgtagaaatgaatccgtcactttcaggatattatatataatgaatggaaaaaaattgacttgagaaaagcttactagagaaacaatgtgaagagccagttaaacatgaaccaatataaagtataatagtggcttaggtttctaagaagtatacaatagcttcaaagagattatggatatgatctctaaacaaatctactctatgcataattggcttcctttcaggcttcaattctattcatttgctcatgcagcctcataaaggcctaacatgtaaccatcagggcatttcatagccgcaacctagttaaacaaaaaaacaaccgcaaaaatacttcaaatcccatttcagaaagtaagtatgaaatgaaacttgaacatcttcataagaaattgtaacctttccatgtatctcatacttgatagtgccatataattgtgatcctaaagccataagtttagtcactgttgtattaatgtcagtgactgtgaacgatagaagcgatgagtatcccttctcagcaacatgatcgctgcggaaaaaataaagtctttgagagttcttctcagcgataaacagtgtaacataaaagtccaaatccggaagttattttaagggaataaactcagaaagttttcattgaggcaaatgatcaaccaggttgtgtgctttgagcaataatggaacaaaagaggagaaaacctaggagattgcataagagctagcttgatatgaccagaatggagctcagcccagcgtaaagtgacgacattgagggaaaagtcgagaccttgagcatagaatcgagcagcttttggtacgtctctgtgaagctgcagaatccacctaaacgacgccgtcgccatctctctctagacgaagacgaacgagtgtaaaataaaatacaatacaaaaaaaagattggccatttgaccaaaaaaacaaaaacaaaaacaaaaaaaagattggcccaatacacattattgggcttctttcgggctcacctctaaatggtaccgtgtcgcactctctgcaatataaaccagatatgagatatctattggtttatttgaaaaaaaggaaagagaatttttgggttgttaaggcccaaataaagcccataaatcagtggactggattagataatagagtggacaatcctaaattgattgtgtggatcaaaagcatgagcggcttggttcagacgatgttgttatggctcaaaagcgaaaaggtaaaacactaagggatgaatttgggacgtaatctaataaaattgaccataattcttaaacttctagggttccttatttcggaacgacacatatacacaagctttataagggagaggacgatgtcgctgccgattgaaaacaaagaggctttgaataataatgtttgtcataagtcaaaatttactaaatgagtgaagaaatacaaggtaatcttctcagcttcttatataattaagagatttgtttttaaatcggttatcagatagagattaaggataactgaaatgaatatcttaggggttcgatactacagaagcgagtgatggtcctgaacttcaaaaatccatctgtgataaaaggtggtcaccttgttgtaccttagtccgcctttatgctaggatgggtcttcatcgttacaatttgttgaaggtaattctaagtcaatactcttcttctcgatctctttttttgtttgtcaattgttgtattgcaccacaattcaattttttttgtttgatcatcatgggaagaatttacagcttagtcgtgtaaagaaatacaatctgagtccgcattatgctgcttgtaattaatacataaaaatggttgctatggatccagctcacagcaaacttttgaattttcaaacta

SEQ ID NO: 19559 - DNA, 736 bp, Arabidopsis thaliana landsberg
tatacctgggttgtttgcagtgtttcaacggttgtttccacgtttgaaaacttttgcgccatatcaaccattgtttgttgcatggtcttgagggttttggctatcgaagtgttggtagcatcctctccagacattgcggatcacttcgggtatgtaatgcacagaaaaaatctgatgactcaagaatcctccgtccccacagacggcgccaaaatgtggatgtcggattcgcacactcaagtatttatttgttttgtgggagagattattcttgaggacaaatatacttgaaaatagatagatgattatagagaaaactatgagttttgtaaaaaaatgtgtatagtaagtttgcacaaaaatgcgtgtgtctttacatggtccttgacccacaatttatactcaaagaatacatttaattttcatttacacacaattattctatcttaaatgtatccattttagtcttcgaattaactattcaaatgttcgaatttgaattgattccgaacttcctaggcttgatcttccaaccctcttgactctccaatgctggcagttttgacctcgatgtcccgttcacctcgcggatccattactttgtgtgtacttttgctcaaagaagcccataagcctttcctattttgggcactccttcttaagcggcgatctttgaccggtcccgagcccatggtgcgggatccgacaccaacaactatatgtcatgtgtatgatt

SEQ ID NO: 19560 - DNA, 1144 bp, Arabidopsis thaliana landsberg
cctcctgcgcccaagttcgaccgtggttgtcgaaggggacatcggtttctccacagttgatgagaaaaacatcgtctggcttgtatggcgctgttgcggagacggaaacgagaaaagagaaaacaaacaaaatgaaacagatcatcggaattttttttaaaaggttaatgaaggaagaagaagataagagatgtttctatcagctcaaactatctcatacgaaccatcttcttgacgagttattagaatcgaattattcattcttgtctgatgcaataaatgctgattttcaatagtctaggtatgaagcgtgagtggttgaaatttctggatatgactttgatctttttttttttggcacaatgctaagatgaatattgaaaagtctccagctccaacgtaccaatcatactctgtttttattttaacaaaattttataagtttaatgttgaaacgtataattctcacgattgaaggagcatcgacacttccttcaatcatcttgacgactctgttcatcggtggacgatctgataggcatggttaaatgactttgtaattttcttcaattctgcataagtgtaatgtttcagcaagactccttgtagagaaacttcataatttattattgaatctttgtgccgttggagggaatgatgcaatcatatttttggagattacattatcaccattctattttaatgtgttctatagaattctgactttattgatttgatatagtttttcatatttattattaatggatcggaaaaaacgttttcaaaatgtttcttatattttttttataattctttcgatcaaactatcaaaaacaaaaatagacttttgcgctaaataattgtagaatctaaggtttgagtttgtttttcagcttcttggccatcagaaagcgaagaagattcaagaactaactcggtggaaatatgcctagaaggcttaggggggagttcaagagcatccaaactgccctctatcatctcgacaactttgttcatcggtggacgatctgatgggcatggtcgaatacaccaaagactcaccaatatcatcttcttcacaatcttgttgtcctcttcatttatttcatctcccattatccacgtttgatctccattttcaaat

SEQ ID NO: 19561 - DNA, 404 bp, Arabidopsis thaliana landsberg
ggacaggggaatgttctattgtcaaattggacgagtccacttgctcctgttttttatttcaggggttagggaacccttgggcctaccccattacccgttgttgcagggctgggcgtcccaacagactcgttaccaccaaagggttatttaatggagttagtgaacctaagttatgaggagaaaatctatcctattcactttgttggtggagaggtcacaccagaaattgctgcaggaactacaggagagctgcagcccccatggtttctctgccccccagggaccccagggaatcacaaacttgtgtctcggggaaaacacagggcatgcctctttgtgtacacatcacagtgcacttcttatctgaacacaagctaatagcctatctactattaatatgcagc

SEQ ID NO: 19562 - DNA, 624 bp, Arabidopsis thaliana landsberg
tgataatgtcatctgaagagtttacctttacagcttcctcagcttcgtgttcgatcacagctctgatctggttcttctcttcaccaatccgaactgttgtctcaacacaagatgcattctctctaatagcccccccccccgcaaactcggcgtaggtggaacatcgacgcctagtttgtaacgaagatcgcagaacggcttgatggggagagatttggtgaagatgtccgcgatctgttgatgaccaggtatgtgcttcacaattagagctccaagtgctactctctctcgaacataatgatagtgtagctgaaagtgtttacttcttttgtggaaagctggattcgtagagagatacacggaggagagattgtcacaatagatttctggagtgtcaagtagaggaatgcccaattccttgagaaaagatcctaaccaggttacctccgaggcaatgtcagacagagttcgatattcagcttcggttgagcttttggagactgaatcttgcttttgtgaggaccatgagatgatatttgtaccaaggaaggtacagtaacctccaatggatcttcgtgagtctatgcaatttccataatcactatcacagtaaggctctcaatc

SEQ ID NO: 19563 - DNA, 683 bp, Arabidopsis thaliana landsberg
  unsure (1)..(683): unsure at all n locations
ttggtgggttatggcatttgactataatcccattggcacactaaaaagagacaatgacgatgaagtgaagaatgcaggtctcattatattatacacattttttacattcatatatatgtgtgtatgtgcaagacgatgtgacatcacaaaatctatatatatcttataagttaaaaacgacaataaagtgtgatgaaaaggaacacctgagaatgtgcaattattaatagcatagttgtgtacagttaaacaaatcattttgggtatttttgagtctttaattattctaagataattgtcactaagtttctgttttccataacatatgtatttataaaccgtgtgtgatatttctttcctctcttagttattttttttgtgtgtgcaaaacatactttcattcaaactcaacctataggtagtacaaagtttacacaaacatcaacctcattgttggaaacatcaaataacaatactagctctctcacaagagaatggaaaaggaaaaggataggataaatcgaccgtagatccatacatcggagacaagaacaagatagtaacttgccacaagcgagagaatggtgagtcgaagacaattccacgaatacttcgggagattggtgaatggtcacggtccanacaagacatagtgacgttgagaaaaagtctttaaccttgga

SEQ ID NO: 19564 - DNA, 732 bp, Arabidopsis thaliana landsberg
ccgaagctcgcatagtcaacagtattgtgctagaatcaaagcacatttattgagcgatatcctacccccgaaatacttttatgttctatgtcattttgtttttcaataaggaacaatcaacataaatctagttttaattccttgtaatagtttcgcttctatcagaatgaaatatatcttcttcacagacttacaaaactcaaaaactatcgaagctcaaaaagtcgttcctaagggaatgcagagataaaaatccacaaactacaaaaagtcgttctaaggaacgcagcgtaagtttgtcgaagttacaaaaagtcgttcctaagggagcatagtgtaagttttctgttcaaaagtcattccaaagggaatgcagagccaaatactgctgaaatataaggcgacgcgaaaaagtcaatgtgaataccaccaaaatagaaggcgaagaagttcaaaagatgttcctaagggaatgcagaacttacagcgaaaagtcagcgctgatacaccgaaaaataagcggtgaaccgaaaaataagcggcaaagagattgtgtattccactatgggggtgtgagtgtgtgtcttcggcataaatatcattttgcataacataacatcatcacatcatttcgcataacataacatcatacatcatattgcatcaatggcacaagaatgggatacaatgttgaccttcggagaatgcttcgaaaaagtgaaattatgctaa

SEQ ID NO: 19565 - DNA, 1690 bp, Arabidopsis thaliana landsberg
  unsure (1)..(1690): unsure at all n locations
tcttactgcatccattttcttgtactcggcacgtagctttttgatattgtttaattgcatttgacttgtgaaactctagttgttgtttttactgtattctgataccatcaatcacgttgatggcttaatttgtgttgatttaaggaaaattttggagttgttagttaggttcatcggctggcaaagtaatttgaatctctttgacctggctgagtgtgtgcaatatcatgccaattaggaaagtctagtaaacttgcctagtagctattggtagtgtaagaacatgcctagagtctattggtagacaaggtttctttcagaacatgttcttctcaagttaattttgattttccatgtcatgaatgtaatgggagaaacctaagatcaatcatgtccacatttcgtggttttacttttactctcgactcttgtcttcagttgccggattatcataccatcatcggacaatgtttctttaagcacatgttcttctcaaatttaaaaacaacctcaaaaggaagaagagaaagaggaattattcgacaacaatcaaactcatcaacagagactaatgttttgtaagcaaatagaaacaaacaagtactaataatctcgttctttccttttgcctcgtgttccttgtgggatcgtcaccaaactcggagaatacgagcacacgagagggaaaactggatcaggtcccctaggatctacttgttgttggtagtatccattcatgtatccaagatccacttctttgtagtatccattctctccaatcaggtaagctctgtcgttgatctcctcttggtctttatcgaataccacagcgatttttttctcctcgtcaatgaagacactcccagcgaaaaaagcaaacgggataaaagaaccagtgagtggttccatatccactgctaaaaacaacttgcttctacatcacctcttcaggttcaatgttagtcgtaacccaaatctccatatgtaagttgtccttacgctgaaataacacagcaagttgctcttctctaacactagaaagactcacagtatctacatccatagggtaaaacggcaaaggaagacgcggcccaaatctctccgatgtaaaattaaaacagagcaagaaataaacactatgtataagattagtgctgatttctggaaacttgtctgtagcaaaccaataagtatttcccttgagagagacacctcgtgcataaaactctacttcccagtcggaagtgacatcgagaaccctccatgaattagactttaactcgtatatttcgtactcaacaaattnnnnnnnnnnnnnnnnnnnnnnnnnnnnnnnnnnnnnnnnnnnnnnnnnnntacgcttctcgtatcctatagcacagatataccagtccattctatggtcaggactactgggtttgagctacaaagtttggctcctatacggattccaaaccacgaccctagtgtagtctttcgagatacataacagtaaaccgtcgcagtgatatacttcagatatatcgatcagatctgtaccgtttaggctaacaagtttagcttgacggtttatagacgggtcaaagccgttgtgaattccacggaggttgatgctcgttagataaaccttacaatgcaagaccatgacaaccttaaactcactttcccttgatgttgcttcctgagcaag

SEQ ID NO: 19566 - DNA, 413 bp, Arabidopsis thaliana landsberg
accaatcaaggttcaaatgctgagatcactttctgagaagaaaatagagggatacagtggaaggttactctagaagagtcttggttaatcatcgctggtaagaatattacagaggcaagatcagaagaagctaagtcattctaccgtggagttcactttctaccaccatgaggacaaggtgattctcattggagggagtattgataggattgcttcatgggcttcatgggcctcatgggcctcgtatgggtattggtttaagcctgtctttccttagttggtattgctatttaacgttgtcttgagtctttgtaaacacttatcaagaactaagaatgttatcttcatctcatctcttcttcttcctttccttctctgattcttctacttctcatctctatttcttctgtttc

SEQ ID NO: 19567 - DNA, 1033 bp, Arabidopsis thaliana landsberg
gttattttctttgataaacttgggttagcaattggaatttttgggttttaaatatgatgatctgaacaagaagctcttcgaacacattcatgtgtgtcgatagttccatttttttctgtctgaatctctggtttctggtaataataaaaacatgcatgtagacaaattcgtccacttgaaataaaaactattatacatttcagtttaatagattacatatagcatcatcctttcgtatatctgcattacatttaaatagccacttcaaactgtacaatataattactaaattaatataacataaatattatgtaaaactttttctccgggtcttcataaatgtagaacgtttatttacgttatatacaagccgagaacacttaatctggacctaaaataccaacacaattcttctatcttgcatcagcagttaacatacacaaaaaaattaacacattaattaatcgaaaaaaaatcacatttttaaccttcaaagtagtaatggatatcaaaccttcacatattttcactagcactataaacctccaaactaattttacgaacactttaaacctccaaattaatttttctatttgttttgccctaaaagataacggaactgtaactcctgtcaacaaaaaagttaaacgtattttgttaacgaaataattttacattttgaaattaaatagtatttatgtgtcccgtctgataaaatatttttacttttgatattaaaaaaatatataattttactttttgatgttagaactaatttaatcatatcataaataacatgcactacacactaataacaacaaaaatgaataacaatttagaaaatatttgatagcattatataattttctatttttgaattgtaactgccaataaatctattaatattatagattttaaatagaaatccaaatattttctttttgccgtctaatttaattaaaaaccaacacattgtgaccagagtacaaacaaaaaacagagcataaaaagctcaaaacagagcagggctgcc

SEQ ID NO: 19568 - DNA, 494 bp, Arabidopsis thaliana landsberg
gaagccaagacgaaccagttgatggccattaagagaatctccttttaacggaaggcgaaggtgaagctggagtttgcagtaccaactgaaacaggagagaagtcgtatacactctacttcatgtgcgattcttacttgggttgtgaccaggagtattctttcactgttgatgtcaaagattctgatgccgcagatcacatggaagaatgatttatgttttctggttagttttcgcgtctttctttgttttctggtcataattttcgcatttagctactgtggtcgatcttaccttttgtaatatcaacatttgcttactagattctgcatcgtagctggagtttgcagtaccaactgaaccaggagagaagtcgtatacactctacttcatgtgtgattcttactttggttgtgaccaggagtagtcttactggtgatatcaaagattctgacgctgcagatcacatggaagaataatttatgttttctgctta

SEQ ID NO: 19569 - DNA, 323 bp, Arabidopsis thaliana landsberg
atccattaattggcattcttaattcaatctcctttagctgcttatcaaaaagggcttttgtatttctttgttaattccttcttgaatcttccagggaaaggcaccgtcggtttgtagggtggcggagcaaatttctttattcttttctacaaccgcatcttttctttcttcaaaagttagctttgctcgatcgagtagagggtcgagtgaagctgaaggctgatcaagtttagttggttcatcaatttgaacttcgtttttatgtggatcctccccttcttgaagttcactatccttagtgatctctctttggtctgattatt

SEQ ID NO: 19570 - DNA, 1286 bp, Arabidopsis thaliana landsberg
atatctagtagagatggaaaaaaaatcattttgacctatgttagagagagaacagggctgatttatgtaatgagttggagaagctatgaattagttttttattactcaaaataataggatgtgctttttttattactcaaactaatgcaatggacatcaacaagacaataatagctaactacaaatgtatgaaaatggacgtaattgtttttgtcggtaagcctataaaacttccactagaaaatgttcgacaatatcaacttacttgaggagtaaattatctctttctaaaagatgcaagagatacaagaaaggaattgaagaaagaaaattcaagagtaaagaaaatacaaataatatcaagttgaacaaaagttgtaagtgttgaaacttttttgacaaaacttttccggtgactttccggccaaatttcgaccaaacggctgaacggaattgtcaggtcattagtgcattggaaagctggtaaagagtgctacaaaatggtatactcatacgtcaaaaacggagttgtattgaataagaaataagggtgtaaagtgggatacttgggccaaacctgatcgaaccgaaccgaactaggatgagccgggctgcgggttgtcgggacgtcccatagtcgactcaagggctgtcgggcttgcggaccgtcatgcttgtgagttattgggcttgctgagttgaatcttatggaaatattctcagaatagtctcaaaatattcttaggatagtctcaaaatatgtcatgcatatcctgagaatattctcacaaaatcctattttcctctactatataaagagacccagcctctcattatttctcaagctctcaaagacaaaacactctaaattctaaagtctctcctctctcttgcttcttagaagtaagttcttagtttaaaaacatcatactgcttaacatagataattatataggttaaacaaaagctcgataaacgcatcaatggcatcaacttccgattcgggctacatctctatggggctcactctaaagatcgcgaatcaagatctaaacctcgacgattttaaagaatccaccatcttctcatcttctgatcaagctttctccagatttactcatcattttcggaggatacgtcatcaatcgacttccctcttggaaagaacttttaaaattgggaagactgtgaaaaaggggatcgaaaccctaaatttttattaatatgagcattatgttataacctatacaaatatgtatgtctctgagaacatataaataactgcg

SEQ ID NO: 19571 - DNA, 521 bp, Arabidopsis thaliana landsberg
tggatagatccggttttgaatctattgtctagggtatttgcctttcgcctgttagctacttgatgaaccctagagttgcccttatcaatgaattcatccttaggacttctattcttcttagatttatttgtattcaccccttgattgcacttttatttacctgttatttcattcacctgttgagttacctgttatttcattcacctgttgagttacctgtttttgcattttatttcttaaatttgttacatgttggttccactcgacccaatgatcgagtagggcacttaagttctcacttttgttgtttgaatcctttaggattgttactagaatcccaccatcattataacatggcttgatttagttgcttctatacacatcttgattgttagcaataacagtggattggtttgacaccccctatagctgcatcgacatgttagtgtttaaggagaaattgaactaaacatcacatttaccatagttaggcctaaaaatctaactatcaatttgacgtc

SEQ ID NO: 19572 - DNA, 523 bp, Arabidopsis thaliana landsberg
ttgtcaggctagatctgtctgagaattgtatcatggtactaccggcaaccataggagggcttatttctttgacgaggcttgatttgcattcgaatagaattggtcagctccctgagtctataggagatttgctaaacttggtcaacctgaatcttagtggaaaccaattatcatctcttccatcgtcatttaatagattgatacatcttgaggaacttgatttgagctctaacagcctctctattctccctgaatctattggttctctcgtgagcctaaagaagctcgatgttgaaacaaataacatcgaagagattccacatagtatctttggctgttcttccatggaagaactccgtgcagattacaacagacttaaagctcttccagaagctgtggggaaagttatctaccttagagattctgactgtccgttctaataacattcggccaactacccccaacaatgcctttcatgggttaccctcaagagctccatgtgagattcaaacgaccttgattt

SEQ ID NO: 19573 - DNA, 540 bp, Arabidopsis thaliana landsberg
tctacgcttggaatgcttataaactccattgacttgattggttctgttagagctcgttgaagaaggagcaataacagttccatttgctccattcgaattcgatgcggatgatttcgaagaaggcttcgagatactactaatacccgaattgggaatgtaatatgaattaaccccaccttctccgtttggattcgagtcattatgcgaagattttgaaggttttctgggcaatttcccaaatatctgtttgatcataattacagaaaccctaaattatctccccacaaaagggccaaaacccttccctttttttctctacttcgcaacaagcctaaactaaaccagtaaaacccaaaagctttggttctaaatcaaaaccctaatcattgaacacagccctgcatgtagacaaagcctaaattcataatcggaaacacaatctcataaacagaatcaaagattaccttaagaagatcccagagaaaaccaacaaaatggttaactttggaagagagggggaagaagtaggagctttccaat

SEQ ID NO: 19574 - DNA, 721 bp, Arabidopsis thaliana landsberg
  unsure (1)..(721): unsure at all n locations
gctccagttccactgccaaacacaagacaaccggtttggtgttataatacaagcaagaatcaacaaaaaacaataaacttcgcagataaatcgatccggtttgaatgagatatgggggaaaagaggattttacctaaaggttctttgaacctcttcaccagttattgcgtttgtagatgagtatttgttgcttccacggataagaactcttgtggttgcgatggcatcaatgccttctgttactgcattcattgagtactcaagcagagtagccggttcctaaagggggaaaaaggttttcaataaccgatgacccactggtgagttatttgtagatgagagcctcagcggtataaacagtacctttacgataagatctactgccttgtaagctgaatccacaggcccagttccaatagaacaagcgacatgttctttgccatcagcgtcagcaagttttacagttgctgttgaaagcccgagagttccacaagttatctgcattccacttttaagtaccatgagaattggataaagacaatgaacaagaaaaaagagtaagaaagcacattatgatcccaatttcacctgaatgtccaggagtttccacacggcttctggctggaaaacttcatcagatactaaagctattatgttcgcatcagtaactctctggnatcagcagggaacatatacgatcagaagacattacatttacaaa

SEQ ID NO: 19575 - DNA, 508 bp, Arabidopsis thaliana landsberg
  unsure (1)..(508): unsure at all n locations
tttctgaacatgaatcagtttaactcggattgttcggtagcttattaacatgcatgcattctagtccaaacctctgtggtctagtggctgatgaaactttggtgaagggtgaaactcgcagatccgagttcgatttttttaaaaaaacaaaaacgtatttgtctggaaagtctctccatttgacaaaagcccaaactcgtatcaggtactgtggtggcgcaattctacttagatcaggagaagtctactcgatagcacctcggtgcgttcctaccaaaactcaccgaattagcttatagggtatataaaagaaaaaaaaatgcatgcattctattgtgtatagagattattaatcataactttaagtttataaactttgtttgtagaagtagattcaactatttttttgaaaaatgtggactttaaacaaaatttcttactttaaatatttaangaggtatttctttttttgatctctcaccatgatttaatggagagagtgtcgtgt

SEQ ID NO: 19576 - DNA, 2132 bp, Arabidopsis thaliana landsberg
  unsure (1)..(2132): unsure at all n locations
catctttctctcctacttgcatctactgatgcagatgttgttaaagcctgtctgcagacgttagctgcctttttaaaaggccaactggaaaatactccatagagatgcttctctgaatctaaaactattttcccttgcacaaggctgggggggaaaagaggaaggccttggcttgacgtcatgtgccacagaacacagttgtgatcagctttttctccagctagggtgtactcttctttttgagttttatgcttctgatgaatcaccaagtgagcttcctggcggtttacaagttattcatgtacctgatgtcagcatgcggtcagagtnnnnnnnnnnnnnnnnnnnnnnnnnagtcattgatcacaatgttcctcccagtttaagatttgcgttgctgaccagattgagatttgcaagggcgttctcgtctttggcaacccggcagcagtatacatgcattcgcttatatgctttcattgttttggttcaagcaagtggtgacactgagaatgttgtttctttctttaatggcgaaccggaatttgtaaatgagttagttacgctggtaagctttgaggatcctgttccagagaaaataaggatactatgcttgctatccttggttgcactatcgcaggatcgaactcggcagccgactgttttaactgcagttacctctggcgggcatcgtggtttgctatctggcttaatgcagaaagccattgattctgttgtttgtattacttccaagtggtctcttgcttttgcggaagccttgttatcccttgtgacagtcctgggttcatcatcgtctggatgttcagccatgcgagaagctggtcttatcccgaccctagtgcctctcatcaaagatacacatccccagcacttgcatttggtcagtgccgctgtgcatatattacaagccttcatggattacagcaatccagctgctgctttgttcagagatttgggtggcttggatgatactatctttcggttaaaactggaagtctctcgaactgaagacgatgtgaaagaaattgtttgctgttctggtagtaatgggcctgaagacgatactgaacaacttccctattctgaagcattaatttcgtatcacaggagattgttgttaaaagcgttgttacgtgcaatatcccttggaacttatgctcctggtaacactaacctctacggttccgaggagagcttgttgcctgaatgcttatgcattatcttccggagggcaaaagattttgggggtggagtattctcgcttgctgccactgtcatgagtgatctcattcataaagatcccacttgtttcaatgctttagattcagctggtttaacttctgcctttcttgatgctatatctgatgaggtcatatgctctgcggaagctataacatgcattccgcagtgtctggatgctctgtgtctcaacaatagcggtcttcaagctgtgaaggaccgaaatgccttgaggtgttttgtgaaaatatttagttctccctcttatctgaaggctcttacaggtgatacacctggttctttgtcaagtgggcttgatgaactcttgagacatcaatcttcgttgcgcacttatggagttgatatgttcattgaaatccttaattccatcttgattattggatctgggatggaggccaccacctctaagtcagcggatgtgcctactgatgctgctcctgttcctatggaaattgacgttgatgagaagagcttggcagtttcggatgaggcggaaccatcttctgacacttctccagcaaacattgagctatttctgccagattgtgtgtgtaatgttgctcgtctctttgaaacagttcttcagaatgcggaagtatgttccctgtttgttgagaagaaaggaattgatactgttttgcagctattctctttacctcttatgcctctatcaacctctcttggtcaaagtttttctgtcgcttttaagaacttctcccctcagcattcagctggtcttgcccgaatagtgtgctcctacttaagagaacatctgaagaagacaaacaaccttttggtttccattgaaggtactcagcttcttaaattagagtctgcggtccagacaaaga

SEQ ID NO: 19577 - DNA, 585 bp, Arabidopsis thaliana landsberg
caaacctttctgaacttaccgttctcaccctctcttggaacaatttctttggtgaaatcccaactgcttttgggaatctaaaccagctgacccgcttagatgttttttccaacaagctcggtggaaactttcccaatgtcctactaaacttgacagggttgtcagttgtatcactctccaacaataagttcacaggcacgcttcctcctaatatcacttcactatccaacttgatggctttttatgcaagtgacaacgccttcaccggaacattcccttcttttctcttcaccattccttctttgattagacttgatttgagcgataaccaactcaaaggcactcttgagtttgggaatatatcttcaccatctaacctacaataccttatcattggcagcaacaacttcatagggacaatcccgagatctctttccagatttgtcaacctcacgctttttgacctttcccattcaaacatacaaggcccagttgactttagtatcttctcgcatctcaagtcgcttgacgatcttaggctatactatttgaccaccactacgattgacttgaacgatatcttac

SEQ ID NO: 19578 - DNA, 994 bp, Arabidopsis thaliana landsberg
tcttttcggcgcctttccatcgtttgcggtgtgctcatcggaattcgcttggtacttataagttggtggaaaatgtagagttccttctgaccatccatcaaatgctctaccttttctgtattcctttaccagctgcattatataataatcataagtaacaaaatgtgtcacaacataagttgaataaacttcagagctatggtcggatttgagacagtgtgtgtgtgtatttttatttgcattagacgtcttctaaagttatatttgagatccaaatcctaacagtaacaaaggtaatccaaataattacctggtcatattcaagtaatttagaccattctctcttggaaatgaggtctctggttttctcatacgatgaactaagccgatagttgagatcacctagccagattattcttctgagaagtggtgaaaacacacaagtaaagttagacaaatcgaaaccgtaacgggttttttgagttaaagatttatttggaagagagaaaaaaagactgactcgtgatcatagataagcttgggaagtccaagagctgagacagagtgaaagactgttcttttatgtatctcgtgtacatcagcattcctctttatctgatcaacctctctttctcctgccgttaaatgcgtgtttatgaaacaaaagaacgtctggtttatcgacatgctcacagacacagctccctgcagagaccacaaaatcacttcacaatcctgaaacatattgtaacataaatttgatggaaacatctaatctttatatatataccttgttaccaatatatcccataacgccaacaccaacagtagagactcgtacgttttgaatatgtttccgcaagcttcgtttaacccaaatggtcaaaagaatcccaaccatttgtttactcactagcctcacatatggcggactcattatcctttacattagcaacttgaggtccatttccgctagagctaaaacctcaggggg

SEQ ID NO: 19579 - DNA, 442 bp, Arabidopsis thaliana landsberg
aatggcatcaactagatcactttttgaacaaatgattgccgatcaaaatcaagagtttgacatgatgattgctaaactgttggaagcgattcgactgcgtggccttcaacatcaacaattagagaactcggaggtggagaatttacatgttgctgcttttccagcgattcacagccaagacaaaccttgaagctcacgtctggcgactaatgctcaagcgcagcagtatcagatcacggggatggtggctgaggatctgacttcatgtgttgagattttggaagttaaaattgagaatcaaaatttgaagattcataagcgatttgcagcgatgcctatgttattaaggtttggtcatctcataactatcgtgtgcataatcaatttcgatccttacaagcatctgctagattttttttagatccaaagtttttttgagatt

SEQ ID NO: 19580 - DNA, 1253 bp, Arabidopsis thaliana landsberg
atcttcagggctatgtgctcggtaacccgttaacagactatacaactggtagtaacagccgcattccatttgcccatggaatggcactgatatctgatgaactctacgaggttagaaacaatattagattttgcttttgtttcttgtccttacaaggaaaccggtttttttaaaaaaataccatttggttcgcagtcgttgaagaaaacctgtaaaggagaatatacaaatgttcatccacgtaacacacaatgcttgaaattcgttgaagaatttaataaggtttacacactcaagcgccttatttattttgtggttattaaagattcatgatcactaaattcagacactttttttttgtggttatttatttttagtgcacaaacagaatattccaacaacttatactagatccgttgtgcgaaactgaaactccagattgctatgtaagtaatctatatatctaaatgtcctctattagccgttaaacaatttggagaaacggaatttatatacttttgtagatttatcggtatttgctaactacctactgggccaatgacgcgactgtgcgagaagctcttcaaatcaataaggtaccaaatttatttttaaggttcttggtaaaggaacaaagtcattctgataggaggatatatgatttcattcatgcaggagagtataggggaatgggtacgatgttatcgcactattccttacgataatgacattataggtagcatgccttaccatgtgaataacagcatcagtggttatcgttctctcatctacaggtgagagtttaacacttgttttgtccctaacaagattcaagactaaaacttttgcggtttttggtgaatagtggtgatcatgatttggaagtaccttaccttggaactcaagcttggataagatctctcaactattcaattattgatgactggaggccatggatgatcaaaaatcaaatcgctgggtatgtaaatggattctttttttattctttccctataggagactcactttgaaattcactcttgactctcttgcttggcaggtacacaaggacttatgccaacaaaatgacatttgcttctataaaagcaagtctttcttctttcctattttatccgctcgaatacattttaattgcggatttttttaacttgaaatgagatgtgtgggtatttgattatagggaggtgggcacacaatagagtttaaaccagaggcagcctctatcatggttc

SEQ ID NO: 19581 - DNA, 543 bp, Arabidopsis thaliana landsberg
tgaaaggacaaggagtacgacttcatgcaacggtacaaagtgttcaggccccagtggcgcagaaagacacacgcgcatccaacagaaactgccccgacagggttaggcatcgccccgggaaggagccgcgccttcggcttcgtccccgccctcggcaaagtccgtcctggcttcggacgacggcgcaggcgggaggatctctgcctcaaaggtggtcgccagcactacgctcagacccgcggtggccgcatcgagtctctggacttctgccagggcggcttcatcttcgtcaggaaggcaatacccctcgctgacccgctctaggtccacaacgtagtgggaagcgagcacgacgaaggcccgcctgacgccgtggtgtagcgcctcgcagagtctgccgcgcacatgattgcccaagacctgcaggcgactttgaggggagcttctgaggggacgtcgccggagccaaggacccggcaaaagtccgagacggcctcggacatggccgcgtggtcgcctccctctgctcggccacccggcaag

SEQ ID NO: 19582 - DNA, 384 bp, Arabidopsis thaliana landsberg
gaggattgttttgctatcttctttagcttcattgaaattttttgaagtgaggcatacttagtgttgcttgcttgttcggggctggcgttaggttgtcattgttgctgatataaacactccataccctattgtttcatgaccatcagctttatcctgttcatacgcaaagcaaacaaacacttacttagtggagagtccgcttcctactctgctgctcggcatttgactcaagctaaatcgcttgcaaggacacgaaggactcacatactaccattcactgctgaacttcttactctgactaccttgcaccttgcttagcaagacctcgttttaactactcctgtgtacttggtccactactatcattatcgcatacccttttaa

SEQ ID NO: 19583 - DNA, 779 bp, Arabidopsis thaliana landsberg
gcccagaaattcttttctcatgattctgcttcgcaggaaatggagccaaaaatgattgaaattgttattgaatcaaagtcaatagcgcaagcaatggtggatgcagctataaaggtatttataatatatctagagacttcagagtcttctaaatacagagaagccaaattcatacaactctaacatcttttgtttaaatcgttgtcaaccgttttaggctgcatcgtcggggaagaacaatgaagactcagagaatatggttcaccaagctttaagctccattggcgaacatcagccattagacaactctatagtgcctggtatcaagcatcaagagtataccaatggcagcttggatcatcatcccttaaacacagcagagccgatgagtaacggtttcatctcacaggaaggatcaggaaaaaacaaaacaccaatgccttcagagcttatcacctcttgtgttgcatcttggctcatgatgcaggtaaaggaaataattttgtcttggactaacgaaagtgtaatctaaatcaagaataccaaagttttcacttgatgcggttttgattagaactctttgtgtgttatttacctgcagatgatctcaaagaagcagtacccaccagcagatgtggctcagctaatggatacagtagtgaatgacttgcagccacggtgtccacagaatatgccgatatacagagaaattcaaacttgtatgggattgatcaagactcaaataatggctcttgtagcacgtcataaacatttggtcc

SEQ ID NO: 19584 - DNA, 1522 bp, Arabidopsis thaliana landsberg
ctcaaaaaaatgtaagaacactataattaatcataaagacgtcggtcaagcaacactgcttaataatcaaagtataccaaaaactttagaacactaattcaacattacaataaaataacaaataaatgtgcactaaattctttgcttggactttggatttttaatgatccattccatctaatggtaacatttcatttttttgtacttttaacaactcgaaattcatttataagaagatgataaaatgtaattcttcatgtaattgcgaaatttatttgacataggaatatttagttgtagatatcgaaatcactggtaaataaagaaagaaaaacattcatctcacatttcttcaaagagataccaatctccaaaccaccaatctcatccctccttgccgacatagaaaactcattgttcttgtaaagagacataacatcagtcttaacaggtcttccccacccgaaatccgacccgtatatcccaaattggtttgatcctgtaacagtcacattctgtgtatccaatttcatattttttgttccatcctcatacacttcccatattgactcaatgtttcgtgaacccaaacctctaaccgaatcacttaaaatctcaactccgttaacgtatccatcttttcctagaaacgttgtcgctttgtatccattgaaatcaattggtaagacacaattcccaaaatatgtcaaaggaaccggtggatctaaccggtttctgaaatcagcagcatacataaaccgaaccggtcgattcgcgtctcctccacacgacttaaccatgcaagtcaacacataagcgtacgagactacgaacgttgataaatgaagatcggaccgggttgactcgttcttggctcgttctttaagtttttcgatatccacttccgtcaactcgagcgtgacccgaacaacgtcgttatcgatctctttagccggaggaagcgttaaggttcttgcatagtctttctcctctgagatatacgaagagagctgaaagatcttttgctcgagtccggccggaacattgatgaccgtacgatctaaaaccgtaggtagatcaaaatcttgcggtgtggttccgtgtttacatatatgagcccaagatttatgaaactttgacgcagttttgccgtccatgacgacatggtgaactgttgttccgatggagaaaccttggtttggaaagagagtgatttgtagaaaaagaagagacgctgagtcagaggaaacttgtagctcagggacaagagaacgtaactctgtctccagacaaagcactttgtcagagattcgtgagaagtcagcctcggactcagccactgtgagagagacattgtctttagggaagacgatgatatgtggcttaggatcttgcgggttccatttgaggtgaccggagagtgggaggaagtgggagaggacgaggaaaagggagtgttcgagtttggggaggatggaggagaagaaggagtcaccagatgatacgacactagcaacactag

SEQ ID NO: 19585 - DNA, 1215 bp, Arabidopsis thaliana landsberg
atagaatttgtgcaaaagacagccagtagcgccatatataaattatatatacgtcctgccacgataaatatacaactaaggaaatgaatttcaaaatagctattgatggtttaacactatatacaagatgaattgtacctagatcaaacacttccaagccaatataagaaactaaaggtttcggtatgacgatagttgtatgtccagcataagccatcaacagtggaagggttgcaaaagatggcaagagaagtttcctgcaaattgacaagagttaataagaaaacaaaactaaatcatgaatttttaatccaacaaaatgagaactgcacctacactctccaaggcacatcaaggacgtcatctacaaatccaagcaatatcatgaagcaaatagacgccagtgctgcattatactccacaagccactgcaccgagtcatttagccagattgataaattgcattcaaagtaaatgagccaagagctaccaagttcatagttcacaataaataaatgatcaagcttgagcttttgagaccaggacacttaccaccgaatcttcagtgaaattaaagaactgaaatacaatcgccactatcaagaagacaataccgacaacaattcccaatgactcaggcctacaaagaaataagattgctgaaaataagcacatcaaaagactttaagtcccctgagatcaaatcaagcgtaaacatccatagaacatcaatcagaaaatgagacatctcatagttttcctcctatacaaaaaatcaaatctaagagacatccatttctagaaaaacgctgaacactaatctgagaactaaacaaagacaaatctaagaaggaaaaacatacactctaacttctccttgaggagtgcctcttttgttgatatcaaaaccaaacatattacgcctcagaacgtatctagcagctacaggaatcaacttgagtgtgacaaagaatccaaccaagctaagcccagcgttaatgaggatcggacgcttgagctcattgtcaacattgtagtggaaacagagaaggtaaagataaagcgaacacagaagcgaagagatcacgaaaatcacgcccaatttcggcggagcgagctggaaatcctcttcggaaacagaggtctttctgaaccgtcggggacgatgcaggttcaggtagagctaagttctccgaattggacactgaaggagtt

SEQ ID NO: 19586 - DNA, 1608 bp, Arabidopsis thaliana landsberg
  unsure (1)..(1608): unsure at all n locations
aaaatttcgccatatgtgataggtaggccggttcggttcatcctgatcttaattttgagtttagttttcccggtttaaatcaaatttggttcacattgtatacttggcaggtggtttgcgtcggttccagcgtcgacgcagccaaaccgattgtacgtacactcggcaacatcacatggagcaacgagcaacgacaagaaattgctactcgaagggtttccacagaagacgatattcgagtctctcgatgaagctggttttagctttggcatttactaccaattccctccttccactctcttttataggtatttttatcaacaatatatacgttttatttgcttttcctattgaaatcgtttattcagatattaattaatctagttatctttagctttataagaattgtataaattttgtctctttttggctatttccgtctatcattttataatgggtgttaaatcaaggttattcttttgttttggatatctaataaatatatcaaactgcaagactcgtttcagtttatgaacaagtttccttcgttgtgcagattgtaaaaccttctaattaaaacattaagatagtcgtatatataaacaaagtaaatcttatagtaaaaaggataatcatacaaaatatatatatataattgtattaatagtttactttttaggaatttgagaaagctgaaatatttgacacatttccaccaatacggaatacaattcaagaaagattgcaaagaaggaaagctacccaactacgtcgtggtcgaacaacgttggtttgatctattgtcaactccagccaatgacgatcacccttctcacgatgtctccgaaggtcaaaagctcgtgaaagaggtctacgaggcattgagatcgagtcctcaatggaatgagattttatttatcataacgtacgacgagcatggtggattttacgaccatgtacctactccagtcgacggagttcctaatccggatggtatcttgggacctccaccatataattttgagtttaaccggctcggtgttagggttccgactttcttcatctctccttggattgagcctggcacaggtgaacataattactagtcataggcattaatcaaatttagtggtcttatattttctaatcaagatattaatgtttaaatcaaagtaaatgacaattttggtaaaatgtgtagttcttcatgggccaaatgggccgtacccaaggtcacaatatgagcattcgtcaattcccgcaacggtcaagacaattttcaaactcaaagatttcttgtcaaagagagattcatgggctggcacttttgaatctgttattacgagagactcaccaagacaagattgccctggtaattacatttttttctttcatcttctctatcaatttaggtaggataatatcgactaaaacttcagttttttttctttaaatagaaacattatcaactccgattaaactaagagggacaatggcaaaagaaaatgcacaattaaagcgaatttcaagaagatctcgttataatggctgcgggattaanaggagactacanaaacgaagaattaatccacaagctatgtaaagaaa

SEQ ID NO: 19587 - DNA, 999 bp, Arabidopsis thaliana landsberg
tttgtctcatttatcttgtgcaatttatattacctcatccgcacttacataattcattaatataaagaaggccaattcgagcatcaacttataattagacaaaagacaaggaaagacttgattaactaatctaattaagtatctctggttcggcttgacgaccgcttattgctttcgttggttgactatttttagccacacttgaaataagacttgagatcttgatttataggaacaccatctccacaagcaacaataagacgataagcttgtttccattgcacaggatctttaatatacttacacatacatggtcctggtattatactagtctatcacaacatctgtccaacgtgggtatatctttcatatgttgcaggcataaatgaagtgactctttgcaataagagagcgttggagtggggaatgatgtcaagagtacgaccaaggtggtgaacatcaatgaaatgttcttcattttctgattacttagtatctcgtcaaaaatgttgtatgtttttgttttcttaatttgggcaaaaatgttgtatgtttctaggtctttaaatagaaaactgaaatcagaaacatgtggcaatattgagaagtggtggattctatttttacaaagcaattagtattcaaaacaaaccattgaatatttcggaaagccgattccataagaagtggagatagagtactttattggtattagaagacatcgtgaaggaaggaatgaaagaaagaaaataaaagcagttgatctcaacgtatctatggagtttgatttgatttttgtgtgttttaattttccatcagaaagaaaaatgcttaccattttaatttttgattaagaattacaatagtaagcattttatttatgtttatttacacttttatttatgtatttttgcgtttcatttcagatttatttatgttttccaccataaacctttaacactatatttatagcaacgagtttcatgattttgtaacgtg

SEQ ID NO: 19588 - DNA, 1190 bp, Arabidopsis thaliana landsberg
tcctattcagatatctaagcctaaaattcctctgttttcgattcggaaagatctttctctttatctacgtgagtatatgtacattggctttacttcagtgggaagtccaacttcttctcactacattcttggctggagtttcaacaacactggagcggtttcagatataaatctctctcgtcttcccaaagtccccgacgaagatcaagaacggtcgttcagttccaagatcttggcgattagtttaagtatttcaggagttacactagttatcgtcttggttcttggagttatgttgttcttgaagaggaagaagttcttggaagttattgaggactgggaggtgcagtttggtcctcataaattcacttacaaagatctcttcatcgccacgaaaggtttcaagaacagtgaggtacttgggaaaggaggttttggaaaagttttcaaggggatcttaccgctgtctagtataccgatcgcggtgaagaagatttctcatgattcaagacaaggaatgagagagtttttggctgagattgctaccattggtagacttagacatccagatttagttcgtcttcttgggtactgcagacgcagaggagaactttacttggtgtatgactacatgcccaaaggaagccttgacaagtttctttataatcaaccaaatcaaattcttgattggtcacagagattcaagatcatcaaagacgtagcctcgggactctgctacttgcatcagcagtgggttcaagtgattattcacagggatattaagccagcaaatattcttcttgatgaaaacatgaacgcgaagctcggtgattttggacttgcgaagctatgtgaccacgggattgactatcaaacctcgaatgttgcaggtaagtttgtgtttttatgatcattataaacaatcaatcaagatctctggacttattgagggttttgtgttgttactttggacgcaaggtacatttggatatatatcaccggagctgtcaagaacagggaagtcaagcacaagttctgatgtttttgcatttggagtgttcatgttggagattacttgcggaagaagacccattgagccaagaggatcaccaagcgagatggttttgactgattgtgtactagactgttgggacagtggagacatactgcatgtagttgatgagaaacta

SEQ ID NO: 19589 - DNA, 716 bp, Arabidopsis thaliana landsberg
caataaataaacacaatcgaattcgaaacttacaattcctaataagaaattaccttttacagctttatttaacaaaggtttcatgtaaaaagaatggtagggaccgcgcgaacgcaggccccctctgccacaaataatgacgcaggctctcccacttggggagaccttaagctaagcacccctccgttatgtgcaatggaggtcactagcctaggccactcgtcttattgatcacaagttgaccccgtccaggtaagtaattttctcagactgtccacatcttcacttatactctgcttcctcaatcattctttcaggtcttagcgatgtgggactctgcaaattaacacatctcacacacctattggtctctttttaacgagatgagttttatgttatacacatgagccatagcccatatgtcctctaggcccattgaagtgcatactataaattggttttttttttattggattatcagactgttttaaacacgttcgcttgcttgatacacgatttcttaaatattgttacggaagctgttaatatatttttttcctttttcacaagctgttagtgtttctgtttatttacgcaaggtttagcgtatctctcatctggttcagcatctcctactttagtagtacgactacaaacatgacagcttctccttctctcttccatggcgattctcgtcgtctgaattaggtactttt

SEQ ID NO: 19590 - DNA, 382 bp, Arabidopsis thaliana landsberg
  unsure (1)..(382): unsure at all n locations
gtttacattatcataacatatcggataacagggtatggtgcacatatgtcattgataataaagcaatacaaggctacctacagcccataggcatcaggataaagtaaagtgtaaagctgtaatccttaggtttcaagaagtaatgcgggtagtaagttataaatgaataggacataatgggacagaggacacttgcttaccaaaccgtgatcagggacttcttcacctctgggaaacacaacgctcgtgtctactaagaatattacactatgcacttggaagataacaacaaacaacannnnnnnnnnnnnnnnnnnnnnnnnnnnnnnnnnnnnnntagccttgggttctagtcgggtgagacatacaaggatatatcact

SEQ ID NO: 19591 - DNA, 517 bp, Arabidopsis thaliana landsberg
attttgccagccctaaaatgttataattttttaggggtttctttgttttattcgaaaaaacatagtcattagctccattcatagtctttagctcctctgtcttgttatactactctcaccaaacgtaagttttgcttgtttcatttttctaagtttttgttgatatcaaactagatttgaaggattttataatatatgtgacgatctatggcatgtcgatataatctatgtgacatagaaaatactcttttggagggttttcttatgttcatgcaaatttttttatgtaaattgcatgctaattatttggataatttcgtttcaaaattaggtttttcttggaaatgaagacaaaagctgggaaacaaaagaagagaagtgttgactcggatgatgatgtctctagggaaaggagaccaaagcgagcaacatcaggcacaaacttcaaggagaaatctctccgtttctctgaaaaatatgaaactgttgaagccaagaaagagcagatcgtgggtga

SEQ ID NO: 19592 - DNA, 1284 bp, Arabidopsis thaliana landsberg
ggctaatctctacctctatctcaccaactccatgtagtggaaagattgttgcatctttcaagcataatgctagcttgttagaagtgagaactttgactttgtaattggagacgaagaccagattaatacaatatgttaataaaataaaataactaaaatcaaaaaaaaaaaaaagtcggtagggcaatatcgtctttttccgatcgtggtcgtttcttacaagtttcttcgttcgttctctagaaacgcagaaatggagactcagtatccaaaactaatcgaaccatccaagacccgaattggatggattgggatcgggataatgggatcagcgatggtttctcatatcctcgccgcaggctattctgtcacagtttacgctcgcgatcttcgtaaaacaaaagatctgcaaaccaaaggagctcgcatagccaatagccccaaagagttagcggagatgagcgacgttgtgttcacgattgttggaaacttcaacgatgtccgatcgttgcttctcggtgacgatggtgtactctctggtcttacgcccggtggagtaacagtggacatgactagtagcaaaccaggattggcgcgtgaaatacacgcagaagcgaggcgtaggaattgttgggcggtggatgcgccggtatcaggtggagacgctggagcacgagaggggacgttagggattttcgccggcggagattcagagattgtggagtggttgtccccggtgatgaagaatatagggactgttacttatatgggagaagcagggagtgggcaaagctgcaagatagggaatcagattgctggtgcgagcaacctggttggacttgctgaagggatagtgttcgctgagaaagcgggtttagatacagtgaaatggctcgaggcggtgaaggatggtgcagctggatcggcggttatgcggctgtttggggagatgatggtgaagagggattatagggcgactggctttgcggagtatatggtgaaagatttgggaatggctgcagaggcggcgatgcctggtgctgctctgagcaagcagttgttcactggaatggtggctaatggagatggcaagttaggtattcaaggcgtcgtctctgttattagaagacttaacggcatatcctgaaaacacttgtgttgtaaaacagagtgttccaatgatttcacgatcaactaggcaaacttgtcttagatttggtttaagttgataataagaagaacatcgagtctcaccaatctcaataagaaacaaaaagcatttat

SEQ ID NO: 19593 - DNA, 469 bp, Arabidopsis thaliana landsberg
ataccattgtcagggaagttgcttgaaatataaactttcaaattttggtgacacttctttgcaagcatgaggcctgggccaaatccattcttagatctactttctaagcatacacaattatcattgtacataatatgctggttaagaaactggatacgccacctttgattcgcactgctcacataccagaaacactgggttagaatccttctcaatatccgtgtatcgcatgccaaacataaacatatttgagagaattggttctcttaatatctggcataacatgtacaagactcaatgcagggtcatacacccggtggcctactatgccgaacttaatgaacctgagcttctactttatgcgagacaacccgatagacgaacatgattgaattcacagaaagactaaagagtgagttattatcttaaagaaagagcatatatcttaacagagagcttcattacttac

SEQ ID NO: 19594 - DNA, 610 bp, Arabidopsis thaliana landsberg
  unsure (1)..(610): unsure at all n locations
ccataagtagccattaaagctttattaacaatgatgataccaacagaagtaacaacatttaacatccaagcagcagcatctaatgttgctttcttatctgattttttcactggagccattgttaaacttcgtcttcttcgtcaacttcttcaatcccacatttctacacagaaattgacgaagcaaaatcgttaaaatatctcaattccatggattcggtgacgatttttttccctaattcgaaaactgtgtcattttgattgatcgcgtaagtatgaaagactaatcgaatagactctacactaatcggattcgaagatcaaaaataaaaatgagggattgttgttcatcgaaattagaggaatgatcggggaagataacatcggtgattgttgatcgcataagaatccggcgagggagtacctggagaagaagaaaatacggcggtgaaaaagagaggctctgtttccggcgagattgctcggtggtgaagtttttgaattggatcagtgagtgatctgagagagtgaagccagagactcgtacttaagtagtaattatttcagttntttttagaaccaatccgcgagcaccatnttttatttattat

SEQ ID NO: 19595 - DNA, 1132 bp, Arabidopsis thaliana landsberg
gatggctgtgtgtgtattgtgtgcgcttaaatcaagtggatgatcttaaccaaataaccatattctttttcatgatctcctagatctttgttattacttttaattatctttcaatgtaaacatggaaaaaaaaaaaaaaaaaactggtacattttgtatgcatttttgcggttataaactttggaattgtaaagaatgaactagattttaacccgcggtacaccgcggagacaatttatttttttaaattagtatatataaaattttacaaattatatctatctataaaatatttttattttattgtttataattgttattaagtaacgtccttctaaacccgttccaccaaactcgtcctgtaaaaaaaaaccgcggtaccccgctaatttaaatttataattaaaataaatattttacgggattgcaattgtattttagtttgcaaacaaatttttgttttaaataattgtcgaaatctagttcaaattttgtaaaaataagtttagtgaattgataataaatgtagttaggtgtgttttgctcattttaagggattgcaattgtattttggtttgtcaaatattttttgctttaaatagttaccgaaatctagttcaaattttggagaaatctgcgtgatatatggaactgaaatatatttggaatgttttttatttgttaattaatttattgcaaaaaaaaatcaataattaaaagctagtggcagccattgtaaataagttctaagaccaggatttatttcacaaaatggttgcaaaaatgtatatatagatctaaaaattattaaagttcttatttttttgcagctttagagcaaagtaaatctcccacccatttacgtttttgtagctgttacagtttgtgatagataattttgttgttgattagagaatgtaataataatcagctttgtaaggggaaaaaattactatttattaattatttgattttttttctcaacatagctaaacttgaagcagaaaaggtataataaaaaaaagataaggaacaatattgagttatacgaataatccagctttaatcatgtgtcttcttcctgaagtcctcctcacagagtaacgctcggaaacttgcaacgatcatttct

SEQ ID NO: 19596 - DNA, 2481 bp, Arabidopsis thaliana landsberg
aacagaaaaagacagcttatgtgaaggtaataatatgaaagctgttaagtgaactatttggatggaaagacaactcttaccatttcttgatgaacttgcacaaaagatttctgaccggctaagtgtttgtgcaccccaagacctccccgatcttagtttgtacagtttgaagctgtttcacttttcagttgagcatcttcagtgttccaatgcaccaacatctgtttccaaagtgtatcaccaatccacggtggttgatcaccactcttctttgcttgactgacaatccttttcatccttgtcttggctataaccaagaaaccttctttgacgagcttagtaacgccttgatcccaatatacttttgctacataacaagcaggtaggttagcaaagatactaagagtcagtcaaagtaaacaataacagaatgataagtaatagttgacattaccgcaaaatttctgaagtatctctctgagtagctattggagtaaccttccaactgaaataatgcccatcaaacttcctccaaactattccagaaattactttagacagctttcctttgtgccggttaaacctgtaaaaaagtatgacagagtattaagcctatgtcactgtaggtaaaccaccaagacattgcaaatataaacataatcggctttagttgctgcatccaacagagaattagcaaaaatgaaatggttttaaaacaagaacacaaatcaaaaactcgtagaccaaaagagagactgcaaatcaaaacaaagactacagaccagaacaaagactattttaaaacgactttaggtgagccaacacttaacattacaagcagaccaaacaaagactgcagaccaaatcgacttgccaacacaaaacaaagacaagcagaccaaaactgttgaccgcagaccaaatcgactttaggtgagacattgtttaacaaatacaaaaagaccaagcacagacttcagaccaaatcgactttaggtgagccaacacaaaacaaagacattaagaccaaacaaaaactgcagcccaaatcattgcgctagagccaacactaaagcaaaatcattgcactagagccaacacaaaacaaatagtgcagtccaacacaaagaatccagaccatacttagctttatcaccatttcataatcttcttctgtttctagaaggagagaattatagagattaccagagagtctcgaccccagggataggcttttcagacagaagtggaagatgttgtcgacctggaagggctagtaaagaatccaacagatcttgatagtcgacattagggtcttcttcttcgggggaattagggtcttcttcttcttccttgtcttcttccccatcttcttcccaatcttctaccccatcttcctcttcatgattattagggttttgttgctccgtttgacgaggatgttgttgaagacccgaagattgatgttgccgagcaggagccttttgttgacgagtaggaggttgttggtcgctcgtaggagcctgacgttgacgagtaggatgcagattgcgatgaacgggaggcggttgttgagaaccagagatcaagggttaacaagaattagtcggggttagtgtcatttggggtggcgtcgtctttggtacaatagccggcagatactatgaagatcggctcctatggtattgtgtagcagaatgtgtcgccaaattagggttcgacgagtgagaagaggctctgtgacaactcgaacctaacactggatttttaccctggaagactcggacttcagttgacgattcgcgacctcgacctctacctctacctctatctctacctgattttcccttaccactagcagccataacgaatgaagaaaccctagatctagaaatggtgaaattagaaagcgaaggggttggattgaaatagggaagagaatctaaatctagaaaccctagatctacacaataaaaacaagaaatcgagttgaagaagaggagggaggtgagagcatttaaccgcagaactgtaaagagattgaaagagaagaagaagaaacgataaaaacaagaaatcgagactttatatattattgattaaaaaaaaagtctatatttagtcgcaaaaacgttgcaaagtaaactgtttggggggggggggaattgaactccataatacttacgctcaaaatcatggacactgacgactgctaaaaaccctctctatttcattgcacagttagactgactttcatcacataccagccaaccattaggcacaccactcgtcaaaaatggcacctacgttactacttcgacacaaacggcgaatgtggatagactctccattatctaatagctcgggttctcattgaggtcgatccatagatcattgacaaacaatgcatgtgtagattatagtacttacatcatgataactactagaaaacttgcgctttgtgaccctatgttgtgactg

SEQ ID NO: 19597 - DNA, 1010 bp, Arabidopsis thaliana landsberg
gataaattaataaatattacttatagacagatgttcttaatttagtacctttttaaagagctttatgagatttttttcattatagaacatatctttgtagaaccagtgccaagtatgccataataataatgactagaaaacaatacctaaagttttgatacgctaaaatatgataactatagtccatcaaagagcaaatatgaatttcagcaaaaacttattataaatatattttatagaatttttttatatatgcatatatatatttacacaattattaatttatgatattgatgggaccatatatttacataggattttttagaaaattattatcttattaatttatcgatttgtgtaactttttacactgatcccaacttgggaccaatagaatttattaatttacagaggttattaatttataaagtattaatttatgaaggttctattgtactactatgcggggtgatgcgacttaatgaacttaaccatttagataatgttggtaaactaattaagctttatatgtacttttccatgtgatattttagattacgtcatttaaaattagatatcataaaatggaccgcacttcatcaatcatcacacgtggaataaacttaagttttgcgaacctaaaacttgttatggtaatttgatactatatgattatatttaggatatttatgcaagtttgaatttggatgatattatgataaggcaatcacataaactaatacaaactagtaagttatacgttgtagtgtaaaaaagaaaattttcggaaatagatattacttttctgttttaaatatatgatgttttggtcaaaacatatgttataagaatttttttttaaactatcatttatttttatgtttaaaaatgtgaccaattataaaaaaaagatgcagaatacagtaccttctaaacatatcattaaggaagagacgaaaatgaagaccagggaatgcagcttgcttctgaggcggtcatgaattatcccc

SEQ ID NO: 19598 - DNA, 1254 bp, Arabidopsis thaliana landsberg
  unsure (1)..(1254): unsure at all n locations
tatgtcaacacctggagcagttgtattcacctggcgcgggaatgttcttctcctatgcgcgggaacaacttgacccagtgttgaacctattgtctcaaacaatcacaccaatccttgtcaacatatgcccttactttgcttatgcgtacgacccagccaacatccgtctcgactatgccaactttaacactaagttcatcgaggtccaagatggatcattgggctattcaaacatgtttgatgcaatctttgatgcgttcgtgtgggcaatggttaaggaaggcgttaaaaatttaccaatggtggtgtccgagaccggatggccatccgcggggaacgggaactttaccactccggctattgcgtccacctacaacagaaattttgtgaagcatatagcaagcggaaaagggacgcctaaaaggcctaacaagagcatgaacgggtttttgtttgcaacgttcaatgaaaatcaaaagccggccgggactgaacaaaactttggtttatacaatccaagtgatatgaggcctatctacaagctattctaagtgtgaaagttacttagactttcccgattcactaataataatgctctactagttgttagtgaattaaagtaagattaacaatgatgcacatgctataagcaactggtgactatgagatgatggctctcgtagcgaacttagttgactttttgtaataaaatctgaatgtagtatttaaaaccaatttcctggttttataaacgaatgtactgcctcttcaataaagtaaggaacctttgcctacggcatcgaatttaatttgaagtcaccagttgacaacgaatgtactggtctggtttgtgcctctccacttaaagtaagttgacaagctaagtgctaagtattctcgttgttactgtataaactattcctaaattatagtttagaggtaatgcttagagcatcattatccatggtttcttaaaaagttaagaaaatctcttaaaatattatataaaacaaaatataaataataaaattaaaaagggttcttaaaaagtaaaattggctcttaaataagagattctttatactttctctcttgttactaagaatcccctaatattaaattattaatctgtagagcaaaaatgttaagattttatctaagaacccatcaataatgatggtcttattagtatactcggtggtactgtataaactttatntataataaagattcagtaactgtataaatagagtt

SEQ ID NO: 19599 - DNA, 851 bp, Arabidopsis thaliana landsberg
  unsure (1)..(851): unsure at all n locations
tctacttcgggagtcttgagttcatgtcccacgacggcagctacgatagggtactcctcccgcagcacgacaacaacgacggtcgtcagctcgcccggtggcggcgaacnnnnnnnnnnnnnnnnnnnnnnnnnnnnnnnnnacatccgggtttgccccgccaccctcctcgccggaggaggagaagacggagcaaccgtggccaggcaagaggcagcacttcgtcggctttcggaccagagcgagtcgacgacgccggcacccctgctggggacatgtcgggtgttgtcctcgcatctgagacaacgacgggtgtcgcttcccagcaacgtgccaaccccaggcggactgatgacgccaacaccctcgcgaatgactcgttgggcgttaccctcgtacctgagataacggtgcattccgtccccgatgcgacttcaccaccgtccatcaaccaagaggtaccatccattttccaccctgttccctttagatttagcttcgatccaccaagcaaccccacttcggtgagcgtttcgcaagggcatatcctgaccttctagggtaccatatgtggtcaacttgggaccgactggctgccgtctcaacctccggacccgcgggttccgaggaagaagacgaccccaacttcggttgggatttctttgaacttcgtgatcccagtgccatgcgagacttcatgtccacatgtgactactgccactccggctgctccgacgatgaccacagcctcgacgacgagggttatggcccaagtcgcgagtgtttccacatcgatcagggggatcacgacgaagacaaccacctcgggggatcctctagagtcgacctga

SEQ ID NO: 19600 - DNA, 467 bp, Arabidopsis thaliana landsberg
ctacaacagctgcagctctatatccgccttggtatcgagcgacaccctggtggtatcgatcgacaccctcgacaaaattaggtagcaggtttccttgctcatcgattttctgaccatactcattgtatgccagaccagctctgtcccttaacactcttgcagcatcaggtattactatcaacatctttgtgttgcaattgaattcctaaagctcctgaaacacaagaaaaagaaaaagaagagaaaaactgaattagtaatgaaagaaaagaagagtctagacttaaaccgacacctagtctaatggtgaaacaaagagaacttcggcaatggcgccaaatttgatatagctcaaattgccttaagcttactccctcaaataagagatcgtcgttagcacttaagggtcatattccactgaactctcgatgttcgcaaaatagacctatgatgttttcaaacaagct

SEQ ID NO: 19601 - DNA, 478 bp, Arabidopsis thaliana landsberg
gaaatgcatgacgaggcaaatcttgtttgcaactggaatctttcagaattggaggactgtttctccacattttcaaagtggcttatccttcagctgtttcttaagacaacagaacgtggtatttcgacagtgggtgttctcgtcatatgaccggtgttcaatctgttctaaatgacttttctgtcatcaacaatgggaaggtcacttttggagatggtggcaaaggaagccttcacggtacagggaagactgagatatatgatcaaccgcatctgtcaaatgtgtactttgttgcgggactcactgctaatttaataagcataagtcaactgtgtgatgatgacttaactgttacgtttacaaagactggatgtgctgcactcgatattgctggcaacaatgttctatcaggagatggttcaggctacaactgctacatgtggaaagactctgaagtctgttttgttgcaatcacatc

SEQ ID NO: 19602 - DNA, 550 bp, Arabidopsis thaliana landsberg
cgtcagtcgtttcatgagtaaaccaagatcagttcattgggaagttgtcaagtggctgctaaggtacataaaaggatcacatgatctgagtttggtgtatactaacggtaaagatctcagtgtcattggttactgtgattcagatcatggtggagacttggataggaaaaggttttctagcggatacgttttcacagtaggaggtaatacaatcagttggaagtcttgtctacaatccgtagtggctttgtcatcaactgaagcagagttaatagctttgactgaagcagtaaaagaagctatatgggttaaagggttgcttgaagatctcggttttcagcaggataaagcacaggtctggagtgattctcagtcagcgttctgtttttcgaggaatagtgtgttccatgagcgaaccaaacacatggcacgcaagaggtcatttctgagtgacattattgaagaaggaaacattgaaagttgtgaagattcacacttctattaatcctgctgatatgttgaccaaatgcattcccgtgaatttttttga

SEQ ID NO: 19603 - DNA, 495 bp, Arabidopsis thaliana landsberg
  unsure (1)..(495): unsure at all n locations
attctccttcccagcactcagttggtggaactctttcccactgtagctttttccgaagaactctacaaccatgagctgttcttctggcattgaatcgtctatcggaagtggttcttcaattctcatcctcgacagatggtccgctgcgccattttcaatgcctttcttatctactatctccatgtcaaactcttgcaataaaagtatccatcttaacagtcttggtttagtatccttcttggcatacagatgcctcaaagctgcatggtctgtgtagacagttacctttgatccaaccaaatagcttctgaacttctcaaatgcgaatacaacagctagaagctccttctcagttgttgcatatcttccctgagcgtcatccaacgttcggctggcgtaatatatgacatgaagcttcttgtctattttctggcctagaacagctcnnnnnnnnnnnnnnnnnnnatcacacatgatttcaaatggataatccca

SEQ ID NO: 19604 - DNA, 1818 bp, Arabidopsis thaliana landsberg
tacataaagaatacattgaccctgtagatgtaaatttatacatccttaaaaacgaaagtttggctacaattcttctaatataaagggatgagtattttgggacaatggacaaaaagaacgaaatgcattgacgtcttagaaaaaaacaaatgcattgacttattaggcttaccgttggtggactgttttgccttagtctcgagcgaagataattaattagacaaatctaagcaaatttctctgtcaaatatatctttcttggtcatatagcatctaatgatgtgcatacatttcaaagttggaatatcgtgttagtggatcttagatcaagtattatcagggttgcctctaagcctagccactagctagatgaaacatggttttagaccacaattttgtaaggctcaattatgttggaccaaattttatttaaagttaagtgggctttataaaattaaattgtgcgaatgagaagtgggtcacaatgatttggctttactatcattggacctccaaaagtgtgttgggtcgagttgaatacttccatgagaatcagtcttttttgtttcacgtctctttgagactcggtttcactgtgagatagttgcctcatcctatcatccacctctcctggatttgcgatggttgtggttgattgatcttaagaatcaaaccaatctcaaacctctatatatgcatgtttgatgtcttcttcttaacatattgagaatttcaccgttcatatagaaacacatatatccaacaatctctctttgttaagaaagtaagtatttgagaggatcgtagaaacttggttcgttagagctgttttcgagtggtgtgacatcagtttatagaggttgtatcatgggatccttgaatcacacaaaaaccgtcaaactacgagtgattcaaagggttaaagaaagagttcatcagctcgactcctctcttgtctttccttaaacgtttatgatatcgatttcaattgtctttacgtagtgtttgctaattttagctcctacaaattaaacatcaatatacaaataagtccatatttttgcaagattctaaaatttattctcataggaaaaatagtttaagtaaaggccctaaaattttctcttgcttctgccctctaaattaaaggaacggaatgagtattatttacaactttaattagacgggattggtgagacttgataatgtgatctctctgaccgtaagtgagaagagttaccaaaaaagaggcatgggtactattttactagaatcaatggaaaagcgcaatgatgcttctcgatagcattgaatgagagtgttgatgcacatttaatgttatctccactgcttgaatcatttcatatcaaccaaagaaggatgcgttctagagtgatgcatatatgcgagtcctcatagtctgtcttgattacaagctagccgcttacggttgtggccagtcagagtttatcactttactcgcccgttagtctgaaaaagttgctaagttttctagtagtactttatgagggattttgttaatgacatcatccagtttgtgttttttcgagtcaacttttttggactcaatcaagatgcttttgatcctggatgctccctcatattactcaactaacgagttcgatgatatagtagcttatgattagtattctaactgtaataatgttcgtgctaagagtttcattaaaaatgcaacagcaatgttttttaattatctcatgtaaacactttaccggaatggctacctcacaaaccaagattattctcacctaataaaatcaatgtaaacacctatga

SEQ ID NO: 19605 - DNA, 1064 bp, Arabidopsis thaliana landsberg
  unsure (1)..(1064): unsure at all n locations
gtttctctacagatgaaaattttgtttgaacaccatagctgattattgaagcattcctttccacaaaatgcaaagctcctggaacttgcaaggaatgtgacagaagccatgcatctacctcttcaggctccttgacggactgaacctgatcaacatcgaatccaacacattaaataaccgtagaaacttaaccaaggggaaccaatgaagtaataccttgttggttggnnnnnnnnnnnnnnnnnnnnnnnnnnnnnnnnnagaggcgatatcagtaacgcggcgactattgttcccactccacacaaagtcatagcaaggaagcttcacaaagaacttgtcctcacaaggaagaatcggtggggataccaatagtgtaggatcagtgatattcttgtacgcactcgaggatgcgttgcttgctttcatggcttcatctatacaaaagatgagaaggatgaagaagaatgaagagaagatttgaagacacgtggctctcttgttccgccatgaaagcaatagattcttcccgaacaacgccgtgaactgctggtagagaagcggcaagccttcttgcaaaatcattatcaagtttttaaaaaaaaaatctttctttttccaagtaaattgtttgtcttaggaaaaaaaaaagcaaaattttaatctataaagttcccacacaccccacaaaaaaaggattgaccaatattaattagaaagaaaataaatcttttgtccaattttttcggttgactacatttcatccccagcttgaaaaatgtgtaaaattgagacctcgcatatttttcacatttaattggagaccacatatatatatttggcacttaaaacaagcgcaagtttaaaggaagaaacgattacttaaattggcaagggaaaaaaaaagagacgacaaagtgcgactacctaagcttctttctttcttcatcaatggtgaatcctagcccagcaagtttttggacgcaagccaatgcgttacttaggaagaacttaacctaccaggtatgttttcatattgccgtttccggcaagttacttagaat

SEQ ID NO: 19606 - DNA, 681 bp, Arabidopsis thaliana landsberg
aactttgggaaggttgaaatggcgagggatgtgtttgatgtgatgaagaaccgtgatgtgatttcgtggaacacgatgattagtgggtattataggaatggttatatgaatgatgcgttaatgatgtttgattggatggttaatgaaagtgttgatcttgaccatgctacgattgtttctatgttgcctgtttgtggtcacttgaaggatttggagatggggaggaatgttcataagttggtggaagagaagcggttaggggataaaattgaggtgaagaatgcgttggtgaatatgtacttgaaatgtggtcgtatggatgaagcgagatttgtttttgacaggatggaacgaagggatgtgatcacgtggacttgtatgattaacggatatactgaagatggagatgtggaaaacgctttagagttgtgtagattgatgcagtttgaaggcgtaagacctaatgctgagactatagcttctcttgtttcggtgtgtggtgatgctttgaaggtgaatgatggtaaatgtttacacggctgtgcggtgaggcaacaggtttattttcgatatcattatacaaacatctttgatcaacatgaatgctaaatgctaacgtgttgacctctgctttagagtattttcgggggctttgcaataccataccgtgccttggagtgc

SEQ ID NO: 19607 - DNA, 782 bp, Arabidopsis thaliana landsberg
cgagaaattttctcccaaaacacagaacggttctccacttgcggagcaccataaacagggttctcatggttattcaaccataataacacaggtacctcatggtcgagttgatgtcctcgatcgagtggtatcgatgaatgtctttgtaattggctaaagatggacaaagaaaagttgagatcagacctgggctttggcaaaaaaaaaatttggatcaccttttaaaacattgggtcttcgacactttaatgggccaacaccaaaaaagtccaccagttgtaaccctagggtccctttgggtgaaagcggagggtcatgaaggcgggggtattgtacggagattacaagagattttgcggtggagcattcatctctggtgaaaataggatcgacggttggaggttttgttcgggacataaggcagaggaagagaaccataggaacttggttgttccggtaagtgaaatcgtgtaccaatgaaatagctcgttgtgtctcgtagcttggggagagatttctaatcgggtagacgagatcttagaatgatactttgatggttccaacagagatgacttccacaaaggtgttgcatattgagggtaaaagatagagatcatcggacaccattcttttcctaaattgatacttgaagttttcactagaagttagcggattaaaaggacttgagacaatttcaaaagggaaaaaaaataactaacaaagaaagagaagcacaactaccaatgagacaaagagaaaaatgagcaaaggaaatggagggc

SEQ ID NO: 19608 - DNA, 1892 bp, Arabidopsis thaliana landsberg
ctctggaacaagagcgccaaactttcgtctctttgcctcacgttcctagggtcgtgcagtttgcatcttctccattgaacacccttatctcagcggtggtatttccttcattatacttaaaaggggttcagctggtggcactaaatcacaatagctaacatcctccttgtcagcaaaatagtcaacaccactcgaaaacgcatgcatagcgagatttattaccaaataggcgttgcttgtcactatgccgttcaagacatcaataccctacattgcagacaagattaaggtaagggaaaatgagttttaaaaatgacttattaagggagacaaaatttgtgaacttcaaatctcagctcaccccatgtccagatttcagcatgttagttagaaaagaagaagtaagaggatcatggtataacacagtggtttattctaaacaaagacatgttagaagaaacaataaccttaattttgaaagcagtatccatccaagcagagatccgtccttgggtgaaattctagcaatacaattttactggtatcttctactgcaccatttattcatgggaatgaatactccatttgctactaagctcaaataggatacttgtttattccaatcgtctctttacaaaaggatcttaaactaccgagccaaaagagcaagacaaacaatcaaataaactaaataaaatcgaaatcaaagccaataaatcataaaataccacagaacaaagaccacaatacaacggttacacaaaaagatgaagacacggttcaagcatactgacacattcatctcagagagtagcagaaagagcgttgtagtaagaacgtatcttagggacatgaagcacatgatcagaccactcaacattccccaaaatttcacaagtattgcgcctttcaagcgcaatcaccgcacaccaaagcatctgccaatcgccgacaccttggttccaaaaaacagcgagctttccaccataatcagccaaactaacaaaagcacgcggagataacttgggtagtcgtcctcctatcaaacactccaaatttctccatgttcttacctcagtgtcataccatctgaacactcggtcaatagcacatgagtacaaaacattaccaaccacgcaaaaacattttgaaaacataaactcacacatggtatctccaacctcctcccagctaccttccactggattgtaatcaaccacctttctcccagtcacgaggttgacctttccgccaacacttgtgcttatgaagatctccttgccttgtgacacgctgcatgggatagccacccgatcacttacttgtgtttctgtgtccaacaccgtaaccgagttcttcaaggaatccgagccatcttcttggtgtaaccctgctacatatatcttttgatcaaggacgctaacagaaactctaaatagctccaccggcaagcttggagcctggcgccacgtgtgagaccggcaatccagaacccagacactagaggaggtcaaatggtggtatctggttcgccaatgttatagatattagaaccaaccgccgcgaggctatatctctgagtcaaaggagaatggggaattgggattcttgccaagacataaccacttgacctgtcctcctcctgctccttattactactggttgttgttcgatccggtttccggcagagggtgaaccagctagggccgtttttataagaatacatatttatgcacacatagagacgactctccctgcggcccaagagtgacctgaccttgtaaagctccggtgaagccaggagagatcgaaaactcttggagacgagtgagagaataggatagtataatattgagacgcgtgcgatgatgaccaataccaaatcgtcggga

SEQ ID NO: 19609 - DNA, 1760 bp, Arabidopsis thaliana landsberg
ccattttttatattggtttgcttttaaaaattgatgttttcttggcccactcttggatattgttacttattttctcgaccaacttgttatgcaggaagagtttcaacttgctttgttcaagaacagaaagaaagaaaatttgtttgccaatagggtaaattctaagtttctttggccttagtaactttgtagttagtcgtaacgattagttctattataagtagttaatggtaatgctcttttttccagatatttgatttatttgatgttaaacgaaaaggcgtaattgattttggagactttgtgagatcactcaatgttttccatcctaatgcttccctagaggagaaaacagactgtaagttgacccataaacgagtttatatccatcgtcgtttctctaaagccttgctgtacttttattcatgttattctgtatttcatatatcagttacctttaggctttacgacatggactgcacaggcttcattgagcgccaagaggtaaacaatggtcctatatcttcacattccattcccaaacaatctatgtttcaaagactttcagtattatggattctgcatcatctataagtaatcataattgtgtatgcgtttttggcaggtgaagcagatgttgattgcacttctctgcgaatctgaaatgaaactggctgatgatacaatagagatgatacttgatcaggtttacttgttgtctattacaagtttgttttctgtcaaaacaaagactgttttatgaaactcgagtttttttttcttttcgtgaacagacatttgaggacgcatatgtggatcgggatggaaagattgataagacagaatggagcaatttcgttatcaaaaacccatctttgcttaaaatcatgactcttccgtatctcaggtatgtctccttactatgatacttccatctatttggccagttttggtgccattttccaagtttgaggacttaaaaactcaattttagggatataacgacgacatttccgagtttcgtatttaactcggaggtggacgagattgcgacgtgaaagagacaagacaagctggtttatagagaccaagtcgtaggctggaccaagaataaaaaagaagattgattccaacaatgttatatagcaggatcgagctctatttcctttggaatttttagtctattggatttcaatttcatgtattgcgattacttttggctctctttctttaacagttttgaatactcaagttgtagttctacgaaaagattaatataaaaccacaatttctgattaaagatttgattttgctcataaattattccaacactttatgttttatgtaacgagaaatcaaagtcaaatatgcttagacagaagaaattagccatataaatcaatttattattattaagggaattgaaaacttcaaaaataccaaaatgaaactaaaattataatcaaaccagacctgaatttattgtaaccgataaatccgaattgacgtgtgtggtgccggctttgagatgaagacagaccaatgatgatcccagtagctaaagaactcaagcggattcagacatcatggaaagatccatgctgtggagtgattctctctaatccccctgtatggcgacgcttttacatatcctccatgttctttgactacaaaagccccgctttgcggatcatttagttgaaactcagagttcaaacaaaaatcatttgtatgaaactcagagttgataccaaaaagaa

SEQ ID NO: 19610 - DNA, 2204 bp, Arabidopsis thaliana landsberg
tttaattgcgagccgaaaatttttaggtgttaaaaaatatggaggttgtttattttttttaataaggcttttgggttaaaattaatttttggatggtgtttcggtagactttattttaatagaatctcatttagttcgaaacacatcatgtgagttggccacataaaccatatttaaaaatcgcctatgaaatattcatattatcaagatccacataaatgcagtgttttcttctttttctttggtattttaattttatatatatatatatatatatatatatatatatatatatatatatatattcatcttcccttaaaagggcagcatttcaaggttttctttcgagcaagatattttattcccacgtcgaagattaatcgccgacgataagataccaaatcactttcttctttaaagcaaaaaagttctgagaatctgattcagcagaagaaaagtctgaaagctatcaaatatttatattagcaaaacaaaagaacacatgctagtgctagcgaatacttaagagttaagagttaaagagaaaaagaaaaaaataggtctgtcgtcgtgtcaagtgaagcttaataaatggacatctctattgtgtctttccatcggttactaaattatacagtactatactagttcgagtcaatggaaaaaatgggcttattagtaaagctagtcttccaccaaataattaaaataacaaatgctaattatcgtaatttttatcttttgttatttttttttttttggggacaaacgttttggtatttataaatttggtggaaattcaacgaacaaactatataatgtgcatcaccacgtgaactgaaatttcctcggtgagttttgtaactttgtatttaagttggtaataaattacattcttagtcttttatattaatttaaagactcatattttgcatgcaaaaaaggaaaaagactagtagttaaaatttaccgttgggggattgagaagcagagatgatccaagaaagctcttcggcggcagaatcaagaagatcaacacaatcaacaatcgcattggagactcgcgacttcccggctttcttgtcgaacttggacactatagctactgcttttgttatagcgtcgacgacggttttggccgcttcagcaaactctaacggtgggactctcaagcactccatttgaacaagatcagttgaagaaaacgcttctttgtgggcggaacataatgagattatgataagaaagaggaagaagattgatgaacccatttgtcggaacttcgccatctatctcaggtagaatcttgcaaaggtagtggaagttgaagatgaaacaagagtgtctctctctcacactctataatatctttgtgaagagtgaatgtaagtgatgtgtgatgttatttattataaagagagagagagggtaatggctaggcagtaggcaagaaaaaagacgacctatctttgctttttataccatcggttatggatgagattaggaatttttactaagtgtcgttagctcaattggtaaagactctaggtgaagcttagaggtcgccggttcgagtgatgcttggaacgaaactaatattacatgttgtggtttcgggcctggggggattacggaattcggcccagaacctcctggtattcaaaaataaaataaaataagagaaaaaaaaaatcaatctagtctctttaccttcacgcgaggcggtatgtattggaacaaattgtcccccatgtctgttaactgattacgtcgctcaaacccggttggcttagcacaacctgcttcgacttatccgggattgtaacgtaattctctatctatctaagtactcaagaagtttaatttgcgtttggattgtaggagaacaaacgaagagtctatcatcttcatggaactcttgagattaaggagatgctctgattcttgagaagttgttgttcaacttgaagaaaatagattaagaacacataagcttaacttcctttttccacaaattttttgagaatataaaatagaatctatttttatgaaacggtaatgacattcaacatatacagagaaaatcaaaacagaacaaatgcaaaaacctcttatgagttacgaaaggatgagaagatataatcctatccaataatttatcatttacgcaataatggaacaactaaggaatacatatggatcca

SEQ ID NO: 19611 - DNA, 467 bp, Arabidopsis thaliana landsberg
tcctatatcactccaaaagcatcaaaatgtttattcatggttattaggccgtagaagaatctcttaagagtgtgaacctatttcgtggtggagttgctgataaacctgctgggaaatatagtggaggcatgaaaaggagactaagcgtagcaatttcacttattgggagtcctaaggtacaccattttctcttactactaatatcttggtattcagagagccttttaacaaatccaattttatatttggtttatgtgtttttaaaaggtggtttatatggatgagccaagcacaggacttgatccggcttcaagaaggagcttatggacagccatcaaacgtgcaaaaaaccacactgcgataatcctcacgactcactcaatggaagaagcagagtttctatgtgaccgattaggcatttttgtagacggaaggttacaatgcgtagggaatccaaaagagctaaa

SEQ ID NO: 19612 - DNA, 760 bp, Arabidopsis thaliana landsberg
aatgggatactgcgagccctgaggttgctagctaggagtgacatgaatccaacgccgaaatttttgaggtgcgtgggatcataatataaagggtatcaccatatgggttgataaacaaattcgaaatctgatttcagcaatacgattattaggcgacaagcagtatgacgatgcctatttaaaattggattcacttccatgactagttaacctcgactcttagctcgtttaaacattttctttaaacattttcgaaaaatcatcagaaatctttagagcttactttttcaaacatacgaagcacaaattataaacacgtatatttgttttttaaaatataatttaatattacactaaaaaaaaaaaatggcattagttatatactgagttctaaattttaatgatctaaggcttgggtactagatttgaagtaccaaatacatagatatcttgaaaaaacattcggacatttacaaacaaagtcgtccaatgggccaagcggatcaagcaatagtttgcggttgttaatattaacatgttatttcggcccatttttagtccaacggtttagttatatcataaaaactattatttttcggatttgaaattttaatcgatatgtatcttgaaaaagtttcgaaacagccgtatgtattttattagaaattgttggcgatttagatttatgaaattttcctaatcagtatcacaaacatgaattacatgtttcagtcgtccactttgaattaaagaaagaaaa

SEQ ID NO: 19613 - DNA, 1087 bp, Arabidopsis thaliana landsberg
aaatggtcgtgtcaactggacaaagacgcgattccgacgacttttcgttgtctgtatcatttttctccagcgtagaacaaagcggagcttccatcccccattccctggtagtgtctctgcttcttctctctgattattgctgtgtgtaaacttattcaaactgttaagcctgttttccttatccttacctgcaacctaacccataaatccattgttgactgtctctaaacccctgcattcatggataaaagaatcccacaccacctaaaaggcaaaggtattgactagggcttctctccaccagtttgcagaagaatccgagcaccagagttagatacaagcttattgaagcaaactcactcactctaatgggccagttaaccaatccgtctatgcaaagactatggtccctctttcccttcctctcaaaccgctggaacctgaagggcaaagccacatggtcagatctgggcagaggatgcttccagtttagctttgattatgaggaagatacgcaaaaggttttggataataggccataccattatgaccagtggatggtcattctccaaaaatgggaacccataatctttgactcttttccttcaatgatccctttctagattgacattcaaggtctcccaaaacactactggcaacatgatatatgctcaaagctattggctcagagctgaaagaaattctagatatcaaaattaccaactcagcagccaagataaaggtttctattgatgggctgaagcccctcattctcgacactatggttgacttccgtgatggcagcgaggctctaattacactagagtacaagaatctcaagaattactgctctcactcattgagactcacccatgaaaagaaattctgcccaggattagtaaaagagaaagaggtctctacaaaaattgagcctccagtgacagttggggattctaaaggtctggtgcgactattttatacgtcctatgataactttgctgcccctagagagatgagagatcccactcctaacagatcactctcttaagagtctaatatcaatcaaagacttcaggcttatacctag

SEQ ID NO: 19614 - DNA, 1454 bp, Arabidopsis thaliana landsberg
ctcacaaaatcacaagtggggcaaattatccttacattaacaatgcctcgacttcatcattatctctcaaatcaagcgttcctcgtccttcttctcttctcttccattgcctcagcagctgttgtcgaacatgttctccacgtatttactcttataccactttctctcccttttttaataacctaaccaaaattttcgaaatattaactattaattttattactgtgggaactatattatattaccaatttccattttatatactagtcatttatttcttaaaatcggaaagttgttgaattgcgtgtgtttgtgttttcttttcctcgatttcagaaattaataccgtatttgatggatctctaatctatgagccccgatttttagtttttaactttgccggtaaaaaacatttaatagtaacacaatactaataacgacgtctaagaaacaggttaaagacgtcgtggtgaaaccgttatgcaaggagcaaataataccggcagctaatggaagtcttcccggcccaacgataaacgttagagaaggcgacactcttgtggttaatgtcattaacaactcaacttacaatgtaaccatccactggtaattagataacttattgatctcattactattgttttttttctttataatggaagtcgatttcaatatcatttcatcaactaattactgactttttagatgttaataaaagttatttcttaatttcacacatatatgtataggcatggagttttccagttgaagagcgtatggatggacggtgcgaatatgataactcaatgtccgattcaaccaggttacaacttcacatatcaatttgatatcactggacaagaaggtacattgttatggcacgcacacgtcgttaatctacgtgccactcttcacggggctctagtcatccgtccccgatccggccgtccttacccttttcctaaaccctacaaggaagttcctatcgtttttcgtaagtatttccctcttttttttgcaaagtcgaaatcaattttgtgacagcgacaattctcgattatagtgattcaatataatagtaaaagcaacatatctcaaaaaaaatatagttttttcaaacagctgtcttttacaagttgatacaactttctcgatctacgccacattctgacgagtattatgaccaagttggttcggttttaataaatatccactaaatataaattatatatatatacaatataaagaaattatgatatataggattcataattatcaattaattttgtttgaatttttttattatgcaagaacaatggtgggacacagatgttagacttctccaattacggccagctccggtttctgatgcttacctcatcaatggcctcgccggagattcatatccttgctctgagaatagtaatactcactctttacttgaatcaaaagtt

SEQ ID NO: 19615 - DNA, 1714 bp, Arabidopsis thaliana landsberg
ccggtcaaccccatatgaacacggcacattaaacccatcttaacgaaaacttgccagccgatcacaaagtcaccctgttaatcacgtttcattattatttttataagttcaatcttaaaactatggaagtcaaccacacatgcaaacccaacaaacaaaaaaaaaaaaaaaaaaaagaaagaagaagaagaaacacttcttgcaagttatcctttaaactccaaagttgcacaaccattcaaatagaagtcaactgtgcaaaaatatatttttgtaatgacccaaatataccaaaattaatacaatgacatcgtcgatgtccgcaacgggcttgtccgcttgaatccgcagtccacaatggacctggccgcgaggcccgctaatttatgaacaaataaatcaacgtccaagtctgctccaccatgggctacttggacaaagcccgcgggctagcggcccgcttgacaactctagacctcgacttagacgtttattaagtttcttaacaaagatatcggctagaaatttgacggaggcggcagtacaacaaaacttttccaacagttgaatagccacaataattgttagtcatcaaagttagtatttggaatataagtcgtattacatgtcataaaccttacctagccatatgatcattaacattatcattgagtcgatttaaatagaatatttacaaaagatgtgaaatatatagatattcttgccttgcgtgtttggtatcaagggattagttctttaatttcaaagagaggagatgtagttgggataatatgcttgaagcatgtgattcgaagtttacttttagtggggtgacagtggcacaaaaagtgaaattttgagtgaggcttgccttgaagtttgtaggccatatatgtatatatgccctaaatgcacctgtccacttctttaattcctctttagttttcaccaaccaaaccttggatcatttgtctttgccattctatttcgtgtatcaaacatctatatatatacagctggaatttaattaacttgcatcgacaatcatcgatctctttgtacaacatcatgtgtgtcaaccaacactatacttaagagtacgtcggcgcaacgaagatttttaataagtataagaatatttattggaaattaataacaaatagtaactatatcaaattttgtttttcgtttttattttggaccacaacaaaccgattcaacatttcaattaactctattgcattgaaagggattcggacccaagtataatggtgctagctggttcttggtagacatgtaaaatgtcattagaccacggtcacttcttccaatacagtatcaataatttgttattttttttttcatcaatccgctgttaaataaaaatgttagaagtcacgcaccgaattttagtttctcttgaccaactttacatatcatgcgttttttttgtccactattcttcttgagtgggttgtgcattcgtttactgataggccgggcaccatatttggtgcataccactattgcctatttgccatatgcatgcatcattatcagcaaccactaacgatcatgaatattaataatagtttttaaataaaattttcacagattcattgctagctctaccaagtgtataatatggatttaataggtttttgctgtaagcctgtaaccaagaaatagtgggttgggcccatctatagagtat

SEQ ID NO: 19616 - DNA, 691 bp, Arabidopsis thaliana landsberg
atatgacatttcctgaagatatatatacgagtatagctccagtctggttgtatgtggatatttaaattgtcctcattgcttttcttggacttaatttgggttataaggtgacatactacatggaagttgtgattttgtgctatttttcgaaacaaaaacgcccacaatttctagaattatggcattttctgatagaaattattctcctcgtactttagttagggaatgtatatgatgtacagcttaatctgacacgaaatggctgtgcaggcttacttcattaccaacatggagccaattaaattttgggagtttatgtcacagcttcttgaaggacttggctatgagaggtatattttctttaacaaaagaaggttcctaactagagtacatttgatttatgtttattcatgatgaactaatagaagtttgtaaattggtatatgtttttcaggccaagtataaagatacctgcaagtctcatgatgccaatagcatatcttggggaactagcatataaattactcggaccgtatgggatgaaagtaccagtgcttacaccttctagggttaggctactcttttgcaacagaacatatgattcttcaaaagcaaaggatctgtttaggctattctcctgttgtcccactttagggttatacaaatcttatttttcgttcaaaaacaaaga

SEQ ID NO: 19617 - DNA, 3807 bp, Arabidopsis thaliana landsberg
  unsure (1)..(3807): unsure at all n locations
atatttcgggttatttttgacatcttaatatatatatgacagttaaaaacaccgcagattatataaatatttatttttaaaaagttcaaccaatcataataaagactacagaatataaatattaaataaaatattaaaataatatataatttttgggaaaaatgttatttaatacctcaactaacaaaaaatggccaaattaaccgtgaactcgtgaaatggccgttttaactctcaacaaaaagttgacttctgttttaacctttaagtttgcgttgactcggcctaattaaccaccgttaaaaatccttctaacagcgtaattgacagccgttatagaacatccgttaaggtgatacgacgacgttttgtgctatcaacagacatcaaagtcgacgaaacctctgaaaaatccccaaatcaaaacccaaaccctaaaaatcattttctctcaaatttttcgatcaaatctgcattatgagctgcaactcaaggaattcgagtggtgaaagtggaggctgcaattcaggaatgatttcgaatgctgaagctggaggtttcaagagccgtgggtttcctgttaagtgtaaatgtgggctcgacgtcgtcatgtttacatcgagcacggctaagaaccctggaaggcctttctttcggtgcaaaagctgtgaagatgtaagtagatttgatatgagaatgtgatgttttttgtgtttggtcgataaaagcttgagatggaattgcaggatcatttgttcaaatgggtggaggattgtatgtatgaagaggttatagatgctctacccaaaatctccagcattgataacgagataatcaatgcaaaagttgaggttgctgttgaaattgcaaacttaaaggagctaatgatagagttgaaagaagatggaatgtggagcaaaagagaaattcagagatggaaaaagatgacgaaagtatgcttggtgtgcctttgttttagtgtgattgcaattgtaatatcaatgttctataagaaaaaaacccagaaatttgttcttggttattagtgtgtaatcgaatgggagcttagtttgaatgtgatgtctttgttgtttctcttgttgttggtctttgttgtttagtttgtgtttggttatgcttttactatgtaatgacatgtagctttggtaatggtaatgaatttcatttgaaagaaaaggtcaacttcttaaaactgagactaagctaatcatatagagagacaagtgcaaacaacaataagtaacaagacttagattatgtcataaagacaagttcaaacaacaaaaacaaacatgagactagcttatcatgttccacgagaacattcaaaccatggtgcaagtccagcaagtccttgcgattgtgcttctccttgtggttgttcagacacttgtgatgttccacgacctcttcccctctgtctttgtgctccacgagttgttcccctttgtctttgtgttccacgacctcttcctctttggctttgtgtttgtgacccattgttctgccctagtgagccattgttctgcccttgtgacacattttcctgcccttgtaacacattaccctgcccttgtgagccattatcatgtccatgtgatccttctacatacccttgtggttcctaatacaaacattacaatcagtttttgaaacagaatttttgaaaatagaaatgaaagatatacaaacctcatttatccttggtcgacctcttggtctctttggtggacttaaaacagtagcatttttgcatgatttcttgttgtgcctttcttgcaagcagttagagcatgtcatgatcctcttttcccttgacattttgttcggatttgaggaagaggcaacttcatttcttcctttccttcttgcataattgcttggccttccggcattgcctcttctccatggtggtggcaagacaggcagcctattcaatcgaccccacaaaggcatcccttggacaggcctaataccacggaaatatgtttctcgccacctatttcttgtgtagtagtcgttcacatagctctcaaccttctcttttttccctattatcacacatgttgcatgaacacatgggatcccaaccatttgccatttcctgcagccgcatgtctttaagtccatatcaacaaagtagccaactccattgacatagatttcatgcaaattatccctggacatgtatctctgtgtattctggaacccagcaatcattttctcaatctcagcatgagctcttggtgtgtactttgttttgcacctgtcagcaatgataaaccttttggctgtcctaaccatgcattgcctcctaatatcctctagaagatctaacagtggtttccgcctagcttgtctaatggttctattgaatgactcactcagattgttgagattgtcgttgcaacatgtaccggttctaaagaatgctctagaccatgtaatcggactagtaagttggagagacgtgtaggcttggatattgtacctttttaagtctgcctggtaattattgaactcttctacggtgtagctgcgtgctatcttccaaaatagacgttgtagctcaatgtcgtggctgtcccttttccaattatccatgatgtgttttgaacattgtcgatgctcggcttgcggaagaatggtatggatagctttgactaaaccctgcaaaacaacaaaaaaaacacaagtttaggatgattgtctatctcaaattacagtagatatatgaaggtttntcttatagaatagagactaacagattgttgatctgaaaggattgctagatcagtcatttcgcatagccccaagcttgtagagagctgtctcaagaaccagtcccaattgtcatcattttctatctcgactacagaccaagcaatagggacaatccgattgtcaccatctcttccaactgcgggtaatagatgtccttttatgtcccatttcagaaaagctccatctatccctattacgggtctgcaagtttgtttccatgactccctttgagcttgaaaacaaatatataaccggtaaaatctctgcttgcttccaatcactgctcctgcaactgtctctatgttgaactctgtccccggattccgcaataacacctctgcttgataataccaaattcttgcaaagtgggtttcatgactagcacttcttgctttcataaccttggtcttcgctttagcacactggtttggagttacttccaacttgtactctctctttatctcagccaccatctcgtgttttgtcatctttggattcttcctcagcctatccaaaaataaccaagcaatggttcctctctttaacatcttgaagtaacccgatcggacacaaatatgcttactctcgtaaaccttaatttgcatcttgtgtttcttcctatcgtaagagcaataacatcgcccttgacatttgacatcggtatctgagcattttgcaccaattttcagagtctgagacctatagagctttatatcatatctagtttttagtgaataccttagaactgcaatcttgaaatcttctgggcaactaaaagtcttccccaactttaacaactcttcaagatcttcgggttcagtacgagcaacaccatcaacaagatcttcatcgttatcactatcagacaatggatctggaatccgctcgtcatcccatatttcatctccactatctgcatcactcacatcttcatcatccctcgctgcctctccaaattctgctacaaagtcttcgcaaacttgttcgtctactcctaaacga

SEQ ID NO: 19618 - DNA, 1420 bp, Arabidopsis thaliana landsberg
tatgattttgttttttgttttcctcgtaaaacccatgagtgacccctttggttcctctttgctttaatcttcaagaaagaaagaaaaaaatgccttcttttgcttttggatctcatcaccatttggcgaatcctacagactcgccgccgtactccgtcgaaattagcatcgacggtgactcctccgacttggattctttgtctcaggtcgatttagagtccggcggtgtaccggcgccggagaaacagctacattccggtggtaagaagaggagaactaggaggagaaagaggaggaagaagaagaagaagaagaaaggtggaagagattgcaggatctgtcatcttcctttagagactaacaaagaagctgaagatgaagatgaagaagaagaagatgattctgatgatgatgaagatgaagaagatgaagaagaagaagaagaagaagaagaatattatggtttgcctttgcaattaggttgctcttgtaaaggtgatttgggtgttgctcatagtaagtgtgctgagacttggttcaagatcaaaggaaacatgtaagtttctcttcaagactacttttgttttttttctgcaaaattctacagattctgtgagaaccaaagtagtaaagaatgaaactttataaggaaaaaatgtatttcctttttatgtactttgagtcttttttcttgtctgaattctagagatccatatcattacttcttagaaagattgtctgctgaagctggaatctacagtttttgttttgtggccatcaattgttgtctacttgtgtctcatgttcttatgttcctgcacatttttggatatttattgtttgtagtctcaattaaagccagtttctgtgatttgcctcaaaacattcagtttcaaaggcttgattttgcagctgcattgagagaatcttgcagtcccttttgctgagaaagtttgatttttaccaatcaagattgtactcatagctctgtttagcttctgtttctgtgtctttgcattttcctagcttcttatatgtttacaagatgaagcaagtcccctaagatttttactgactagcatttatcatattgttgtatgaatctgagcaggacatgtgagatatgcggcgcaatggctctaaacgtggctggtgaacaatctaatccggagagcactgcttctacacattcacaagcagctgcgggacaatctctaactcagacagagccacgaggaatctggcatggtcgccctgttatgaacttcttacttgctgctatggtcttcgccttcgttgtttcttggctttttcacttcaaagtcctcaagtgaaacgttttccatctctctctctctctctctctctctctctctctctttcgcccacccgcacgagctcactcttctcctgttcttga

SEQ ID NO: 19619 - DNA, 552 bp, Arabidopsis thaliana landsberg
tgacttacacggagtacccgatcaagattttggatactttgactcgggttacgagaaataaggtgataaagatgtgtaaagtgcaatggagtcaccacggtgaagatgaagcaacttgggaaagagaagaagagcttcgcatagattttccccaccttttctctagttcttcttaaatctcgaggacgagattatttttaaggggggtaggatttgtaacaccactttgtaattcgctagaaataataccaatagagaaacaatttctccttatatgagtttgacctttatgcatcaccacatgtgaacactaaattcaatgacagataattcataataggatataccattaaagtttatgcatcatgctgagtttttatttggatgtgcatttgtgcttaataacatctatataccattaatagtatctcaatggatccatagaatttatagtttaacttgaaaatcacaccatgcaaatagcgcagagctcggaatattcttcaatatagatagaattgtcgttagaatgactgcaccacagctgatatg

SEQ ID NO: 19620 - DNA, 619 bp, Arabidopsis thaliana landsberg
  unsure (1)..(619): unsure at all n locations
tgtnggccgttcacgaggatgattacacagataatgaatgaactgattccttccgaagtccgtatcccgcaatacgaccaattttcattctggcggagggacaagaaaaaggtcccgcaaaatactatcagaggggactgcggcgtttacgcattaaagattcttgaatgtttattgcttggtgtttcttttgatgtcattactgatgcaaatatccaagttctacgggttaagatggtagcagagatcttcgatgaagcaccgaaaaggacccctgcacggtttctagagacgttattggctttttcgaacatatgtcagtgtcttttgggatttttagcatgtgattgtactaaatattgaagctttaggattgataaccagaattatgtttgtatgaatctatgaagttgaatgcacgctgttaattataggttaaatcaatgtaatggctgacttattatcgctgaattcgtgttatggctgagttatcgtagattaattcgatgtttagctgagttattctaatgtggtggctgacttgtcatcgcacaaatcatgtcatggctgagttattctaacataacgtctgacttatcatatattaaatcgatgttgc

SEQ ID NO: 19621 - DNA, 1102 bp, Arabidopsis thaliana landsberg
aaccattaattttttatctttttcattttaaatggtaaaaattagttgaataattttttgtctaaccaatgtaatggtttttgtacatatatatatgatatatgtaataaagaaacatagaacaatatgtttgtaattaaacttgtacatgtacatatatatatatatatatatatatatatatgtgtacatgatatataatcaaacttcatctcacgaaaaaggtggataatcacaatctcaaatattatgttaataagaattttcggaagatcaacatcaatgatccaattttctcaatcagacattattttcctaaatttgcatcaattttgttctagttgactaattgacccaacaaaaaaaacaatattattcgattcaatagaagtgtatattctaataacattgttttctttttataataatgaaaacaaaacgactttgatcaaattgttaagctgtccactcacacacgcatcatcaataaataaagaaaaaaaaaactcaaacccggtcaaagatatcccaattgctcgttgaccatgataaggacatatccgtcattttaatcttcccacgcttttcctcaagggcttattcgtctttaaacaaaaaaatagacatccactgggcacgtatcttcttcttcttcctcgtctttaatcaaaaccaatttattactctgattgttatttcgcaattaggtataattcaaacgggagatttcgttttccgatcatcaccgatcaacttcttcgccggagaacaaataagtttcaaagcttctttagacgattaaagtagaataaacagaaattgaatccatgaagaagataaagagaaacctcagagaagaagaagaaggtaattgataaatctaaaacactaattagactctataatatcggccattaatggaggaatcagattctctctctctctctctctctctgtttctctatgtgtatttattttggcgtgtaccgttgggaagcttgagagcttttaatagctcaaccaatttccaagtggtctctctctctcgaggtcttagggttctagctgttgacttgtcgcagcttcactggagaattgaatg

SEQ ID NO: 19622 - DNA, 409 bp, Arabidopsis thaliana landsberg
tgaacgatataaatagtcgaaaccttcttattttgtatgctctgaataaaactcatttgaacatattatgtaaggttgtgatcgattgtggtgctttacacattcttggggacctgttaacccgagcctatgagagatacataaaggcagacactttcttgacgatttcaaggatcactacaggctttacagaacaacttcaggtgcgaagcttttgttgctttatcacgtgcatcagtttttgattggtgtagttgcagaaacctatactaatctttttctaggtgtctttcttttccgctggtgataataggcagttattgatgccaatttgattccaagggttggatatctggctcaaaataatgaattggacttgaaaaaagaaagtgtatgggccattttaaat

SEQ ID NO: 19623 - DNA, 302 bp, Arabidopsis thaliana landsberg
attctcaaaataacttaacaaaaagaaaaacaaaaattgatatctaccataaacttaaaagaaaaatcatggcgagaataggtaacaaaattaattattctttttttggaaaaggaaatttagcccggttagaatatgcggtcatatgtaaaatcttaatacctagctatgttacaaactgctataaatataaggaagtcggtttcgtaattttcggtaacaatctcttataaatatgctatttaacccaattctaaaggactggaagatgaaaaacaaaatcaccgtcattgcaaaaagtt

SEQ ID NO: 19624 - DNA, 2376 bp, Arabidopsis thaliana landsberg
atttttttagggttggatgtgtgaatggatcttattagtttatctagctgaaaaaaaccaagtttaatttattggacaaaaaactgtgactagccgaccaacaatgacatcttgtagctggttttaatatatgcgcttcatgttcctagctagtatattactcacacgtttgaataattcacataaacactattttaaaattctaatttttttatttgtatgatgaaaaaaaaaaagcagtttagtagaatgcataatagtacaagattgagatctcaggaaataagtttcatatagtttacaacaaaaactatatatcattgatcccatcacacgattaataacgatgcccacaaaaatatcattgacgaccctcagccatctcataatctatttggtatttggccctttcgtatttgtttatttgaaaatgtttcaatttgaattcctcacaaaaactttaaaatatatataaatttatatagtcactaatttatgatattaatgaaactttaaatcggaccatctaagcatattgtgatgaaacaacaatatacgtctagaaagtaatcaggtggtactggtcttactctattatatatgttcctcatcaatcatcgaccgttaaacttcaaacctaaccccactttgagttgtttaatctaacggcttaaaaccatcgtaaaccagtaattgatgtttataaatttcccctcccaaatcacaccgctaactaaatgccaaatccctcgattcctggatttatttcttcaaattaaaaaattcaattttcagatcaatcggagaaatgaatcataaccgtcgatatcacgagagtcttctgattctgtagatggcgatttcaaatgagatcgaaaccgccattaacgagaccttccataaacgtatcatcaaactctgatggagagtcagcaacaacaatcaccggccgttgaaacgcctttgttgctcaattctaatcaggatcatcaagaccgaccttcgccggaaatcgacggcggcggtggcggcggaggaggagaaggtgttaacgacgatctagaccgaacgctagaatggttagagacgtttttgacgctccttgggtttaatcaatcgtctaaacaaagccttgttctgtcttggatcgtgtttttatcgattggtttggtgcttccggtgacagtgttggagctaggtcattgtttagggtgtgagagatatcagtacaagagtttcgagctcaacatcgttgtttcgcaggcgttgttagctggtgtttctctgctttgcgtttctcataatttgagaaaacatgggattcgaaagtttttgtttgttgatcaacttagtggtcgaatggatcgtctcaaagctcaatacattcaacaaatcttggtgatttattctactttctcttcgtttttgagattgcaatgtgatgatgatacttacttcaaagtttgtatctttcttattgtgttgcagaactctgtaagattgcttgcagtttggtcacttccatgttttgctttgaagggtgttcgtgagatcatcagaatgtattatgtgcctcatgaccagccatggttatctgttgcaattctcttgtctatgatcttgtcgtggacttacttaagcactatctttctagctgcaagtgctatgtttcatttagtatgtaacttgcaagttattcactttgaagattatgcaaagcttttagaaggggagtctgaaatctctcttttcatctatgagcatatgcgtttgcgtcattatctttcgaaaataagccataggttccgcatctttctgcttctacagtttctggttgtcacagctagccagtttactacgctttttcagaccactgcgtatagtgggcgtatcacttatataaacggtggtgattttgcagtaagtcttcttcttattcactgattgttatgttcttatgtggtgagcttaagcttggaacatgatatgttttcaggtctctgcggttgtccaagttgttggaatcattttgtgtctacacgcagcaacaaaaatatcacacagagctcaagcaatagcatcagttgcaagtagatggcatgcgatgatgtcttgctcgtctacagattcaactcagataagggcatctcctagtggagttcatttggaggctaccacgaatccgcccatctcctttccgatttcccgttcagatagtgatgtggaatcaatggatcactacatgaggatgcctgttactaaccagtttccttcttatatgtccatgtcctcatatcccaaaccccaagctttcggtgagatttgtttagaactttttaacttgtacctttacagctaaactcagatatgatgata

SEQ ID NO: 19625 - DNA, 650 bp, Arabidopsis thaliana landsberg
attttctgaaagacacaccaaagacctcggtgctcttgccggttgcagccaccgagatggctatcaccacggcagcttcgagccctagcacaaccgaaggagacggagaagggattgaccattctttgttcagcttcaactccatagatgaagctgaagagaagcctaaactaatagaccatgacattaatggtctaattacacaaggctctctttctttgttcgagaaatggctctttgatgagcaaagccacgatatgatcatcaataacatgtcactagagggtcaggaagtgttgttctagaaagcattaaagtttgacgatttgcttgaggaaccacgaggcttagttataaacaatttgtataattaagtactctttagtttttttttcaatccttattatgatcatattgcagtaattagggattttagtctttagtagtaactcttaagttttaacacatttttctctatctttttagtaggaactctttattttttccttaaatctttgtcgacgtggagatgatatcttctatgtagtagaaactcaaaagtgtagatcatctttattaatgtaacgtctttttaatcgggggcctcatttggttattcaaattcatgtcacttaattagtattgatatg

SEQ ID NO: 19626 - DNA, 1082 bp, Arabidopsis thaliana landsberg
actcatttgatactcgcgatttttagtggtgaattttgggcttttattttaggcggtgagttttgaccctatatatatatatatattaatggatttgggctttggtttgggccgtaaaatttgcctccaattttgtttttgttgtgactcgtttgcgaccgattgagggattcctctttgttaattactatgtacaaaacacttaatcaatttttcataacgcagcgcttctctttcttgatttagggtttcactctaaaaagctctcaactctcttctcttctcaaatcgatttctcttctcaatctcttctcaatctctcctcgatctcttctcaatgtctcctcgatctaatgacgccaaaagtctacaaggggtcgttgtggcaaatctcaatcaggttgagggtcttcactggtccggatccgacgaaggcaatatgtagtaggagtcagagggtgaatcgtcggaatcctccgaatccaaccactggtaggtgtaaaatggcaaaacctctgaatccaagcagaggcttaagtcccgatcatctggatccaagcggtggctttgttcagcctccatcaaatccaagtgtgagtcaaactttgaataatagtcgcggaggtgggagcagagggggaaggagtggtgtccgagtgtcttctcactcctctaatccatcagagacacagtatgagacccaatctcatagaagtcttccatcccactacccgacgaggtcacaacctcttcctgctcctcaaccatcgtctccttttattcaacaaccgcctcttgctcctcaaaatgacgaaagaaacagatgacgacgacaacgacataccaatccaagaagatgatgaagaaaaaaatccagaccaagactaccaagagctgttagatggtttgcttaatctttcaggccgacaactggtacatgttttgtccaaggttcctatcccaggcgttgaaactctctgataatttttctctttctcaatctctctttttccttttcttcttattggtgatgtgtttagagcactgctagagaatgatctgtgatttgtgattgtgattga

SEQ ID NO: 19627 - DNA, 593 bp, Arabidopsis thaliana landsberg
aacacaaccataacatgtcattttcacattataggaaattcttatgctttttaatcgtataagttaaattctggggtaaaatgagactcaaaacaaataatattattatactagattttgacccgcggtacacagtggggctagttttttcacaaaatttatatattgagggtatttcgtatagttgagtaatagattttataattgggtttaaatgtataatatgtggttatagtatgttacgtgagactacggtttatttacaaaatatatagaatctgtattttgtagaatacaattttctttctactcggaatgtagacgaaattggaatgttgaagagtagtgtatatatgtcgactttataactttttgcaaaatttaatttaatttgttttgtaatgaatttgcgaatgtcgtaagagtgtttttataaatagtgcctaaattttaaatatttggcagagttaaaaaatgtagtaaaaaatatagttcaaaatggttttttaaaaaatgtacccaagctatgtgtttaaaaataaacaaattaaagataataggcacaaaacaaattagtgattttaagcccaata

SEQ ID NO: 19628 - DNA, 521 bp, Arabidopsis thaliana landsberg
ggattaacatcaagaaccctcctccatgaatcagagctaaaatcgtagacatcattgtcgcgtccgcgaccggttctgtacttcttggcatcataaagaaacctcaagattttgtggttacggttgttgtcgtgtccaagagcaaacacgtcatatctgtggaatgtgtttctaggtcgaatccatttggtttgacacaaatacggattccataccacaagtcccgagttgtcttcggcgatgcataaaagagaggttttcatttgagaaccgtttctttctctatctcctactttttccttttttcaatagtatctcatatcgagacaatggatggaggttctttagaacaaataatggcagatggtttcagctatggcagtttctccctaatggcctactaactttatattctctccggcctctgcattgcttctatgactgagagtatattgggataaagaaccttattgaggtagatgagagagtacatattcatcagatgactagcattttctacc

SEQ ID NO: 19629 - DNA, 849 bp, Arabidopsis thaliana landsberg
ctccaagcttgtccaatgacaatcggaccagcgccgagaatcataatcttcttcagatcggttctcttgccgacgatctccggagaaaaaggcttggtagtggtgtcggcgagctctgagacgggtttgagaacatgcgtgagggagcttttccgattgagacatggggggaaagtggagaaggaagaagaagacgaggcttgttttggttttgatctgtaatagatggcagagcgagagaagaaagtggaataggagagcttggaaggagagaaacgaggattggatttggaagaagcgaaaatggaggaacaattggaagagagttctaagcaatggtttctcatttttgcttcttcttcttcttcttcttctaagttttgcctgtgtcggctctgtaactggagactgctgcagaagagagtgagacacgagagagagggttttagggtttctcgaaatttggattattccggtttggtatttattttgtctttctcaatcctgctgtatttgattatgacaatccattttttcaacaacaattattggaaaaatatgataaatgacataaaatagataaaaagataattaactcttccaaaaagttgcaaagagaaatgattttttttttcttggttagaatgtagagtatttataataaatgactatggattcgaaaagaatatagaaactaactatggctgcatagtatctgtcggaaacatactttaaatgactatgaactccttacaataggtttttggttcaggggacaaatagtaacataggcaaatcatttcaaattttgaaatttgaaatcacccggagcccaaagttgatttagga

SEQ ID NO: 19630 - DNA, 834 bp, Arabidopsis thaliana landsberg
aaggcaacccaaaatgagtgggttattataaattatataagttcgttctggtttttagcaaatcttgaagtgttcttttggacctgttcgcaaccaagacgaatagcgaaagattcttatatactgttatcacagttaataattagaaatttagaaagaaaaatttgagtatattgttgacattcgtttaatacaattgagattatattaataattaatacaaaatacatatattttaaatagtaattagcaaatggacaaatgtaggtataaaaagataagttttaagagataaattagaataaaaatcgtttagttaatgtattttatttaatttttaaaattttaagaattaataaaaattacatttcgttgtaaatatatacaaaggccaggttttcaagttaatgtatatatatatataaagaaatattttgttttctttgctaaaaatgtaaaattatgtgtgtctttattagtttctagcttttttttattttagtcgaatgtttaacatgtttttcgctgttatggtatagattgggccaacttgaaaaacataaagtccataaaatgccaatttgataagcccatataaaaaaattgaatttaaaaaaagcctacggtgaggatcgaactcacgacctttcgcttacgaagcgaacgcaataccactatgctacggaggcaatttgttcattttatagaatcattttagaagaatgtttattacttgttaaacaggctttaagtaactttcatgacaacaactttgacggaaacggagaccagaaacagacgccggcggagatatgtgcggaatgcaatttaggc

SEQ ID NO: 19631 - DNA, 1723 bp, Arabidopsis thaliana landsberg
caaccgtatatgctgtcttttgtgggcaaatcttttttattgatatggattgtctcaaaataagtgatagaagtccgatataaagcataaaacaatctctcatgatcaaccattaaaagaaataaactagcaacaacccatgttcctcttactgacatacatacacatatagtcaaagatttatgcaataatttggactttattaaaaatatttacaaaccatatagacatatatatagtcatttttgatatcttggtttcaaaatctttctagatctttagttccaataaactttcaatttaaaagcggttttctaaaaatccgaagttggccaagtgatatattagtcctgtccaaactgacacaactcacgaatgtggtacgggttgaaaagccttaggccatgttcgtgaggtaaagatactcgcggtcgatcaattttggggaacgaattcgttctgggaacttttgttgattgattacgggcgtcatacgtgacgcccctgttcttttttatttttaggacggttcgggggtgttacaagagtggtaccaaaagacgacgaatatattgactcatatcttttatatattagcatagtttgctttttcacttttaatgtgagaattctaacatgcacatttgagataatgaatcattttcactcatcgttttggatcgaacctcgttttgtttttggtttggtcataactttttaacttgaaaaccacttgagagtgtgtcgactgatttatatactccttatattttactttatatcccatatttttttatgatgtaagattcttaacatagtcaagtactcataatgatctagtagttgaatgatttacgatgattcgaatcattctacttcgattgagggtgtacactaattagatcctattatatatgatataaactgatatatataagaattattatataatgcaaaaaatgatcataagacggacggtgtatatttattttgaatataatacaaaattatcatatgtccaactccagattcgtgtgcatgtctctacgtatctccggatacgatcatgctataagagtcaagacccctacacgatatgacaaaacgagtaggaaaaacgtgacaccaaaagatattaaaaagctgaaactaatatatagaaatgaaaatgagagatacatatcaacattatacaagaaagaaaatgaataaaataattgtaatgtaggactgaaaacctaaaaagaaaaagaaacatcaaaaggttgccaaaataaaaaagtaacatgaaaataaaacctgaccagaaatttccataaagcccaacctatttattttgcctacactctgagccccactcattagttgctcaactattttaattccttgtcataattgttatttaagaacctttataactttcactttcagggtatataatctctatggatttaaatggagaaaaccccagtgaccatagtttgatttaaggaagggaaagttataggaatggattatgaaatattatagaattttgcatattaatgcaaaatatctatctttataaaacatacttttaaaaatatataatgttaagaaacaaaaggaggttaatattaagtgaagactctcactaaagtatacaaatgaagagatataaaaagcaggataaaaatagagtcaaaaagaaagaaaacaaaaacaagacatagcaatgtgaatt

SEQ ID NO: 19632 - DNA, 2273 bp, Arabidopsis thaliana landsberg
aaactttttttactattctcgaagtcttcattttcttggaagaaatagaggcctgcaatgccaatcccactgcatttgggttatatctaaataccatttgacatttctctatggaaacgattaatggtttaacatctttgagtttctataaaaggcatgaaattttctccttccgattaactcgttctgacctttcttgcctaacactcaacagagctaacaagctaaggagggagagagaaagagagtaatggcgataaagaaccttcttcctcttgtggttcttctaagtgtccttggagtatcagtctctcaaaagggtcttgaccttaactactacaaaagcaggtgtcctgacgttgaagccattgtccaccgtgtcacagttcaatatgtttctcgccagccgagtcttgctgccgcgcttctaaggctgcattttcatgattgtttcgtcagagtacgtttgcttctttgagactatactaaagaaatatatgtgtggaaaaataccgctaacatttttgatggttcatgtagggatgtgatggttccgttcttctaagatctagagacaatgatgcggaaataaacgctctccccagcctgaccctgagaggttttatagtggtcgatgccgccaagtcagcggtcgagaagaaatgtcccggtgtggtgtcttgcgctgatattctcgccttagtagcgagagacgccgtctcagctgtacataacatttcataatggactgattcttctcattccaaaatcattgaaatcagagtactacaacttccttttgttgccttttcacagatcaatggaccacagtggccagttccattgggtcggagggatggtcgtttctcaagacgttccgaggttaacataccttcgccttttgcccgtatagcttccctgaaacaaggcttcttcgccaagggtcttaacactacagacctcgtcgttctctcaggttctaaaaatactttctttttttgaatctagtgttaaattatattcaaaaaaaagtaacgtttttacaactaatgcacgggaatttgaatttctacacaatgctaaaacttaaaattgatgatgatgatgagattatgatcgactttgaagccaagcttggaaacaagtctcataccgcctatccttcgaccttttgattgttgtgatttgatttcggacttatgaatcaacccatttatttaatataataatagtttcttgagcaggaagtcacaccattggaatctctaattgcggtctcatccacaagcgtatctacaactttacgggcaaaggcgattttgacccgtccatgaatccgagctacgtaaggaaattgaagaaaaggtgcaagcctaatgatttaaagaccccagtagagatggacccaggcagtgtcaaggtgttcaactctcactacttcgacactgtggctcaaaagaagggtttgttcacatctgactcaacacttctcgatgaccctgagaccaaaagctacatagacagacaggttgctaccgctggctcttcattcgccaaagatttctctgagtcaatggtcaaacttggttttgtcgaaatactcaccgggaataagggtgagatcaggaagagatgctccttcgttgaacccaagaaaactaaagagacactcatatttctttgaaaatttaatatatatatatatatataaataattatttcaccttgatttatttttgcgtttgtctggttcagttttttttttaaaattaggtcatccacgtttgctttgcatttaatgtttccactttttttactacagctcgttttaaaaaattaaatctttctgtctttaatattgtgcaactgaaaaatttactagttatgtttgaatttcacatttgttgttcaatttatataattacaaaatctaaagggacaaggagacagaggatggatcggagatggagaaattgatggatcagaagaaaagataatgcagacggcagaccgagaagcgaacgtgtattccacacatgaaagtaaaatatttattgtttgtaccgaagttgtaacaacaaataagtaaagggtttttgggaagaacgaaataatttttattaacttacggtaaacaataggttgatcgaatagttacaagtaatttttatcgatcggcaacgtaatacgaatcgaattgagaacaaaacgaaccgagaactaaatgaaccatgaaccatgaacgaaaacgaatagaaagacaaagcgttgta

SEQ ID NO: 19633 - DNA, 1402 bp, Arabidopsis thaliana landsberg
  unsure (1)..(1402): unsure at all n locations
agataattacctcaatagcagcatcagatgcttcaaaggagtcatagctgatgaaaccaaaacctcgtgaatttccagtatcgggatctctcattatctgaaatgaaaagtttctaacatttattctccacagtggaataccgatgaatcctaatttactatcgaatcggtgacaggagacagataaagagatcaagaatcatgaactacaatctaatgaaataaaaaatactaccttaggattagaagcaatcacaccaaatgcactgaaagtatcatacaagagcttctcatccacatcctataaaagaaaacaaaacctggtcagctaagagattaaatgacctttgtagagtatcaaaatcagagtctaccacaaaagatacttacagggtcaaggtttccaatgaaaaggttagcaccaacatccaggctcttcttatcttgagatgcctaatacaaatttaaccagcaaacaaaatgttagcaaactcatagaagatagattaaacaagtctcagcatcaaaactcacaaaacccatccgctcgatactaaacaatgtaagttacagaaacaattcgataccttgttaacacgtataggcttcccgtggagcttaatcatgttaagaaccttaatcgcctgcacagaaacatcgaaatcttttcaacattgtacacaaaaaaaagtctattaacttctcacagtaagtgaaaaagagcaacacttacataatcagcatcttcctcactacgatattcaatgaatccatagttctgatgaagatttgtcactctatctttcggtacatagacattaactgatacaggccaagaacaatatcattgttccactaatcaaaagccattagctattgaagaaacttaaggagatatagatatgaacttaccaacaggtccagcttgaacgaacaattcccaaagcaattcttcagaaagctgagattcaaacaggaaatttaaatcaatttcaccaactcacagaggaagatgagaaaattcagaatcatttcacgaaacctaaaagttaaaaaacctgagcatcgagaccaccgacgtaaacagtggcgtcttggttcctctcagcggagtgttggccgagaagattagctccaacaccaggagcgattcgagtcgtcatttttcttcttcttcttcttctccttgtttcgttactccgtcgccgattaagagaaatctgagattttcaatttcgtcacttctggcgatttttctagaagttagaacggacggtgaagaaagaggggtttatttagagtggtgccgtctctaatgggcntataagcccattaagctattttatatccattaagatatttagcctatttagagtctagagattttgagtttttttactta

SEQ ID NO: 19634 - DNA, 1751 bp, Arabidopsis thaliana landsberg
agcgggggtgaaacatatgtcatgagcagataatgtgtcctctatgtcttgaaatatgatgtaattcaggggaggagcttgcaaccattagagttgaataagcgttgcctccagctgtgacacagcaaaattgtattaagattacatgaaacacaaattccaaattaactacttggtattgacacttaccacacagtctttactcgatcattggcatcacagtttcctccgaagacataatcactgtgataagggctatgaacaaacacttctcccaagcaagcatgtaatccagcatcacataacatttgaagtagcatttttttcaattgtttatcgaaccataatttgcaattaatcaactcaccaagaatacacacaattgcttaatctaagcttacaagatgattttaagtattctaaatcttagtaacaatgcattatcaagcaaacaacgcaaaacaagataaaagaaagcaagaaacaaaagactaacaagtttcaaatgtaaacaaagcggaaaattaacaaattactaagtgataactaaagacgaattctcgggttaaggtaatcgattagaaatgataaagagatggagcatcaaacaacttctaacaagcaatgatccttaggccatagaacactaagcaagactaacatatttccatgatattaatccttttactaatcaatctatcatcaacaatttccaaaggcaatcagttgatcaataagcataaataacaagtctatctatccactaatcaccctaatcaacaatgtgcaaaggtaaggtataaaaagcacttaaagattttggttcaggaaattcatcgaacaccttccgggcatgaaattcctagtgtctaaatcaacataatcaaggttgatctagccttaaaagcaaccaataagcaaggatcttaagtaatctagccctaaactccataacccaacatctaaaccatcctaatataccctaaccaaagaactcttaatgactactcactcatgatcatgaaaacacaaaggaataggtttgatctttgtgtaatcataattagagaaggtagataagagatttaaaaggtaaactttgattcaaaatgcaactaaccaagattcatacaaaaacttaagataaagaaccttaaaagaagttttgatctctaaaacaaaagctcgcctctctaaaactaggttaagagtatttatactaatgagaaaataaaccggatcaacacggaacaaatcgggttttgacccggtttaagaaagcaatcgaccaagcaatagatcacttggtagattcgaatatcgtccccaacattaatccttgaccaatcgacgatgcaatcgaccactttggtagattcaaatttcctccatagctctggtcctgaccaatcgaccacgcaatagaccactttggtagatttaaatttcctccgtagctctggtcctaaccaatcgaccacgcaatcgaccatgcaatcgaccacttggtctactgtcctactagcttctcctctttggccactttgcattcttttagctcctttgtttgctctatttgctccattttacttccaaaactttaaactccactcatgtacctaagaaaaccaaatgaaaatgcgaattcaatactatatgccaaaatatgaatgccaagcaacaaaaactaagagaaaaaggggttttaaaacaaccaaaaacagtagatatcaactcccccaaacttatct

SEQ ID NO: 19635 - DNA, 567 bp, Arabidopsis thaliana landsberg
ctaaggacagagaggacccaaaagagaaagagaaggacctgaaagagaaagagaaggaccagaaagagaaggatggaggtccttctaaacccgtggaagcaaatttcacaagaaggaccactcggagaactaagaattgaatttggttgtacttgttaggatttgaacttggttgtacttgttaggatttgaatttggaatgtttggttttaggatttgaatttggtatgcttggttttggatttcaatttgctttgtttggatttgaatttggtatgcttttttttggatttcaatttagatatgaattggaatttgatatgttaggatttaacgataatactgagaatacaagggaaaactaagatttaacgataatacagagaatacaagggaaaactaagatttaaagataatacagagaatacaagagaatactatgatttgaagataataccgagaatacaagggaaaactaagatttaacgataataccgaaaatacaagggaaaactattatttgacgataataccgagaaatacaggggaaaactaaaagttaattga

SEQ ID NO: 19636 - DNA, 2177 bp, Arabidopsis thaliana landsberg
gctaagtctaaagatggcttaaaaggaagaaaatacttttatgtttttggaattcgaaggcatctgcacccagagactgggggaaagaaatatatttgcctccagcagcctactggatgtctaaggacgagaaaaaggtattttgtcagaggttgtctaagtttagaggtcgtgatggctattgcgggaatattgctaattgtgtctcagtcaaccctcatgtgattgggggtctaaagtcccatgatcatcatgtactcatccaaaatttgttacatgttgctttgagaggcttgctgccaagcagacgtagggctgcggtgactcgagtctgcaactactttaacagattgtgccaacataccattgaccctgagaagctaatctcattggagtctgaattagttgagactatgtgccaggtggagtggtactttcctccatctctgtttgatatcatgtttcatctgccaattcatctggctagagaggctcgcttaggtggacccgtccactttagatggatgcatccctttgaaaggtattgtctataactttgtctatatacttaattacttatataaaatttggatattgatctaatcttattaacttgcaggtacatgaaaactctaaaggcttatgtcaagaattttgcaaggcctgaagcttgtatggctgagggatacttaggtggagaatgtatggctttttgcttggagtttctacaagactcattatcaattccagaagtcgctaaccgcaatgaagatgttgatagtgattcacttgttcttgaaggcagaccactgcagaaagctacacaagtaactcttatgagtaaagagcgagacatagctcatagatatgttctaatgaacatggccgttatggatccatatgttaagtaagtgatcctgcattattttttatcattattatttgattgtcattaacttatattttaagaaaaggaagacacgaggaccaactaggatgcgtaaaatagcaaagcaacctgacgagaagctaaaagttgaatttacttctctgggtgaacatgtaggtaatggataagtcacactttcatctttccttggtgatataaccctatttttaccggttgtagctatgatttatatataggttttaaagtccttcaattatttctaaagtcttttctagtttttttccacgtctttacatgtttgagattcatttggagataatggagcattatggagcaaaacagacaacttaagctgcagaagcaatccatagacaaaaatgcacgtaggtgtcaaacgacaccatccctggtgtctagcgacaccaatacctgacgataattcgaagacgcaacttattgatgttttgaagatttccaaattcggcccaaaactttctcctatgtctaaagaaggcccatcacgtgttttaggccatatatatagtttttaaggtcattgtttagacctaagcttggagaggctaatcttctttatctcttttgtacattgggagcaaaaccctgtggagactccctttaaagaagatccttctaaaccttaatctcttcttgttttcttcattgatttcttattcaatcatgttatttgctacaatctccatgtttgattagtcttctagttaggtgtagggtttctcattagggttatagatgatttagtagattgccccattgtttggttatttgtagaattcttcatctttagttgttcttaatgctagttctagtgtaactaactagaacttgattccggataatagatatacccgctataacacccccaaaccgctctaggccaagaacaaatccgaaagcatcacggttgactcccgcagccagcaaacccaggttcactgaacacgaccgctcgcccgaagttgtccaaccgcgagaaatccgtttacctttctatcacggcctaaggctttgcaacccgtaccgcgatacgcgagttatgatagtcggcgacaggactaattatatcatgggagacacgagatttactaaaataagagctttattactatcaatgaaaatatcgagttataccacctatacgcaaaacctatatctttacaaagacaatgcaaactacaccggttggcctaacatccttcgctcccactaaaggttacctgttggcaaa

SEQ ID NO: 19637 - DNA, 1461 bp, Arabidopsis thaliana landsberg
tttcaagctatgtacagagaatatgaaatcgtaccttcaatggaacactatcatagtgttaccaaaatgttggcaacatctggtcacttggatgaggcactgaacttgttgagagaatgccgatggaaccgagtgttgacgtgtgggaaacactaatgaatctttctcgggttcatggagatgtagagcttggagatagatgtgctgagttggttgagaagttagatgccacaagattagacaaagtgtcaagtgcaggtcttgtagcaaccaaagcatcagactttgtgaagaaggaaccaagcactcggtctgaaccatatttttattctacttttagaccggtagattcttcacatccacaaatgaatatcatttacgagacactaatgagtttgaggtcacaactgaaagaaatgggttatgttcctgacactaggtattatcgtagtttaatcatggcgatggagaataaagaacagatttttggttacagagaggaaattgcagttgttgaaagtcttcttaagtcaaagcctcgatctgcaatcactctgttaactaatatacgcattgttggcgattgccatgatatgatgaagttgacgatattcataactggcagagatatgatataagcgagatgcaaagatataccacttgctcaaaaatggcgtatgccggtgcaacaatctttggtgagctaactgatggtttccctctactccaatcctttgtatatgcaataaatttttagattttggtaaattgatcatcgagttactatatcgtgttacttgagagaaatgagtttggaaaagagttcaaccatctcttaacaaagagagaaggaagatagtttgatcaaagtgagagctagagacttccatataatgatataattcaattttaacaaaatttcatattgatgtgtgtgttttagataactattcgataacttcacatacatttattctctcataagagagacaaggcattgtctaccgattttaattttacagtgacgaggaagaaaactctactgtggagtttaggatcatggattcagggtataacgggtagagatcataacccgagaaggaggatcgcattgtcgttgttgtttgatcggtcacatcagacgtgcttgagattccatgtgtttcaatgtccctccgctttaagatgctccagttgtgtccatatatagcaggatcagaaaaatcctgtgttacttcgatctctccctcaagcatttgcacggcctctgacattattggtcttaaagaaggagatgagtttgtgcaaaggagagcaactttgatcatcctcactacttctttgctattgaaagcccctttctgttgcagtgtcagcgcctgaggtataatgtcaaaaagggctcaaggaaacttatagaaacaaaaatagtgaacgaatgggttaaagaaataaacgctc

SEQ ID NO: 19638 - DNA, 840 bp, Arabidopsis thaliana landsberg
cacgaaagaattgtaagaaccctatgtagaattaagactttgattatagatgcaagattataaaagactattcttttattccttcgaaaacttactcaaaacccaagttcttacaatctcttaatctctctctcaaccatctaaggttttccacaacttggaaactcatatatttagagactaacatatccaaaacttactaggattgtaattagataactccaaactttttttttttccgctagataactcctaacttatcctttagatatctcctaaagatttaatataatcctatttaaactaaatcacttatatctcaagttattaccaagcttagtccaagaccctaaaactcaaatttgattttaataattctaagttgcaaactcatgacacggtaatagagatatagtccgaatacacagagattggtcacacagctgagccggagtcggcagtggagctacaacaacaacaggatccagccggagccggtgacggaactggagctggaaccgagttggatccggtgctggagtcggggctggagcaggagccagtgctagatccagacaatccagcgtcgtcctgacggagaccattgagtctagttgcaacaaaagctggagctgaagttggagcaggagtaggaacagcggaagacaaagctgaagcttgacaatccagggtcttcctctctgtgactgagttcctcctgcttctctttctccttggaacatcatcaaatattctccggcatctctcacgatccattctccgcgtacacctagctgactctgacaaaagaaagtgttgtttgctccagcaaggaacaga

SEQ ID NO: 19639 - DNA, 497 bp, Arabidopsis thaliana landsberg
ctgcgggacgacaaactccagttggctcgccgccgctcgctccatcagcagcgacaacgacctccgctccgggcggctaaacagcatcagcgatgacctcagggcagacgctactgcgacaaggccctcgcccgcgtcctcactcgaggggcaaggacaagcttatgaaagccaaagagccggaggttggtccgcgggtggcgctgacggtctcatcggcggagaagccttctccggctgccaccgccttagcaccgacgacggcagccacctgcccaccggtagatccccactcaagtcctcccggacgggcgagcaccgacctctgcgcggagcgtcgtgccggagcgagggcaggacaaccaagaacacgaacgccgccatagcggtgtgcgacgtcttgggtggtccccggtgcgcgcggcgaatagccgccagtacggcgggcagatagccacctccgcccagcgttgagaggtggcacggagctgcccaga

SEQ ID NO: 19640 - DNA, 1342 bp, Arabidopsis thaliana landsberg
agttgaaatattaataggtacacgggataatatactgacctcttcggggattgcaaccttttcagatattttttcttcgagaacatcgtctttcaattgagtaagcacctaatgaaaacaatttaacaaacatcaaattataactccgacagtaatgttattaatagttagctaataaattacttcttcagggacgacaaccttctcaggaattttagatacattttctgcgagaatatcgtccttcaattgagtaagcacctaatgaaaacaatataacaaacatcaaatgatatctccgacagtaatgttatagttagttaggaacttaccttgctaacaactacggttggtgaagacgggtcactgagattcgcttcataattaaaatcccctacagtcgtcggaggaacaaatccaggtaacgcagtgtccttcagatttagtaaccaaataattggttatatctctaattggcaaataagcgttacaaatagcaaaatagtaacacatacctccaaggcttcatctacaacgcttggagatttagcctccttcaaagcttcctctccatccccacaaattgtttcagcctgacctcattatatggagatggatggccatctattagtcaaactcacagcaaaacattcataggtgcgaaacagatttcaaaaacattgtacgtacaatgggattgccatcttctgtaacttcaaaagcaaattcttgcctaaccttgacctctggtgattgtggctcctccaactgttgtgactcaggagcaacaacgtcttcttcaggattaccaccaaggcctttcgcaacgtcctatacaaatgcaaacaatacaaattagaaataatctgtacgtacactaaaattagtagtacgtactcctgtacctgatgggacgaggaagatacatcatctgacattttctcaatggctgggtcagacagtattgggtcaggcaggagttgttcaaagttaccaccatcaggaatgcaatgttcgggctgttatgtcaaaagtaagaacattaagaacataaaatattttgtacatacaataatgaaataataagaacaaaagttacctggtgagatggtgatggaacacgatcgacattgtcttccattacagagtcatagacattttggtgtaactttgaagaatcttcttcaatctccgagttccctccttcctccttcgaaatcaaaaccatacaattggtcagtaatatttctttatgtacgtataataaggcacaaattgtaacatgactattacacaagtgagttacctcttcagttgatgatgcttcacccaaatatatgat

SEQ ID NO: 19641 - DNA, 1053 bp, Arabidopsis thaliana landsberg
cgtaagctcccaccaatgatatatattagtgaaaattatatattttgtataaactatgatgatcactataaaacttaacaaaactataatgtacatatgtcaccttcttctcactctcaccataattgagtgtttagtacataagttgttgtaaacttgaccaaaaagaaacaatgtgtacatataggagcaatgtttgtatattaaaattctaaactaaatgaaatagacaaaaaaagaagtaaccacacataaaattaaagttgaatcatatataagcatcaaatgaatatatatgtggctttttatttttatcatttggttaaatacccacttttagtctttttgattgagaaactaaaatacttttacctttcacatgttcactttcatatactccaaattttcaaatcaacctatttgtttttctttttataatagttagcctatttgtttcaaaacctacaaaagtcacataaaggaaaaaaaacagaaacattttagttatatatatatgtgagtggtagaatataatgtttcatgggacttatggttacacttcaaagtggatgtgcatacgccttcatctcctctaagttttcttctgctttgtttctatattccgcccaaaaagtataaattaaaataagaataattaagtagttgctcaaaaacaatatctaggtcatacatgagattagtagttgaattttcttaattacatgcatgttctatattgaagacaaattaatcagcacttgcacaaaataattgtaatcagaacagattaaaaaactgtaagcacaacttgcatatgtgcttttaaaaatgtcgtttttggtgtgtgaaggaaaaaataccttcaaactgtgagaggtagatcaactgtgggaaattcaaatatcaaaacaaactcatgtcaaaaaaggattcgacaaaatgttttctgcctccaatgccatctctgcgaaacctttcattaacattgttgcatgtggtcgccttttctttgaattctccatggtttttctatttccctcatcgttctttttt

SEQ ID NO: 19642 - DNA, 590 bp, Arabidopsis thaliana landsberg
  unsure (1)..(590): unsure at all n locations
aatcatgcaatgtcacgattcctctagcgccaatgaagcagtgaataaatgcaatgatctactagattcaaaggttttaagtaaaaggaatcaactttgcaatagataggctctgtttcatttgcaatatagaaaattttaagctttaccttgccttcaagggccatgagttggcgaagcgaaggaacatcttgcatccatatccccaaggaacgccaagtgtcagcctgaagttgtgctaaaaccgattgcgaaactctagtcgaagatacgttgtctccagcagcaattaatgatttacgcgtattgtttacggccttatcaattcgaataagttctacattagcgccgccgccaaattgtggatgagggaaattgagattctgctgcgtctggaaattgtatctgatgggttgctgttgtttgacaatgaattgtgaaatacaggagtcgtttgaggaagataccctccgtttccnnnnnnnnnnnnnnnnnnnnnnnnnnnnnnnnnnnnnnnnnnnnnnnnnngattcccttgcattggtcggcgcanaaacgaggaanaataaaagctatncgagaagtaaaga

SEQ ID NO: 19643 - DNA, 1224 bp, Arabidopsis thaliana landsberg
tgatcattgatgcttctgttcccaatgttgctgatagatctcgaatggcgcatatgtatatatcaaccttctgtagtctctcattcttgtgtgacagaacaatgaaagacaacatgatggagaagccaaaactgtctgataagtaaaacacatgcatgttgaccaaaaaaaaaacattgttcccaatttggtatacaaaatgtaccttctcatcatggagtctatgcagttcattctgatattcctcaagttttttattagaaagatcgttgtcatctatggttatctttctagttgagtcttcatatgtcgatctacctgctatttctgctgatattttctgaatttcccctttgacagatcggaactgcttcactctctcgtctttcctaagcctcatctcacgcagtgcaggcgcaatagaatccagctgctccctcagtgttcctccctttttctccggctgtatagagaatgacaacaaaattatctatgataggttatctgaaactctggactagtcttggttttgtttattgaatagtctttgcttcataatggatatgaaagaatgaaaattactcttccaggtactgatctttcaccgaggcacaaaagaaaatgggtgagttcggcttcagattctgccagctcttgatgtagacgagacctcgaaacattggcatggtcaacttttctccggtaagcctctacacattcctgctctatatcaagcaacactttttctctctcaaacttatcttctccaacttcatcccatatcatctgtgcataaaacagtgaccatcaggcatcgatcagaatactctaaattatgaaccattttacttaaaaagaaaaacagaaagcaccatcaaaacaaacttgcctgtaactctctgagcaaatatccgcaggacgtatccaacaacgatgagcttctcattcctatcggtgtctgaagcgaacccatattcggatggataattctgcaatgttttcttttcttttctgcagcaattgaggtattagctttgtgctattggtgcaggttttgctttgaagacaagtgtgaaagtgacacatattctgctacagaagcttcttgtttaagtgaaggctcatccgcatctccctcctcctctttgattcttcagtttatgtctctttctctttctctctctcaacttcatctgaatttggtaaagcttaggagtcgaattt

SEQ ID NO: 19644 - DNA, 1321 bp, Arabidopsis thaliana landsberg
ctttggtttctggtaataaaacctttggtcctccaattcttttgttgttggcgcttcggccatttctgcgacttctggcagcagggttggctcttcaacctcggtggacgaagaggtatctccagtgaactcaggcaccgaggctggttcaatatagcgtggccgatgtgtgagaacatttatcctttttcttttcggtgctggctcactaggagcagctgcagcttcttccttcgcagaagttgtgccttttcttttctgccctcgaatgggataacgatagtcggagtagacgaaccggatggcatcaaatacaaggttgagtcttttcctctttcggcctccgaaggctgctgacaaagcagtatcttcggcattcgaatatgcaccaagcaattcatcacttacagtctcaatgctcttcaaccaatcatcatctggttcaacgaacttgtctccgtacttgaatgtatacttcagcctgactagcccaccttcgtcagtttctttaacagtttctttcggcatttcccaattatctgcaagaggccacactctgaaggcaatgtgttcttgtattaaatcccttgtcccaataaaagagcagactacgccgaacgccgttgtcattcttcggctacttcatccatttctaccttcggtttccggagtccgaagcgctgccagatggggcacatgataacatccttaatatcttctcgaaccttcaaatcattttttacatagaaccattctttcatccattctccgggccatctcttccgaaaggtgggcacgggacagcttgatccagagcgagcaccgaagttgtagcaaccaaagttgttatgatattgctctttaccccagggcttcgtttcgtataacaattcatgtatattgcaaaagcttttcacacttggctctaggccctgactcttcacagcccacacgaagatatttagccttataattgcctcgggagtaagttgatgaagatagacttcgaagattttcagcacctccacgacgaagctgctcaaggggaatcgcaatccagctttcaaaaagcttcgatacaccacaacttcattttcttcagggtgtggacaagttttttccccttcgtccgccctcacaatggacagatcccggaaatatcttcctctcatattggcaagatggttttctttgatagctgatttgccataaactgaatgactcggtcgccaggggcgatcttcggagtcttcgccgccactatctacatcataactttcactgtcaccagtatcttcagacaccccttccagaatttccc

SEQ ID NO: 19645 - DNA, 939 bp, Arabidopsis thaliana landsberg
gaagttatgaaacctttttttctatgtttctaataatagatgcagtcgtttttcagataaccaagatatgtattaggacgatgaaatattgttcctccgattgaaatatgtttgggatccaccactggtagcacttgtgtaggattgtacaaaatgtatctccatgcatataaggtacctcattagcattcatattactctgcgtcccactaccagtttgccatacaacaagagggaaatgatcattgagctttccttctgctacttcttgtgcagcttccattatggcttccccaatcattggatcaagaccatactccatgttaacctaaaacatcatcgtaaaatcacgaacctaaaaaaaaaaaaaaaggataatttacataagagactttactgcaaaaaccttggcagcacatttcttcaagacaccaaaagctcggacgattggttcgggcattcgctcgcggtcaccaccaatctcgaagttctgaagcgatctctgcgtctgtgctccccataatctgacacagaacaacaaataaaaatgtgagaatattttccctcgagatcagaacgatatatatcgtaaagatctgattccgaacttatcggaaggaacttggatcgggccaaaggtgtctctctcttccctaaacggcgtcgaataagatctacgttcttgttgttcatcttcttgcttgagggttacgtctgcaacttcggatacagtttttcttctctccttcaaactgcattgtcaaagcgcgccatggctacaactgctagatagcaacttcgggcctattaaacgtgtaagtttttctcataatcatcatccattttattgacattttcggagttctaaaatgtctctgtctaatggtggagcacgaggctagtgatgaaactgaagagacaggtttcaatttttttttt

SEQ ID NO: 19646 - DNA, 1789 bp, Arabidopsis thaliana landsberg
  unsure (1)..(1789): unsure at all n locations
tataaattatataaactaatttccattgagatttcaaaattatcaccaaaaaagccgtgtgttcgtgttttttttaccccttcaaaaattcgattttctctttctttctagaaaaatcatcaagaatctcatgtacaaaaagtgtcacacttttcagtcttgggattctcctggtggatcactctcttcatcatcctccacagattcatcatagcgtcgaagagaatcaagactgaaaaaaccaaaaaaaaaggttcatggattcgtctcgaatcgatgatagtgaccgtaaattcataggaagtgtagttgaagagtacctgcaattctgagggactttccaggagaaaccagaggattgttttagatgaagtggtaaagacatgaaatctttccaatcttgaagcatgattctgagatcatgaagcttactctccataccgtagcagcaattggcatgcattgtacgaaccaagttcagatctctgctaggctcacataaaccgccgaaataagcagtgttcaagaatctcatctttaacccaatccggaaaacaaaaggttctgccttgagaaagttaagcacatcctgatcatgatatcccgggaatctgagtcttgaagcataccagtatttgtagaaaagtatagttcgattgttggaccgcacaaagttaaaccctccgtttggtctattatgtaggtcgtttgatcttccgaggtaatgatcgcaagcaatctggaaatctgcatacatgtaaaaccgtggaaacgggttcctgaaccacatcacatcagcatcctggagaaaaaggaaaaacgaaccagaacactgagtttcacacaagtctttcatcagttccctatgctagtacctaagtaaatatgaagatgctggaactttaccgtgaaaacaaaattgtatcccatctcgagaacagaccttaggagatcaatccttctccacatcatcttcaagtaagaccgagtcataaaataagcttctctggaaaaatcaactccttccgtaacaagactgaaacaatgcttatgcagttctaagcaacgcgaataagccttagcatccaatgcaacaatcaccaaatgatccaagatttgactagtttcttccccaattctaaaactctcaaagaagagatcaataacagatcctggagctgcccatgctgcattcaaagttgtcaaaacaactgtcctgtctctcgttgcagctttactcagaacatcttctagcttaggttcctcattatcctatcataagcaaacaaattcagcatttgaatatgcattcacaaaacttgtagcttcacaatgatactcattggttccaaattcataataatcaaaatatgagaaaatcgcagataacataaatcgcagtaacacttagctagttcataagaacaatccacatgcaatctctaagcaccagaactagctatgttatttcaaatttcacagcaatttcaatcgaacctaaannnnnnnnnnnnnnnnnnnnnnnnnnnnnnnnnnnnnnnnngcgaagaacttgtggtgaagagaagagaagactaaccagataagaagagagatcgaaaatggaaggggagaaagacaaggaatcagcggctctgtaaaggacgaagcgggagatggagatggcagctagaaatagagcagctcggcggagcgggattgatggtcccgaacccatctccccggaaccctcggcgaaggaaaaaatagcaaaagacgaagcctcgaggctcgccgtgtggaatctgaa

SEQ ID NO: 19647 - DNA, 1530 bp, Arabidopsis thaliana landsberg
gatttttgatcttccatttgtgatagagtttgtctacgttattgagtgttatttgtctgcatgaatgtaattttggctcatctcctaaggttatatacaactcgacctcgatcttattatgaaatatcatatttttcgagacatatgtagtttatgttatattttcattgtcattatgagatacacaagtataggtaaaatgacttgtatagtaatatctcatatagtcatactaatagaacccttatttttttttaaaaaaaagaatatgaatatcattaacatgaagaggtgaggtttacaaaagcgtataaagtagaaaaataaatttcccaaaaatagagttacaagcacaaagttgagtgtcaatcatcaaattatctgaatccaaagggccatcaagtttcggaattgcgaattatttcaataattatcaattgattttgaattccattacttgacacacaactttgatttgctacttttgtggtcagcaagaatttgtccggaccagcattaaatgatatgtcattgataactagatggcaattctacaatatatcattttgtaaaatatatatcttaaattacggttatgcgaaagggtctaatacgagtacaacaatcattcataaatgaaccagtttcaagctaaatttaaggttgaaaatacattccgataataaacaaactagttacctattgtcttaggaccatcctctatgatctccttattctttccataattatgtttttagcaaaaaaaaggttaaagcaccttgagcattttcactccaagctggaacatttcttagtcattgtgatttgaagaccatgtttcatgtgacaatataaaaccaggttttgcctcaatcttctgtccttggagaaccttaatctcatagttttgtaatatctccatgatcaccgtcttcatcaaattcatagctaaattcttaccgagacaagttcttgggccggcattgaaggataagaacttgtaagaaggctcatgtctcacccctcctgtctctgaaatccatctctctggcttgaactccattgcgtcttctccccatatggttttcattctccccatcgtgtagataaagatcataatattgatatttgatttgactttatgtccacttggaagcacatcttctttgattggagacttgcgttggaatggtattggtgggtaaagcctcattgattcactcaatgcaccatgtaagtacactaacttgttcaagtacgatgacatgtcttggtcacttccggttcttggtagatttgtgttgatctcttggagaatcttggttaagacgttagggttttcagataaattccaaaagaaccaagtgagtgtagtggccgtggaatctctcccagctgccatgaaacctattgtgaagtccctgaggaacttatcatgactgggtttcaaaacctcgtacttggttgcatcaaggctttatgaaagatgttaaaaagatcctcactttctccattagagttgtatgtaat

SEQ ID NO: 19648 - DNA, 1163 bp, Arabidopsis thaliana landsberg
gtgaacctagttagagctattggttactacaggctgaataaccttatttgaatacgacacatgctgtatataataacgttcggatgatgcatgtaagaaaattaaagagatggattactttccacacacctgcaagaaatgattttggaaaaggagatgtggcgcttacatgaataccaaaatactacaaatatcccacaaatatcaaacttcatgacgtaacccgcgttatgtataaaaaaacgatgtacaaattttccttagcagcatgtattaatgtaaagtaaatgaagtcaaaattttgtttgggaggcctaaatcaaaatgtactggactggattgccctaaagtataatgggcttttgagaagaaactccggatattagattttcgaaacaacataagtacaacgtaaacaacatgttttgtttaaaaaacgcagcaatcattgttctgccacttgcaaagataacatagtggaagaagtataaaaggaaacagatgtgacagtgaaaagcgcgtgcaaagaggagagtagatacgtatcccttgcattaaatgcagcgtcagagagtatcagcttccaaggtattaaactgttaaaaaatggaaactttttctcctgtgtaacaatcttaacacacgctatatatgtgcttctcacatacgctacatcttagagactcatgtaagtgacacgtctcaactaacgtcaacgttacgactgagcaagtggacggcgaatatatagtgtatcttacctcgggacaagttaatgtgtaaaaatatgagtatatggtaaatcacttggttctattgccgataacatgcaatacaaataaagaacaagtacctgttagatgcgacattcgtgaagagatcttctcgccgccctcgggtgttgggagggaaatcataaccttttcaaattcacgtggctggaaatgggtcaacaactgttgcccaaaatatctagaccactatagccctaaaaaaagttcaacttttctatataagaaaatagatggcaagatatcatctctcacaccttttcttctatctaaaaaacacaaactaattatccaacaacatctcagaggtcgatcgttgctgcttatgtatgcaataaatgatcgttctttctgctaccttgggttatataa

SEQ ID NO: 19649 - DNA, 215 bp, Arabidopsis thaliana landsberg
ctcccaaacaaaccactgagttttattaatggaaaaatagatcttcttaggccattcggtcttacttgtggcaatatcgaagacaccgcaattcgatacatgatctttataatctggcaaatctttatgatctggccaaacatcttcgtcgtcgacgaaatagattgaatcactcttgattccgtgaccaagatctttaagagcgagaggttctg

SEQ ID NO: 19650 - DNA, 1890 bp, Arabidopsis thaliana landsberg
tcatagtcttcgataaaacaagaagcattaaaggcgctagacatttggtcaaagactgctttttcatttgttgtctttcctatgccaggcataccccaaattccaacacaacggatgcctattggttgcttgttaaccatgtattcaatctccagcagcttcgaatagattccaattcgtccaacataaaagtgcgtctcgtacacatttttcacaatttcttctacaagtatagagtcactacattcctttctgcaccatatttcatcaaatattgaaaacactacactagccatccaaaaagttttaccaattttcaacataaggaaaaaaaaagcagagagtagaataaagcgaaaacctggattggtgaattcgtgataagcctctgaaatccagctcgctaagccattggtcccgtaatagacggtcaccgtacaacactgaaaccaccgcctggtccttgttgttcctttggcactcgagaaccttggcgaacttgtcaagccatacctcggaaggatcacagtttccgggttaaaccatcacagaaaccccagctttctcgatctttgcctgagactccttgaaaagcagatcatcgatatctacatctacgaccacattatttatgccttttcgacggagagcttcagagaggtggctcacgaaagagtaccgtaccttttctacgcagctgatgcacacgaattcctcatccttttcacaattggtcatgatttcgcgctttgatactttgaactaacctttgatttcgccggaatttttgtttatgccgacgatgctttttcattggacattcaaccactcaaatctcagttgtttttttacatgtgatatttttccaacagcaaaaaatatcaaaaaggtatttaaaaaaagagaaaagaatagtcaacaatacattcttgctactctaacgcacaccagtgaggaaaagtccaagtacaccgggaaaaagcttttgggccatggagacatcatctatttccactgtggaagacaagccaccgcagcatcaggtgttcatcaatttccgtggggcagatttgcgccggagattcgtcagccatctcgtaacggccttgaaattgaacaacatcaacgtctttatcgacgactatgaagacagaggtcaacctctagatgtactgctgaagaggatagaggagtccaaaatcgttttggctatcttctccggcaactacaccgagtcagtctggtgcgtgagagagctggagaagatcaaagattgtacggatgaaggaacactcgttgcgattccaatcttctacaagctggagccatccaccgttagagatttgaaaggaaagttcggtgatagatttaggagtatggctaagggtgatgagaggaaaaagaaatggaaggaagcttttaacttgattcctaacattatgggcatcatcattgacaagaaaaggtaccatttttttttattttttttgactcagttacaaacctagacacagtagtgattagattacaattgtagacagatctatgaatacttctagaaccttttatggaacttagggaggtcatgatctcattagccttgaaattgcagtgtggagagtgagaaagtcaatgaaattgtgaaggcggtgaagacagcgttgaccggaataccaccggagggaagtcacaacgccgtcgtgggtgctttaggtaatagcaacgctggaacttcctcaggagacaaaaagcatgagacttttggaaacgaacaacggttaaaagatttggaagagaagttggatcgtgataaatacaagggaactcgtatcattggagttgttgggatgcccggaattggtaaaaccacactcctgaaagagctatata

SEQ ID NO: 19651 - DNA, 1002 bp, Arabidopsis thaliana landsberg
gggtcctcacaggaaagcccattacgaaggcccattgatgagctttgactgcatcgttctgtatccttcttgtgacatcttcttcttcgttcatcctcaggccactccatcaagattcgaaccgatacatggtcgtcgttctcagtcgccaccgtcgaccgaatccgctggtgagaatagcgtaagaagcatccacggtaacgaatcaacaagaagggttaaattagaagagaccataactaaatcacgataagagaatgctttcctccgctcaaatcttacggataggttctgagatgaagaacgaagttgtttcagagataatttagtaatggatcatcatcggagatcttaaaattcgtagataaaatatggatttattttttgtcgtttagaagaagaagaatagcaaattttcgagtatttccttttttccgactaggttacgaaaaaggaaatttcattaattatgctaaaaacaaaaaaatatggaaattttctcacaacggtcatatttgttgaaacagagaatgtgccgttgagatcgagaggagaaattcgggatcatgtgagctcttttcaaccgacaagatcctgcaaccaataagatctctaccgatttttgtagttgcttatctttggttactttggtcaaaacacaatcacaaactcgttagatacaaaactgttcagaaaaaactttcactctgattccatgtcaaattcacgcaatgataagaaagttctctgctttattgatcgacaactttacattatatatacgatgatatggaaaaccctaccaatgacttgccgactaagatagtatattacatatggcttaagcccaacatatatcccacgttaataagaagactaactaaccatcatcatccatgatacaaaacagaacagagcattctttaaccatcaaaattaatactgtcttcgttaacaaccaaaagcttcaagaaataggttagtaatgttatactttcacaa

SEQ ID NO: 19652 - DNA, 545 bp, Arabidopsis thaliana landsberg
  unsure (1)..(545): unsure at all n locations
cggataatttgagatatctgcttggcccaggcccattgtaacatctgtatactcaaaccataatttatttaaaaatgattttgtactacgcaaatgaaagattcaaacacccatacaagtacacacacaaagggagccatgtatgatgatgatgatgatgatgataggtgatgacgatggttcgaaagggatttaggctttgagaacatgctcgtccatgtcagcaacaacgcttttgaggaacttcatgtagttgctaggctcaggcgaatcatcggttcgcttctcccaaatcattgtgatcttgcatacgatatcatcgggagacttttggctgaactgatatatgagatcatacactttaagctgctccatgacgtgaccttctagtcctctgaacgttatcaccatattctcatcgnctatctctttcctttccttgaacacttccggttttccatctgcacatatatgcgtacatatttgtttcattcattaagttagcaccattctttggattccatataaatgtatttttaccgcat

SEQ ID NO: 19653 - DNA, 446 bp, Arabidopsis thaliana landsberg
  unsure (1)..(446): unsure at all n locations
tgaataaggtgttctttcttgtttatttgtgtttctgttcacgatgatgttaagacttanttttgtctattacaagttaaaggaaatccatatgagtaattgtatagctataaaatccagattaatcttacatcaaagtaaaatatgatggacttgcaaaagccattactttaatgtaaggaaacattgatatacttagatagaaagtgtattcatagcatgtgtgtcaagcttgtcctctattgctcggtaggcagagaaagtgtccgagtcttcccatttggagaaattatacgcgggcccaaaggaaagcaaaaaatgaggtactgatattaaaaacaatatcagtaccttatagtcaccccggcatagattgttagacatgctaaagagacatgattacctacctgggaagagtgtgttcaaagcatgttcgatctacattc

SEQ ID NO: 19654 - DNA, 3555 bp, Arabidopsis thaliana landsberg
atgtacaaaaaatgcgtttttttttaaaacataaaatttcttcaagttcaccacattccaaggacgttagactggtctgtcctctaaatctttcaatctgtaaacaccatttcggaccacttcggtaacaatataaggaccttaccaattaatgccaagtttgtctgctccttcctctttcttgttatcgaacacaaagaaaggtctgcttttgacttttgaattgtaataccgtgctgctgcatgttgataattctgaattcggatcaaggcctgatctcgcctctcgttgatggtatccagcgaatcgtcgagcattgcagaattctcgttttcatttaaaggagcttccattcgacgaagtcctggtacattgagctcggctggtacaactgcctccattccttacaccaatgaaaacgggtttctccagtcgagcgcctaggagtcgtgcgatatgcccatagaaccggttgaagttcatcataccagccccctttcaaatgacttaaacgtttattaagattgcttagaattgtcttgttcgcaccttcagcttgaccgttcccttgtggatatcgcggagtagaataactaactttgatcccccaatcagagtagaaagcttcgaactcgtgtgagatgaattgtggtccgttgtccgtaactatctcgtatgggtgcctacatatgatattcttccaaatgaaggtttttaccgccgaatctttgatgtttacatatgcttcggcttcaatccactttgaaaagtaatcaattaggaccaagagatattgtacacctcgggttaacctgtgcaatggtccaataatatccatcgaccaccgcatgaacgggtatgggggaaagagatcgaagagaataactccgaaggttgatggatgagaggcacatggagttggcaacgtttgcatcgatgggcatacttaacgcagtccgtgatcatagtaggccagtagtattccatcctcttcatcttgaaagccatagcccttcctaaagaatgactgctacacaaaccttcgtgcacttcgctcataacgatctcgactttgggcccaaaaatgcaaagtaaatagggagcgtttacacctcttctatgcaaagaatctttcgatagcctgccatctatcctttgggagctctccagtaacaatgtaatgttttattggctccctccaatcagctccccaatctttagccggaatttggtcgatttcatgaaatattcgagcttctggttcaggatgttcatttggtttgaggatgtcttcgtcaacccatggttcggtctcggcttcaacagtgttttccggagctatatcttctattcgttcgacaacttcctcgaccctattatcttcttgcacggttggcttaggtacggctgccccttttgattttcgtcttttgacacgtggtaattcaatcacaggttcaccgcgatcaaaggctaaaactcgagaccttgtattgacgagtgtctatttttcttccttaatgcttctatctgaaatacattccaccggaatgattctcttgacttcgggatctgacgttgacgccagagccgcgagtgcatccacgattgtgttttctcctcgtggtatgcgaatgagttcgaacttcttaaaatatttagccaaatctttgaccacctcaagatatgcctccattcttgaatctttggcttcatagtcttcattgagctggttaacaatcagttgtgaatcatagtacgtgatcacttcatcagctccaactccctgtgccaatgtgagtccagcaattaatgcttcatattccgctttattattagatgcagtgaataataaccgaaatgattgctcaaggattttcgaggtgggagactccaatttgatccccacctcggacccattttttgatgaagaaccatcgacgtgtaacttccaagtctgattttctggttgctcccgtccaccaagtaccggcaattctgttaaaaaatcggcctgaacttgagccttcatggcgactcggctcttgtactctatatcatactcacttaattccaccgccaacttcaccaacctcccagattggttcggactatgaagaattgttcgaagcggttgatttgataagacttcgattgggtgagactgaaaatacgggcgaagcttccgagctgaggttactactgcaagtgcaagcttttccatcatcgtatacctggtctcgggatctgtcatggatttgcttatgtaataaattggtttttgttctcctcggtcttctcggatcaagactacgctaactacatggcccgagtccgagacgtatagataaagcttctcatccgcttctggtttggacaatataggtggagtggtcagatatgctttgagctgtccgaatgcttcttcgcatttctcatcccaaagaaactctttgttcccttttaaaatttgatagagaggcaatgatttatcggttaatcttgaaatgaaacaggtcaataccgcaatccgaccgcttaaccgctgtacttccttcaaatttcttggagatggcatattgagaaaggcgttaatttggtttggatttgcctcaattcctagctttgtaacaatataaccgaggaattcaccagatgggactccgaacgtacacttccccaggtttaacttcatttgatattggtcaaggatagcgaaacattcttctaaatgcttgacatgatcttcctttttcaatgatttgactagcatatcatcaatatagacttccattgtctttccgaggtgctcgttgaacattttgttaagtagacgttgataagtcgctctcgcgttctttaacccgaaaggcaataccttataacaataaatccctctgtccgtgatgaatgacgttttctcttgatcttctggattcatcatgatctggttgtaccccgaaaaggcatccatgaaagttagcaattcatttccggcagttgattccacaaggcgatctatatgtgggagtgggaaactgtcttttggacaagctttgttaagatctgtgaaatcaatgcacactctatcctttccattcttcttttttaccacaactgtatttgccacccaatccgggtactgcacttcccttatagatcctatttttaagagtttatccacttcgtcgtttaccgcttttgctcgttccactccgagtttccttcttttctgttttacaggtttgaagcttggatccacattcaactcgtgacaaattatacttgggtcaatgccgggcatatctcctgctgaccaagcaaatgactccttgttcctccataacagctcgattaaagcttcttttatttcgtaggataaggtagctccaattcaaactttccgatccggtttatcagcttttagaattacttcgaccacaacatcgtccaccttctgcccactaggaaacaaaaggattactcctttctttgcgggctttgttaattgctattagattttcagtcggtggctagctaaataacatgttctc

SEQ ID NO: 19655 - DNA, 510 bp, Arabidopsis thaliana landsberg
  unsure (1)..(510): unsure at all n locations
ggggatcttttatgtgcactgggtagttcttggctactcttctgtagtgttgagctatcatatttctccaatattcatagacgctcctggaagtcacaacaagtaaaacatgcccatttcaaagtttttgaacatgggcgtcgctgtggttgtggttgagcttcacgtggggtgatcttgatttgaaattctgcattgtcagctttttcaggagannnnnnnnnnnnnnnnnnnnnnnnnnnnnnnnnnnnnnntggacatgttttgacagcatggttgcatttgctacttgatccatacgtccaatcttctgacactttttcagcacttagattttgttcagcttctttcactttcaacttctttaaataatttccactgctcccaacacctttgaaaaacctgcaacataaaaaatggattcttaatttcctaagaaggctctgaagagtgaaggaacttttacaaaatctgaagaaaagacggtttaaatagggtcaatttaagaac

SEQ ID NO: 19656 - DNA, 1549 bp, Arabidopsis thaliana landsberg
  unsure (1)..(1549): unsure at all n locations
aggtatctccttgagggaaggggagattggtttaactcaagcaaaggatagagaggatggcaaggtttcagagatcactaagtcagatagtgcaaatatttccaatagaagtcatacccagactgtgtttgacctccctacatctactttgggtaataccaacagtgctgttacaggaggttcatgtggaatacaggggaaaaaattggctgctcgtgttacctgcctgggtttatcgtttaaacccaacacatacaataatcattacacaaatggagaattggctgtatctgctgctgccagtttggctgtcctatcgtcagaggaaacccnnnnnnnnnnnnnnnnnnnnnntaatagtgccaagaaagctgcatcaagtaacatcttagagcagatgaaagctttttcattagtagccccccgtttcttctggccaagtcctgataagaaggagattaccagagaaagatgtggttggtgtcattcttgccgactcacatctgcaagcaggagaggatgcatgttaaatgcagctgtagcgggtgccactaagggtgcaatgaagatcttcagtggtctttttcctctaaagaatggggagggagtcctttcgagtattgcagcatatattctatatctagaggaaagcttgcgtggtctgatagctgggccatttctcagtgaaagtccaagaaaacagtggcgtaagcaggtagaggaagcctcaacatgcaaagccctaaaagcacccctccttgaagtaagtagatcttctttataataagatttcttggttgaaatctaaatttttttccatatcttatctactccatttttttgtttcttaaaacattagaacactcttggtcgatttctctctagactagaaatttgatagtctacactatagtgtgatatatgaatcatatttgttttgttgtacatctgatcactcttgttctcatctccgcaatgtggtttgtttatcctggttgcagcttgaggaaaatatctgcagtattgctctgtcatgcgaatggtttaaacagatggatgattggttgatagaacattctattttccaaagtgctccagttacacttggggttccacagagacgtggacctggtaggacgaagcaaaatacccaggctgaagttacagctgaaggttccgacgctgatagctttacatggtggcgaggagggaagttatcaaaagttattttgttgaaagcagttttgtcacaaccggcaacaaagaaagcagcttggcaaggtataactattacttgtttgtttatgttttatgtgcgactaaatttggttttggtttcctaatccctttagatgctagcactctagaattcgtattccatgccactaaatggtttttcggatcactaattattttttacttacttattagggggttctaaaaagattcctggattaaattatggtgatgcttcttacatccctaggagaagcagacggtctttttggaaagctgctgttgaaagtagcaagaatatatctcagcttgc

SEQ ID NO: 19657 - DNA, 947 bp, Arabidopsis thaliana landsberg
  unsure (1)..(947): unsure at all n locations
tttttacataaacaaaaaagnagttataaaatttctttttttatctgtggttaaggtgttgccatcttaaggaaaaagcatgatgaatgtatgctacgagagcttgctaagaggtggaatgcccataaacttttggttagattatttagcagaaggttggtctatttagacgattcctttctttctaaaaaaggccttccatcactgagggaagttggcttgaattgcttccgcgnnnnnnnnnnnnnnnnnnnnnnnnatatataggttctaatttttctctgcttcgaaagtattttctaacggtctgtaactacgtactttaggtttatcgtgaaatgcagtccatggccgcagaagctatattagcacttgtaagtaatgttatctgtattgataaaaaaaaatctcttgttctgcctgatcttttttttcctctcgaaacaatatttgtattgccagattcataaagaacgtgagggtgaacaaattgatagagaacttgtgagaaacgtaatagatgtctttgttgagaatgggatgggaactctaaaaaaatatgaagaggattttgaaaggctcatgcttcaagatactgcttcttactattctagcaaggcatcaaggtggatccaagaggagtcttgtcttgattacacgctaaaggcatatctctagatatcacttttggaactgtttttcaattcgatttcaagaaagtatgtttgttaatacatgttagtaattttatgttgcagcctcaacagtgtttacaaagggagagggagagagtcactcactaccttcatgcaaccactgaacccaaactatttgagggtcgttatggtatcattatttggaattaatcatatttttctacgggagattttagcgtttggacttagtgacatggttatatctggtagcatcttgaggatatgtaatag

SEQ ID NO: 19658 - DNA, 1304 bp, Arabidopsis thaliana landsberg
  unsure (1)..(1304): unsure at all n locations
caacaccaccgagaaacgtatcaagatgttcgctcatccacactttccgtagctgaataagccctatcctccgtgacaacgatatgtgaataacgatatgtataacaaagacagcacgttcttcgtaaacacgagtgaacaaactagcggcgttatgaacactaggtacaaggcaagctccgagaacacaacctgaggaatcctctttttaggtgtagtaaactccgtgtagcaagtggagggaggatcggtgaagaaaagatatctgagtatcgtcactgcgtagaatgttgtggcactgaccgcaccgtctcttaggaaccgagacatcgatgacgagtcaccagatggcaagagaaggttgagggatatggagaggccaaagatcgagagtagagtcattgcgtaccataatcctctgcatacaatcacatctcttttactcttcatcttctccattaagtatctcatctctctctttttctaaaggctttatcgctcctcgagtgatgggtttcagagacttaatatagggatggcgaaataggtgtagaactgactaatctttattgattcacaaaacatgtgtatttatacaagagtcattgtatgtgattagctcaaactcctaaactataggaattaaaacatatcaaaagaatatacgacattatcccaataatagggttttcgacttcttgtctttgaaggctttttagatttattatacacatgctaaaaagatcttcacgatcacaacgaaacttactaacaaaaataaaaataaaaatataaaataatattaagaaacttctaacaagatgtggcgttgtctctgattctgacttaccccagtttttagacctcatgggcctaacaagatctacaggctcaccaaaacatgttgttttatgtcttccataggttcctttaagtccatctactcaaaacaaatccaacactgctttaagcaaaatagtttgcacagacaatgtgactactccatccaatgtcaattaacaaaaccacttaaatccaactcatatctcttttgattacctaatagaaatatgtgcttagctcatgttttgctatcttttgcatgatgtccctttttgtaatggcaatatggcatagtcaatgaaattgctaaaccgacatcgtttaagaagcaaaagagctcataaaaaccctctgcactatctagaaggttacatagactcctgtggacttatagtcgtcaaattgattcctcgattcgccgaaaactcgaaatcgtcgnactctctcagntactatctctc

SEQ ID NO: 19659 - DNA, 530 bp, Arabidopsis thaliana landsberg
  unsure (1)..(530): unsure at all n locations
gtcacccaaccggtgggctttgtgacaaagggaagtgaagagaaggtctacaagctgcataaggctctctatggtttgcgccaagctccacgtgcatggaacattaagctcaatgagattcttaagaagttgttattcgaaaggtactctaaagaaccttctctgtatcggaaacatgagggtaagcatcttcttatagttgcagtctatgtggatgatctacttgtcataggttctagtccaaaactgatagatgacttcaagaaaggaatgtcaaagaacttcgaaatgagcgatttgggaaggctcacatattatcttggcattgaggtcacacaagaagaagacgggatcatcttaaaacaagaaagatatgctaaaaagatccttgaagaagctnggaatgaatgagtgtaaatcaattcttgttcctatgatttctggtctagaactatcaaaagcacttgatgagaagagcattgatggacaacatatgnaaaagatttggttgcttaaggtacttactacac

SEQ ID NO: 19660 - DNA, 1442 bp, Arabidopsis thaliana landsberg
ctttctctttcatcacctttctcgttcacttgctcaagatctggcagcgatttcatttcttctccagtctttctctcgtctcggttctatctcctggccattggcggggaggacttctcagccgtatatttgattccgtccccggatttactcttgctgttatctgaggtcaaacatggcggctgccaacgcccccatcacgatgaaggaggtcctgacggtgagttctccttactcttcactcttatctttgaatatttagatgtgtctcctggaatcgaccgtgattttctacgattaagctctgttcagtctcttgattgattgattccagtttcctactgatctgaattctgctcgatcgttgtgttactctctagtttttccggatcgcttgtttgggaatgcatgtttctgatcagatttctctaactatgctcagatctgtgtttcgttaatatatcaatgccgaatttcaagttgttgtctgtagcaatgtgcttatgtactcggatctcataactaaataaatgaactatttgacgtaacgcttcatcttgatttttccagcttccgagcatcgggatcaatcagcaattcatcacgtttacaaatgttactatggagtctgacaagtatatctgtgtacgagagacgtcaccgcaaaacagtgttgtaattatagatatgaatatgccgatgcagcctcttaggaggcctattactgcagactctgctcttatgaacccaaactcgaagatccttgccttgaaaggtacttgattttttcctttgatctaaaacccataacggtttcctcgaattcgtagttcataatccacttatcttgatgttcactttttacttcaatatttatgtagctcaagttccaggaactactcaggatcatctacagatatttaacattgaagccaaagcaaagttgaaatcacatcagatgcctgagcaggtgagtgttgatgcaaatatatttgaactccattatcgttcctgctatacacttcgtataactctgaatttttcagtcgggttttttttttggataataatgtttcatgtttttacaggttgtcttttggaagtggattacaccaaagatgttggggctggtcacacagaattccgtctatcattggtcaattgaaggttgtatatttcagcctactgtcattttcttcatatcttgtgttttcgtttctaattttccttcgggttttataggtgattctgagccagttaagatgtttgatagaacagccaatttggccaacaatcaaattataaactataagtgctctcctaatgagaagtggttggttttaattggaattgctcctggctctcctgaggtaagtttactgcgccacatattaggtcaaaaaagacatcaaaactgctttcatgttgtagattcttgactg

SEQ ID NO: 19661 - DNA, 1289 bp, Arabidopsis thaliana landsberg
agcaatgcagctaaagagttaagggatgagtctatccaccaagggtaggcgtcagacagcaggtctaattagtattggcaccgggtctgcgctcggatcggagcaaccggtgtcaacgttaggtctgaggtcgctaagattagagaatcagttcatgagccccgtcaagcatccacagatcgccattcatattactagtggagctaatctgaccttaaaaacacaaaatttaaaagaaagttttataagaaacagagttatgtcactgaaattccgaaatctagcataaagaaaggattaatgtaaacggatcaagaaaccgaaacttaccggaacgtttgaaattgtaatccaagacacaggaagagctaattacttctgtctctgacgattgactaatatatatagcctcttgttctaaggtttaacgccccaaaatccacaattagtcaaacctcgaaaatgggcacgtaatatgatttggtcttttttaatgtttttctgtggaacaagctgtcataagaaatgatttcttttttccgtagtctgatttttgtggagtttgttgatatgtcaaaatcaaactatcaacgcaccttgattaagaagtttaattactctctttaatcattgatttatcttttcctatcatgctccatgttgtgcaaatataggataactatatttgaaatataagttcaaaaacattttttttaaaaagaaaaacatgtgttagaaattaaaattaagtgtaaaccatttttttatttttaagtgtaaaccatattgaatctagaacacttagtttgaatattatgtctatttagtttacaaaaaaataaattttaaatatttaattaaaaaaccttcaagttttaatagtaatataaaaatataagtttaaaaatatttttttagtaaaagaaaaataagtgttaaaaattaaaattaagtgtaaatcacaatgaaacgagaacaccgcttagggatttgtccaattagtttacacaaaattttaaaagttaacacttaataaaaaaaaacttaagttttaatagtaatataaaaatataaattttaaaatattttttagtaaaataaaaacaagtgttaaaaattaaaattaagtttaaactccaatgaaccgaggacaccgcttaggggtttggatgttctctccaattagtttacacaaaattttaaaagttaataaaaaaaaaaaaaattttaagttttaatagtaatatgaaaaaattaatttgaagatattttttagtaaaaacacaaaa

SEQ ID NO: 19662 - DNA, 346 bp, Arabidopsis thaliana landsberg
cacgttttatttatgattcatgcaactccatgcatttttttttcttgaaaacgtaacaaatggtggcttttgatccaagtgggaaagacatcaatgtgatagctcagcacataaagaaccttgaaacaccttcaacaccacactacttcaacactctctatgacccttttagagatggaactgatttcgtcagagggtatcctttcagtctaagggaaggtgtccaaaccgccatatctcatggtctttggctcaacatccctgactatgatgccccaacccaacttgtgaagccccgcgaacgtaacacgaggtttataatatagtttgcgtattatattatcag

SEQ ID NO: 19663 - DNA, 281 bp, Arabidopsis thaliana landsberg
agcgatagaacgagggatgccgtggttgtttttctttcgtgttccatggacccttctgttccaggcgaggtcagaggcaagacgtgaagcggaagggttcctgtcgtgtgttgaatcgaggcacaaggagtaccgcgagattgtgagctactatgatgaacgcaagttcgacatcgtccataaaatggccatgttggagtcgcacccacgccattggatcaaaaataattttcagtggttggctcccatgccggatgtcctattgtcatactgcaatgatt

SEQ ID NO: 19664 - DNA, 1175 bp, Arabidopsis thaliana landsberg
acattattattatgttttacttgtaactgattttagaaagatattttctacaaagaaagaaatcttatagaaattttttaaaaatttaccaaattagaaaaatctctttatatatttattattaatttatcgataaattaatacctttctaaattaataaaattttgcagtcccaacattattaatttatagaggttttatttagttagtgtcataatgtcaaatgctaaaaatatatatagcatcttgagaagaaaacaatcttatttcttaattagaaaagaccatttctaaattattattttagtttagtctctatttagtttttgttatcacatacttgagaattaaaattcataaaaagatgtgtagatggtctggtcgaagacatggtttataataatcgattgcttccaccgagagataaacacaacaagtcatcgataagcaaagcacatattcacacttttttttaattcatatacattcaagttcattataggcttacacatcatttcaaaagattttgtcaattcatcttttttcctcttgccgatgtgccaccttcttcgcttggcgcttcgacgtgtgcggtgagcgtattttcttacacatattatattacactaaaatgtcaataatcgcgaatgtttgcggcagttgagatgaacaaattagattagttttaatttataattcacaaactatatttataaattataatgagagtacaataaaaataattgaaattatcgtaactaaatataaacggtttttacatataagtaaagttggtttacggcagtttataattcacacaaaaaataaagcgaactaaattgctaactaatttgtccattctaacaatatcatcagtcaaacttaatatttgataggttttgacaatctaataaaaaccgtgaataaaaaagagtaatctaaatttattttatattaagactgcaagttttgtggattaagtcagcatattttttctatatttttataacgatttatgaagaaaattgaaaataacattttttgaaaaattaatgatcaacattttatatcaggttttactatggtaatgaaagtttagttttttttaaaaaaacattctgtatcagttcttttttaaaagggcgaaatttaaaaaccaaaaaatatttggggaa

SEQ ID NO: 19665 - DNA, 537 bp, Arabidopsis thaliana landsberg
cttttcaacctttgacacattaggacttaaagaaccgtgttgggcacttaatcaccaaaatattataaaaattgcccaagggcacatttcccttttaggcccgtaatatggttatccgcgtggggcccgttacagtgggccgaatccaacttgggcctcctgacgcgacgaggatgtgggagtagcggacatcgacggagccttcgtcttgcaacggagaggacgaagggcgacaacgccggtcctgattcgacgggcgtgttccgtgggcgtggtcttcgttggtgtagcgtggcgacgaaggcatcgagcgaagggtggcgtcttcgccttcgccccaacatttgccctccgagggaccagttcgactaagtcatctggtgccgaagacgtcgctagatggtggagacactgccctcgctcgaagtggtccgcgggggtttttgatgtgaccattgatggacatggccttgttggactgcgtggttcctgaagcaccgcatcctatctataaaaggcgggcgcggccagggctgt

SEQ ID NO: 19666 - DNA, 1120 bp, Arabidopsis thaliana landsberg
gaatcctcgtgaagttcctgagtacgagttaaattttcaggatcttcaagttcggaaagctgatggtatctgaggggcaagatctctctttgctttactttcctgtaataatgtcttagtttccatttatagatttttaacaagatactacatcacttttccacttgccagggaatatatcaagtggctaaatggaatgggactaaggtttctgtaaagatacttgataaggatctctacaaggattctgacactatgtaagattactcttctcttcagtgagtaatatgtctatgttagctaacaggtcaagaaggagtttgaatttcttcttgagtgaagctatagatcgttgaaatcatctttgttatgttcatagtgatgatgatatgagctgtaacattattcaatcatagttcttatagaatcttctatgttggaattatgcatttccagtaatattttctggaatccacttcattccctctgtgttaatccttgtttttcttttcatatattacgtttgttctgcaatcttctcatctgacttttattatgtacccacagaaatgccttcaaacacgaacttactttattcgagaaggtacgtcatcctaatgttgtgcaatttgttggagctgttactcaaaatgtccccatgatgattgtgtccgagtatcatcctaaagtaagcttctccctctttttacaccttaaaagatttttccctcattaagcaatatttggatggtaggaactaatgttgtccacttggtggtaacttgcagggggaccttgggagctatcttcaaaaaaaaggtcgtctttctccagccaaagttctaagatttgccctcgatatagccaggcatgtgacttttttggcaagattgtattcaacttacaactacattttttttaataatcttgtgaacgaatcatttggctcttctcaggggaatgaattatctcacgagtgtaaaccagaaccagtaatccactgtgatctaaaacccaagtaagataactaaataaagaagcattggcacgttaagtttttcgagaacatatatttggaccctcgttatctaatttttgcaacttcttgtaaggtgccaga

SEQ ID NO: 19667 - DNA, 1807 bp, Arabidopsis thaliana landsberg
tctaagttttgatgcatctcaagtctagatcaacccggatttccctgaagttcaagcttttgtttctcggtctgttttctttaaaatttgtttctttgataatggaatgttgttctgattccgtttatatgatgtgattgaatagcttaccagctgatggtctttctctcactttccgtgagagtgttccaaagtttcaaatgattactgtgaaacaggatgatgactgttcgtagtatcagaggacgcggcgtaacgggggttgtcagcgtaacagctggtgctctaatctgagctgagaagcaagctgctcctaccttacttatcgataaggagtacagggactgagtcgagaagtcaatccgtgatctgcttcattctatggaggtttgacttcttaatttacatgtactataaatttgagttatcatatacagatttatataaatttttcatttcagattggaaaggttagggttgtctgcaccatctatgctcttgacttgaattggtcatggtattactttagttgtcgtaattgcaacaaaaaagtgactcacattcatgctggtgttaacacaactttattgaagtcatcaaaacacaacttcattctgcaagaatgcagtcactaatgtgcaagccaagtaagtatacctcacagtttataacaagttctaactcaactagcaaatgcacacattaattgaccctgatataatttaaggtacatgctttatgtgaaagtcatggatggcagtggtgaaaccaaatgcctcctgtctcctgtttgataccatctgtgcagacatggttcgtgaatcatgtacatccatgttaggtggctcttttaatgaggtatacttacaatcgaaatagttatcttcttatgtttgtggaatctaatatgttgcaagagtatataaactggctaactaacaatttgtggtcttactatttagattgaggatccaaatgatatccctgacggttgaagaaatttggttgggaagacttttctatttctggtctctgttgagaaagaaaacatatgggatggtaaggattcttttaaggtcacaaggctattgtctaccgatggtctctatggtgatgaggtcctcaaagactcagaccactctgtcaaccctgcatccattggttctagggaccatgtatgattctacacatgttatccttaacaaatcaggtgtaaatgaaactttatcaatgaaacttttctaaactatgttttcgtgtttacagtgtcttatgttaacttcgagccaagagacttcagactcagttactccatcatcttagcgtgtttatgctacaaagttgacagactcggaacaatcatccagttccaaaaagctttgtgttcagccgttggatttggagaaatctgaacctgagtttaatgatgaactcgctattaaggaggtaaagaatgcagagataactgagatggttgaaggtgctgtaattacagataaagggaagggtgtgataagcaagttttttaggcctagttatgttgaacgtgtgtgaggttcagttcaattcccctacaaacactaacatgtcgatgcagctatagggggtgtcaatccagtccactgttattgctagcaatcaagacgtgtacagaagcaactaagtcaagccagattataatgatagtgggtttctagtaacaatcctaggtcagaattcaaacaagtaaaaatgagaacttaagagccctactcgatcattgggtcgagtagaaccaacaggcagaactaaaatgcaatcaacacgg

SEQ ID NO: 19668 - DNA, 2405 bp, Arabidopsis thaliana landsberg
  unsure (1)..(2405): unsure at all n locations
gacctttgtaagagtccagcgattgaatttcacaagcttctaagtttttgctagttcctttctgttagcttcaagaagaggccaaacaattataagaatataaattttattacataaacaacaaaatcgcaaaggctttagtagcgattaagatttatcacagcttatgtaagattatttgccaacacttcctggtatatatgtttacaagttatgatttttttcttgaaccaatatttcattacgtgtgaacatattcttcaggtgaaaatggttacctcaaaaaagttgtcaaacatgttgtagacacagatcaaagcatgaatcttcaaacataaaccccttcctcgtaatccgtaactaaagatgacctacttgtgtgagcttctatttcttcttctttttggtttatacttttaactgttataggtggaatcccgcctagtcaccattctgagtggcaggactatgatgaaaacttggtgtttgtctctggttctcaccatggctctgaatctcctccggcctctggctctccatatgggtttgatgctggatatgaacctggttgagattctgagactgagtgtgactcttagtcttgattacctgactctaacaagtgttttaacagttaaatggagaaaatagaataatccagcagcagaagctttctttgtagagcatatctaaccttgtacatgtatttcctacgaagtttcatggctgtgcgtatgcatcttctcacgcggaatacaagaaccttatcattgaagatctgcagtatatcttctgaatcagtatatatcagctgagcatgtgagcagaacaaaatacaaatgaaacaaactttctacctgtatcatgtcatcgatcgagcgagtttctttcatgatcttatgtcgattcatgattaaaatcgccgccacacaaaagacaggaagagcatcatcccctttttttatggatgaaacgacacaagggacatgtgttgttctatcattccttgaccaaagacttcttgtcaacccacaaaagtgatacgaggatgatgctgactttatctcactctcatcagagaaaggacccgcagtctttggcaacggaccactcttcggcagcaaaccgctccttgacaacaaaccgctgctctttgaaattggcccgctctttgaaatcattggttccctctttgtactattaccaattccatcctctatcatttcttcactcacctcaggttcagattttcttggaagctgaatcaccaaaggctccaagcaatcattctccaaagtttcagtaacagattcatcataatcagctgcccacatcatctacatcaaagacaaaacccatagataaatatgactaacagagacagaacaaaagactcaatatttgaagcaaacagcagaactacaaacctcccacatcctgagagcttcgttaaaagacaattcccgtcggaacagaactaaaagcatccggaaggcaaaatgaagactttcagccccaatacgcgataagtgggaaaatatatctttatctgtaatctgcaatatgtgccacaatgattgcaattgatccattaccccatttggtccctccatttggaaattcgcacgctgcacaaatatacacatagcaaaagtataatgcatgatcaaatgaagccagaacaaaaaattatgacgtattaagcactggatttaccgttcttcttatgagcatttcaaagcaccagaaggcannnnnnnnnnnnnnnnnnnnnaccacgaaaggagagactaaatcactcattcctatcaacagatttgcaaccagagagttagtatcctaaatcaataaaacgtcacaaagttttcatatcacatatctaagttatcaaacttaagagatatatggcaccttggcaataaccagttgcaggatcaacccaagcataaaccgcaaggatatccgacattcttcctagatttcctggatcctcataaaactcaaggtggctatccgtccttaccacatcaacaactgaggaaatgaaaaagttttaactatgaaagatactagatgggacagaaaaggaagatttttgcaagttatcgaaacaaaagagacaaggaataattcctacctattcgatgcaaagtccaaagccattcagacactcgatcttccgtgacattcccaacacgagagggagtgtcctttactgatgccatttcagggacatctgatattctcagaccatcaactatttctgcattgcgaccagtataagacgatggtccaacagaatccgaatgcatcactttgatctctggagtggacaaacgttgttctctaattaaatcagcattcttatcaattcgaaaattgtgcattgcctcatcctcagatct

SEQ ID NO: 19669 - DNA, 801 bp, Arabidopsis thaliana landsberg
  unsure (1)..(801): unsure at all n locations
aaccgaacaagatttcaagagtactcatatgaaaataataataatattaaaattttaaagtataatgatttaatttgctgatttaggttttattagttttattaattttaaaaaaatcgaatgacatatgtcattttgttgtgtgatgatgtgtcatttatatgaagagagttgaccaacttttatatatatgatttttgaatgaaattaaacgtgatttttttttatgtaaacggtgttaataatacgcaatgttttagaaatagagtgacttacccttaagcatcttccgctcgggataatagtaatggtaagttgctattacgttagaagtggtttgagctgccgctttagccgcatatgtgcatagctagcaaaacaaagacacatttgctaattaagtcttgccattggcgatcttaatttagatgtttgttctttaaaatataatgggatataatcagagatggactaagaaatttataattatagggaaaaagttttttatacactgaataaattgctataccaaaaagtttgtcacgttgtgagtaattttcttattaggctttgaattttcagtgtatgactagtcttgggagatgtctatggcggctttttcaagctttgtggtagaaattggaagtttttgaggtaatatgattgagcatttattagaggggacatatgtttatgtttaatctttagtctttaggcgttattacttatntgtatcgtacgtggtcaaaattttacggtatccagaattttggatcagttaatggatcacagttgattact

SEQ ID NO: 19670 - DNA, 1797 bp, Arabidopsis thaliana landsberg
atttcatttattttactacttttacaaatcatgtaaatcaccttcccacattactctgttttctctctgttcccaaatcaaaaggtacaagatcattggaggtattgctaaagcgattatatatcttcatcattcacgactctcaatcagacattgtgacttcaaagcaggtaatatcctcatagacgctgaaatgaaatccaaagctacagattttggattggccaaatttttagaatggaccaaactttaatgccaattgccaacattctaagtgttctctccatttctcatttctctccatatctaattattctttaataaaaaatcaaaacaaagtacacatatggttttaacaaaccaaatcaaaactaaacaatttattgggttgatcacacctagaaatatgaaaatatatgcttaaacttcattacaaccgtgaaggtaaacatcatatttagcgcggatctaaatcagacatcgatgaatcgtcaatagatactgtaacagacttgttggtcgttgattgatctgaatcaagccggtttgttccaggtctactcctaacaaaaaaccctggttgctgaggcgctggtaaagccattgtattactagtgagcatcacggaaatggttgacatggctggacgttttacaggatcttcttgaacacataaaagaccgatatggatgcatcgaaccactttactcttccggcaactatctgcaatgaatggatccacgaggtctaacgctgttccgtttctccaaagcctccaagcctagaatcaatcagtcaaacagttattgcaactattgcttattgtaggatgaggagaggtacatatatataacttcctttcctttaaacttacatgtgtcaccaagttctgtgcgtaatctgtcttgataaagctgctgttcttcttaccgcttatgatctcaagaactaacactccaaagctatagacatcagatttcactgagaactggccatttattgcatattcgggagacatgtaaccgctggtatccacgacaaaactttgttatattggcaaaatcatgtttaacaaacttaacttatgagaagtaagaaacttacaaggtaccaactattttgcttgtgttcccctgggtttggtccatttcaaagatccttgccattccaaaatcagcaattttgggattcatatccgcatccaaaagaatgttacttgctttgaggtcacggtgtatgattgtaagccgtgaatcttgatgaagatatacaatcccccgtgcaatcccttcaatgatcttgtgtcgtcgagtccagtccagttgaccttgtttttctggatctgtgtgagcatatccatgatttagacttgaatctaaagacttgtagcctccaagttccgatatggcaaaacaatcattgaaacaaaaaccaataaatgaaactgaccgaagaggaagtaatcaaggcttttgttgggcacatactcgtagaccagtaacctttcttctccttcaagggaaaacccgagaagcctaactagatttttgtgctgaagctttgcaactacaacaacctcgtttttgaactctgtgtgaccttgtcctgatgatttggacagtctcttcactgcaacttcagttccattcgaaaatgtaccctattcgtttttatcagcattatctcattaccaaaagtattgacataagattttcataagaattacacatcgtaaacccattaaaagtattaatagtaatagtaatagtaatagtaccttgtaaacctcaccaaatc

SEQ ID NO: 19671 - DNA, 970 bp, Arabidopsis thaliana landsberg
agcataataaatgtttctctctgtttcttcgtgttcctgatcctgatgatttgccttctggttggaaaagacacatcatatatcgtcgtactggggttaatcaaatgtcggagaaactctccaaacaggaaggtgagtttttcaacttttttctacctttggtagattatgtttctaattaaggaggataaaggaaagtcaatattttatggttctacttgtcatggactcataggacttgtgttgtagtgagaacctatgtatgtgttgtgcaatgcttgttttaactaaatttctaagtttcgtgactttacagtagcacaaggctggttttatagaaactctcatagcttaggttcccaaacaatgcttccccttaacgaatttcttgacgtaaatggcgggtttctggggaatggagaagtcaagattgttgccgaggttggtcttcttgaagttgttggcaagtcagatgtgttagtggaaactttattagttcatgaaagcatcaatgtcaatgtttttcaaattcttccttcacaggtaagaaaagtactcgtagctatataattcactttcttgtacaagctgcatgaatgtatgtagggttttactttattagtccatgtatcccttgcaggtagaatctgtgaacaatctctttgaaaagcacccagacattgcatcaaacttccgtctggagaacccacatctaagaacaacatacttgaatagcctactatgcttgactgagattctaagccagtccactgagaaaatctccattgttgatctcgccaatgcacattctacactatcttatctgacaaaagccggttttaagttggattggttggagaagaaactgaaagagcttggtaagactcggatgcaacaacttgagcaaaatttgaaggacttgaaggaattgaagcaagagttctgacgatgacttgagtcaatttttagt

SEQ ID NO: 19672 - DNA, 346 bp, Arabidopsis thaliana landsberg
gttgcgtaagactcgtccataggttgtgtctcattatcggaatgatgaattggagcctcatcatcgctcactccatccatcggcacggcttcatcacctgaagtatagaggttctctactggtgggcaaaagtcaatgttgccaccatctttgatcgaagtggaagcgggatttgggaggagaaaaatagattgtcctacagagtgatcgaacctatacttatataggccattcttctgctgcgaccaaaaactcttggaattgatgaggtgctgcatatcaatccatcttggaggaatcggttttgaatgtagaggtacattgcatgatctcaaaattggggtca

SEQ ID NO: 19673 - DNA, 532 bp, Arabidopsis thaliana landsberg
gtaaacgcgaatttgtggtttaacatggtttagggagaaaattgtttttttcagaaattttaaagttgatggttgtttttcggaggaaaaaagtatggagagaaacgatgagttttgaaatagtttaggttgaaaaattcagacaacccgaaaaacaatgaatggtagttttctttcattgtaattctagaaaaaagaggtggatgcaatatagcaattgtaggttggagcattttctagtgaattgtttatggactagatcccaaaattgtaggttgttaaccaaacccgttaacaaatctctgtgtctcttttctttcatgctcttgccaactcgttacgctctctcatcattaaaattccatagatctagcacacatatagtaattacacaaataatatgaatagtatagtcaagtagtcaatattttatgctctaaatatttccactcttctcttatatatacaaagttcttaggagatcttaggaattaatggcaattattgctttaattatgcattaatttggttg

SEQ ID NO: 19674 - DNA, 1146 bp, Arabidopsis thaliana landsberg
ttttttgttttctaattcagataaacccttaaacactaggaaggtggataggcttggtctcactacgtagcctttacaaaaatttcctggggctgtagccgcccgttaggtttcctaaatgcaccgcactcctccccaaggggcgaaccaaccttggcagagcgagccgcatacaccaagccccatcaacggcacgactgcgaagcaaactacaccccagttcctctaattactcagctaagggcgttccactccaccctcatggttgcactgtttttccgggcggtcatccaataaaccattccttacggataggcactcgagaaacagctctagtccccttaaatgtcatagttccatcatcataatcaaaagggaaaactatgtatcattgataaatctcatgatgttcattgattagtgttaagcaatagcataaagctaaacaataatactccaacccaaataggtaaacaaggacatggataacaaaagctagtcaatccttaagtataactatgtaaatgcgggaagtgaattatggaatgtgtaggacaaagataggtcaagggacacttgcctccaccaaccagctgctgctcaggggcttctcctgtgagttctttggtctcctcaaacagatcgttctctatgcgagcgcaaacatacatacatccatccactcgaattaggaaataaacagtacaacatacaagagagcagataagtcaaatatgcataaaatatgacatacgatattgcattcgcaattgctagaaagagaagaaggaaggtctcgcattggctaaagctataatcgaagcgtattacgggtagatgcataattaatcattacgtgatctagttccacctagttacactaacaagtattaatcacatgcactgatataattataactatctccaattgtttgacattatactaagtcgatgattaactacatgaaataaataacgtaatcaatttctgagttgagtttccatttcattaataaaaataacgtgatcactgcgcatagaatacacggagggggtagacaggtggctaggtgtagacgggcacgtctaggggtagatgagcacaccacccgcgacaggacgctacgctcgcgcctgagtgtacga

SEQ ID NO: 19675 - DNA, 474 bp, Arabidopsis thaliana landsberg
  unsure (1)..(474): unsure at all n locations
atacagaacagttggatataatggtttattacagatcatcttcatttttttctttgtctatgtaaagtctgagccggattcttttctttccacatgtgagatgacaagacttttggatattcttgaggactatttaatgtatcgtggttacttgtattgccgtattgatggaaacactggtggtgacgaacgagatgcctccatagaagcctacaacaagccaggaagtgagaaatttgttttcttgttatctactagagctggagggcttggaatcaatcttgctactgcagatgttgtgatcctttacgatagtgattggtaagtctctcatcattgtccactgtagtttatgaactttcttttcacgtatgacgnnnnnnnnnnnnnnnnnnnnnaacccacaagttgacttgcaagctcaggatcgtgcccataggattggtcaaaaaaaagaagttcaagtgtttcgat

SEQ ID NO: 19676 - DNA, 594 bp, Arabidopsis thaliana landsberg
agagtttgtattgggaatatccgacatcaactggagaaatcatcggtgttcatcatccgagccaagaaggtttattagcagaccgaaaaaaagatgcataatggcaaagctcttgcggaaatgtatcttttgagtttgacagataatcttgtgacaagtgcttggtctacatttggatatgtagctcaaggtcttggaggtttaaagccttggatactctatagacccgagaaccgtacaactcctgatccttcgtgtggtcgggctatgtcgatggagccttgtttccactcgcctccattctatgattgtaaagccaaaacgggtattgacacgggaacactagttccccatgtgagacattgtgaggatatcagctggggactaaagctagtatgattttttgtgtgctttactctgtttttgattatttgatgtatcattttaacttcttaaattagctttaattaagtcaatttttgtgcttttgacattttctcttaaattagataaaacaagagcataaaggttgagtttttattaccaaagtcttcgtttttttttggtgatgatcttttgcttattcccttactc

SEQ ID NO: 19677 - DNA, 606 bp, Arabidopsis thaliana landsberg
gttgaatggatgaaagaaaaataaattatggttagaagcgactttataacgtgtgatttccataatctccaaacactaaacgtacaaaaaacctatcatgttgtgtaaaaataacacgttgattatgtttgttctgtttatctttaggtacatcaaagcactcgaaacgatagaacttgaattaagaaggataatagtttatattcaagtcgatgaatggaaaaatatcaaagaaatgaaggccaagatatctgaaatggacactaaacttgctgaaattatttcactttgtaataaataagaacttcataagaaaaaacagagactttgttgaaattatttcttcttgtaatcaatttcagaaatctgtttttttttttctctctatcttcttccgcataatgattgaaaaactttttttcaatctatgtgtaattttatcaaaataataattaataataatttttttatttcgcttttttgagatctatgtttcatgaattttttgcataaatttaattaaattaattttgaaagacttgagtttaatgatgttattactgacaataatctaaaattgactttaaactatttgatttcattagc

SEQ ID NO: 19678 - DNA, 647 bp, Arabidopsis thaliana landsberg
tgatcctcaccgtttgatcgagtgttcaaaagcaaagaactctccatcgtttgatcgtgttttgcgcatttcaagaggatgctcgaccatttgctcgagcttgaattatttggagaccaaggcataagtcgcgtgaccccacttgttcccccaacactccattacttgatggacaaaataattacccataccctcactgtttccaactcgctcttctatcccttccaaaagaaaccaaagactatcctcctccaccaattgaaatcgccaaaccatctttgaaattctctctttcatcatctcattttttgcaaatcctctatctctcatcaatcatcgaaatcttcattgcaaactctccctttcactcctcaagaatttgttctcatcatcaccatacctcaccaaagttactcgatcattcgcaattccatcctcaaattttcgaccggtttttaagctcaaattccatcaccaaaaaccgaatcctttccactttgatacctcttggagagttgtttttgatcactttgttgaagctcaccaccaaactctatggattcaagagaaagagttcatcttcggctagaagatcctctattgataacgaagaggttacagcaattgatatgagtggtatgactgat

SEQ ID NO: 19679 - DNA, 505 bp, Arabidopsis thaliana landsberg
aatgaacagtttgaggatcttcaactcatatttggatgtggcttagctactggtggttccgcaatttgtatgggtgaaaccactgatgctcgaagagtgggagataacaaaattgatgatgaagtttttgaactattatcacaagagctagttgcatcaccacaatgtgatataccactctttccatgcacaaatccaaaaggacgggtagaaaaacttcatccaaggaagaggtttagaacctcatctactagcaatataggtaagctgaaaaatgacgaagaggaggatcctatgatcgtggttagtaataggatcgttaaagtcatacaataaagagaagaaagactaaagagagaagttgaataaaaaaaagctaaaaaaaaagaaaaaaataatctctgaaaagcgatgaaggaaattcctaatttatagaatcatattcgctacgaagcagttaccttgattcattcacttggaatgaaaaatgtcctcatagacatgt

SEQ ID NO: 19680 - DNA, 564 bp, Arabidopsis thaliana landsberg
ctttgaatttttgaaaaactctaaaagtctttgtatagttttttaaaagcattttaaaagttttgtaaagttgtttaaaacacttgtaaatcattttaaaatctattaaaatcattataaagtctttcaatacacatgtaaatactttcaaaccccttttaaatctttaaaaaaatgcttgtaaatattttttaaaagggaaaaaactcaaaaaaaaactcaactaatttttatttggacatttaatacctaattatttttgattaaaaaaatacacgaaataataaaattgtgcaatttaatatccaaataattaaatacttttttttgtttttaattaaaaataacaatatttattttttaaaattttaaattgcatagttttattatttagtgtatttttttttaatcaaaataattagatattaaaaatttaaataaaaattagttttttccgttagactgtaattaaaaaaatattcattcctcaaacatgttacttcatgttttaattcattctaactacatttatattacaaattaacactttcaaaaaaaaatttg

SEQ ID NO: 19681 - DNA, 1505 bp, Arabidopsis thaliana landsberg
taaaatataatataagaaggccaagagttctaaacaaaagaggcagaaccaaaaaagcaaaagccataaatatatctaagcgtttgatccaaatgcttcagatatctttgatagcacttcaaaaagaaaaccatgcttctgcaaaaagaactcaaattccctagcttgcatcgctttccactgctcgtaaaatctcttcatatcctttgaggcaagcttactcaatccttgttgagcagtaagttcatccatgccaagacccactatcgatctaacaagagaaaactttgtaaaagagacttctccttcattcatcacctcatcttcacagttgtttttactgttgggcaaagaagaatcaagttcatgcttcacagactcaaacttactactcttcttcgacttctcattagatttcataccagatgcaagagccattctaatacctccccaaactaacttagacaattcaaaagccttgcgatcatgaggtttgacgaaagtaggttcaacaccatccttggctttaccaagattgttctcatacttcttctttaaagccctaagcttttccataaactgattcttactaacatcaaaactaatagattttttcaccaactcataaaccttattcgtattacttacccctgtatcttttttgtcatcaatcagaccttgtaaaaccacaatctcatcatcttcagtccaaagtcgctggaaataagttttcttcgtctcttctcctccgccaccactcttcttcttctcctcttcccctgaaaccttcttagccctcttcacatccatagacactgctgcttcatccacttcaagagaacgtttagccccagatttctcggaggttttcaccttcttagccctcttcacatccacaggattcgtcacaacttgatctttcttcttctcgagttcagagtctgaatcggtttcttcatccgaaccagattcggaatcggaaacggcgtcgagagtcgtcttcaaaggtgatgggttttcagaggaaacgtcatcttcatcatccgaagaagagtttcgtgcgatttctttaccttcttcgtcgcttgaagaagcactcggcggatcttctaacggattgaaacgtctcgacattgttttagggtttatgggactttggagagacttaagaggttgaaattgagatttttgctttgctgccttcaccacttcgttcttagggtttatatatattgaacaaagtgtctctctgttttccaaaaataaataatcaaaaaaatattggaaaacgtataaaattatttattgtttttcctctttttttgcatgacgtttagatttccgatttccttccttaaaaatttggaaattagctatattgaccaattttatttccctatattttatctcttacaaataaatgttagatctctcttttctcagcaacatccgaaaaaaaaagctcattcaatcgtcgcacacgttgatagcgtccttcccaagaa

SEQ ID NO: 19682 - DNA, 626 bp, Arabidopsis thaliana landsberg
  unsure (1)..(626): unsure at all n locations
actttaacttctcaccaacggcggttaaagtgacatggtagacttctccttcctttagtaagttcgcgactttaagtgctgacacgagcgaagcaatcatacttggattgattccacattaagtgagttgtggtcaatttctcaattcgaacactactctactccgcccgcaatccaaattggcatgatatcccaataaccaatccatcccaaggatgactttgaacctttccatcggcattaccagaaggtttgccagtaggatcgtatcctggattactactagaacttctattaacacaattcaggtctgcatgggtggctgatttcccgcggtatgtaccaaaacattcacctctcttttctcatacccgtggttaaacttatcggccacgtcagaactaacaaaactatttgtcgctcccgaatcaaacaatacatgcgtggggttacaaccaacaattaatgtccctaatgcatatggaaatgatgtatgcaaatttaaactagtaaactacgcagacaacaatcaattactcaaacacacataaacaaganaaagttagaacccatactaacctgttatgggacccttggctgtcctgaaagtttgtaggttctacatc

SEQ ID NO: 19683 - DNA, 2979 bp, Arabidopsis thaliana landsberg
aaatactcattactgtagtatagaaaacctaacacagtatatattttaacttttctattttattaaaggacaaagagacaggaaattggtggactacagatataagaggcaatgaatcagaagaatatataggctattggccaaaagaactatttgatcttattagtaagagtgcaaacatagttggagttacaggatcagtccaggcttctccttcgggtcaaagcccaccaatgggtaatggtcatttaccaactgacgatgaggcagggtcggcgcgtgttggagaagttaagtttatagataatgattttgtggtcaagggaagtgaccaatataagttagagaaacttattgatgatagtaacaattgttatggtctaaaagatggaaagaagttaattttattcaattatggtggacctggaggaaattcttgtggggtctaatatttactaaaataatattgttcttggctatttgaataaataagttaatcggacttcagctgataatgttcaagtattaattttttatatatatctctatattaagtgaaagattatctctgcatgtgatctctcatttgatgtggttgatcaaaacttgtttatcatttaatttcattagttacttaagtaaataattattttggttaatatattttttgtgactaaaatatcaacaataaaaaatgattttatgtgaaatatgtagatgcaatctttaatcagacaagacaactacacaaaaatgtatatataaggtgttggaaccatctttggccaaaccaaaaaatcaagttaaaggtgtttaaaactggattgtctgaccggaaaatgatcctagtgtggatcagaaagaacctccagtatgaactaattcttacgaaagtttgactccgatggcaaccaaaagcaaggaaagacgcgtggagaggaaaataataacatgatttttcatctaattaattaacatcatttaaacatcttttcttcttccactcgtacaaaccacattaactacgattctgttaatatgatagaaactcttcttaaaagaacacatatttcttgttcttttttttcttgtagacttttaatgcagtgaactctttttagttctttctcgtgcacgtaccccacaaatacattaattataatatccatatcaaagttaaagaaatggtgaaatcaaatgggtgtctcatctccatacttctcatcatggcttcgctctcttccccttcacacggcctaatttccctccctgggatcgacatatataacccgtgtcataattgagggtgtcgtgtattgttcacatgtcggagaccctagagaccctgctatctcgaatgccactgtttacttaacatgtgccggctcaaccactagcctctctaagcagtactgaccaatcccgccggtgcatttaccatggtgctcagcatcttagataatgctttgttggaccctagtttctgcgctctcggagttaatcttccagtaggaaattgcaaccttgtcgtaccaaatggcgtcctctgccacagttaaactggtcattggtcaacgtcattgtgcctaatattgctgatttcgccgccagcccatttaccagtcgctgatgcaaggagaaccttaatgcaattgatatacgtataaaactgttttatttgttttgtgttgattttgtttgtgttaaaatcaatgatataaattttcgttgacaaaaaaaacttgtgctaagaatgtattattggataaaaaaaacaaattctgcttcgacaaaaataaaaaaatagaaaattgtgctaatattgttttctcagcatggccttgatattctatgcatgcagtttgatttgattaacatatcaaatttaattttcgtttaatttcaacattgttttgttgtctagtttgtatttgtgttggattgagcacatataaaccggagttaatttgcatttaactttcaatgtttctattcgtaggagctaggaatacacaaatcccagtccagatcatacgtagctacgcaaaagtatccatagactcggacctaaaaattttttttgtccttctaaagattttattgatagaggccctgttcgtttccagagacgctgcgatagagtccagcgactggaaaaaaggctttatttctctttctcatccctttcatctctcctgcatcttctctttatcttgtccctgcgactgcaatttcatgattttggagtcgctgaaaataacagcgacccccactaaagctttattaaaatcagcgactatcgccggtgtcttcccccttggattaatgagtcgctcgcttctttaaaaaggtgtcgctggagagatctcgcgactaccaaaagaacagggccagaatgaggttgagttatacatcaccgataaggatcgaaatcctttcataaacaatggaaactctcactaagacccaaattgaaggaaacatatagaaaaaaaactttacaacataagctacaaagataaagttaaagaatccaaagcaacaacactgcaaacttttccttacaagcagccgactagcacttccataaaatatttcagcgttgaagaaatgcaacttacatgaaccttgaaaagaatccaaaattagatcaccttcaaaatgaggacccgaaaagggaactaaaccgagctcacacaatctcttccacagcaaaaacgaagacgaacaaacaaaaagatcagaacacataacctaaccaccacagttgctctagtaaccaacgaaaacgagaggcgggggattaaagaaaaaccttgggatcaaaaattgaaaaaacgcaaaagaggaatggcggttggagcgttagaccataagcctttgttgtagacttactttctcatacaaatgaagtttggtaaatgaatgcctcttctatttgggttgttgggtaaataaaaggatcttttccaccccaca

SEQ ID NO: 19684 - DNA, 1583 bp, Arabidopsis thaliana landsberg
  unsure (1)..(1583): unsure at all n locations
tgttttgccctatatatataaaggattttatcaagaaaatattcanaactagagaaaaaaagagagagttgaaactagatcataaaattaattgttacttacttgcagaaccgaataaatttatagtgatggttgggttttcgtgaggcccaacagatggagagaccacaatgctagtgacggttccgtaatcgtttccattttctgcaacagtcgcatatattaattgtggaagctataacttacgagtccccggtaggttaaaaaaaattggaatccatttcaaatgtcaaagagttcaaatattggtttactaaaagaaacaaaaaacagagccatgagcaagccagaatctatgaaatcaaggtctatctgaatttataattcatttataaactaataaacacacaaaaatcatatagaaaagtaactgaagacttaacaaatagatacttactggcgcagtattcgaaatctatggcgccacgcaaagccggtaagaagaagagtgatacgaggaggaggagcataggctggacatgagacatcgccatggatcttcaaagctctttaaaaagatttttttttcttcttcaagtttgactaaacaagtttgtaatacatgttatgtttctatgcaagtctgctattttataatctacagaataagtagataggatcataactagcatatgatgctctggaccagggcctgcataaattatatatatccatatatattaaaccccacgtttttgtacacgagaaggttataatattagtgtttaatgtcaattatttactaccttacctaccgcctttgttcattcacaatcacgtggattcatttcggagagaccgatccgtctcgaagaactatattatttataaacacattaaatttgattttaaacttttttttttttgacataaccacatgttctataacgacaacacgaattgactaccttaccgaaaaaaaataattttggggccttgattgaatcttttcgaataattttggggccttgattgtttatggtagttttaaaatataaaacatggtaggaaattcgtctttagagttaattcattaaaaatcaaaatttcatactaaatacgaattacatttacataagttgtaacggatctcacatttatttaccaattaactagagtaggatcgctacatcacatgggcattggctaatcatccgaatttagctccaacatgtccataaatagatccaacaagagacaagagacagacgagcacgcacacaaagctgaaacctctaagaagaagccatggtcgggtccaacttcggattttcttctgcaatatacacatctccacaggaaaatacactgccaaaggccaaaatgcatgtgcccccaccactcctaatacttcattgaagtagggaaacatcactgccactcccgttgtgatcaacacgtacatcgttctcaaacacatactcattgggttcaatcttaccgtttctcctctgaacaatggcagtttgaatccgtagaatctggcgataaacttattttccggatatttcttggttagcgat

SEQ ID NO: 19685 - DNA, 1054 bp, Arabidopsis thaliana landsberg
  unsure (1)..(1054): unsure at all n locations
tctatattgtctaaacttacgtttaaagtgtcttatagtggaacattcccttatagtttatacaagtgtttttatgtttgttggatttgaagcgaagcttaaccatcttatggtgaatcagatctatttagaacctttagttggtggcttttctccggatcgtcatgttgggtatacggattactgaaatttcaaggatagtttgcaaataaagttgaagaaaagaaagaaatttccttcgcaagtttaagatgccttttagccgtgatttcaattgttcggagttttgattcgttttgcaaccagctttatcggtgaaaatcagaagaatcaatagtcgagtttcagttatcggcaatgattttcttcaccagaatcagcatcttagatggcggtggtgatgtcggaaagcttttagaattttcatccaacacgtataccactgttgacacgtttgtttgggaatgaaactaataataaactttcttcaagttgaagcagtgtattgtgtgggcctttatgggctgtaatctgttttgtaacccatgttgttatgaataaaatcctaatcttgcgagaaaaaaaaagaagataaactcgtcaaaagacctaatttatctctttctcacaagaaaataacaagtataaccattaaaattgtgtataacaagagattatttgagcattggaatcttccaagataaacttaaaagtaaatgtaacatgtctatggaagatgaacatactttttttattaaagatcagctcaaatatctggatatcgaaattttgacatgtccttacttttaatcgaatctcatttcatacattttaacacgccaaagtttattaattagtggattgatcaaaacaagaatcactgagaaaacatatataaaagaaaatcaaaattttcttaaaccacatatctcanagaacatagagcaacatacaagggtacaataacacatactcttaaaaatacacaaagaacaagttgtggaagacataatcagatgttgatggtggcattccacagcccgagaactccatt

SEQ ID NO: 19686 - DNA, 1049 bp, Arabidopsis thaliana landsberg
ttaggggaaatttaccagtgcagggtctatctcaaatgagtgagtttctttctcttctgctgctgctgccaattctgcttcattcaacagctccccaggtcctgcttcaagttcaccacttgttttgccgatcgtaaatccatcaccaccataatatggctagtaaaaaagttaataagttgggtcaacatactgtggagaatacaatggtataagagatatcaatttcacattcaatgaatcaaggagtttaacaagaagaataatgagtttatttatctattatatagttcaagaaaaaaaaatagaatttaaacacaaaaccaattgccccaagagaatcaggatagatctctctgccgcattggtatcaaaagatgcaaaaactgttgagaacaacagatcatggtatgtatttccatccactaatagtaatcataaagcactaaattgaggagttcaacatacctcagaagtaaatcttgctcgatttatgacatcatcactgagaagccttttcaacacctaagattgtttatatttaacgagtgagcaaaaccaacagagaaactaaacaaaaatcccatacacataactagagaaagaggatcagtctggtgaacttacctccgggaatggtgattcaataaaataccgatttttcttcaataccaacttcactttcccataattagcagtagaagcatggatgaaatcaatgatctccccgggtagcttagtcttagacagcttattcaaaacagagatgatagtttctgtctcaagaccaacggaaacagcagcatacaacgagtgtggagttaaattatactcgtgcattgactcaggcctgaaatagtaaccaatgaatccaaaatcataacttgtacattgacatccctatacaaaatcgaaatctcttaaaaaagtgtgtgatgagaacctgcaaacgggctcagcaatggcgataacaaagtcataagcttgtttatagagaggagaaaatgtctccaagaaaatctttccatcagcacaagcccacaaaggcc

SEQ ID NO: 19687 - DNA, 969 bp, Arabidopsis thaliana landsberg
tagaggggcattttcttcgtttagagggatgcgacagtccaatatagctagaatatagtcatcctccagaggatagtaatggttataaactttgaaataaatgtcataatcaaagttgttcccaaatctgtctttgaactcacattttacctcgagttctacaaatttgtccctactattagttaccagtgcgccaaccctaaatctgaagaatggttgggagagagggacgtgaagtagaggaatggtcagagaggagactccagtagtacggtaagtgaaatatgatggcacttcttctttccctggaaataacatgtacttgaaaataattgattcttggtgaaggacagtttctggatccaagttgaagcagtccctgaaatcaagttcgacttgaggaagagaagaggaggctgtgtcaatattgtctgctttcatcccactagaataaccactcaattcaactcgagtcaatgccccacaagctggaaacaaagcgtcctcaagatgtttcagtttagaaatgtgtagggatacacattttaaccttctgcaacctctcaaacctaggttagtgaggttagagaatttctcgatccaccaaggaacctcttcaatccatgttctgtctaaacagagtcgggagatgttggttgagatttcaggaaagctcctcaaccgtgagcatcccttgaaactaaggctatcgagagattggaggttgattccggtgggcagagtctccagattcatgcagtctattatggtcaagttcttcagttgaatgagattctgaaatgaggaaggaagctccaccaaacttgggatattctcgagatacaatctcgtcaaagtgggagacaacatcatcgccaggaagggcgtaagcggctgaaccaaataacaaatttttcagtgcaaattacttttgaagtgttattatcttaaatttagaatataaatctt

SEQ ID NO: 19688 - DNA, 1982 bp, Arabidopsis thaliana landsberg
cggccttcaggactttgtatttccacacttttatattgtagttactcataaaataaataacaccggttaactaaatcactatgttttgcttcatatctaaacccacattttcatattgctcatatagtaaaagcagattaggtttcattagtgtaaattaaactaatctgcttacttagacaaaagttatatatctaaaaagcaaacagaaagaagttgagaccatgttagagcaaaaaaaaccaaaagagtaaagatgcatttcaacaagtctcaagaaatttgtgtataaaaggctaatagagtggccaaactctacataaagctaattttgtcacaagaagtattcacatcgtgcacaaatgttaagaagaacgagttattcttcaatgtgtcagataagagtttctgcatcacttttgcttcatatcaacatttgtgcacgatgtgaggctaaaatacacatcataatttaacatcgatagtactccaaactcatcacagaaacatatatacctgctgctactgcaagaaaccaccaaccacgatcgaattatcaaaaagtaacagtttgacaaagccgaatgtaaggcaacatcatatcgtccctaaacacgcgcgagtttgattcaaccaccccccaaatatgacctccttgacgtgcttccaacgcaatcactatgcacaaaatatgcttaaacgtcccaagacaggtgcagaaaatcaccaacttcccaccaaaattcgctatcttggaccaacattgactgacaataggcaaatgaaaacccatcacaggtctgcaaaccgattcattcggattatataccactatcggatgtaccagagaacacgtaagatcaactgtatacaacaactgtccaatcacagtgaacgacgacaacgggtgccaaaatcttcgcaactgacttgcaacaccccatgactgccataaaccttgtactggttcgtaagcaaaacaacagtcaagatccaaaatgaaaatcttcccctgtatcaccacatattgaacaagcagtccattctcactagcctcgttagggcattgagtaggcacagtttcccagctctcagtcgtcacatcaaacacttcaacccaatcagcatcttgtggctcgcgtcccccgatcacataaatccttccgtcaattactccggcggctgcatggcaacgagccctttgcatatccgggagagacttccaagtatggaatctgcagtcgatgacaatcactctcgacgattcaggataatccgatgtaaccacccattacatacatcttgtagccgattgtgaccacagctgctccagataacattataggaaatgaacggattctgtgtaattgtaaagcgatgttgctctgacgaagaaagaaccagcttgggggagtatacgcttggaatgcgattaaggcataaagaaccggtttggtgaagctgaggagcgagcgcgttacgtagtagaaatgatccgaaatgattactcgacgaaaggttttgcagacgagaattggcgacggggaataacattgtgggaagtgtgcgatgattctttcgatgagttcttctggaagttgtagaagaatcggaagattctctacttcttcttgaggattctcgttgtgattatcttcattaggatcgccgggaatttcagagagtacgaccatccccaccgtgtgacgttagtaggagcaacaaattacctgatcaaagagagactaattgtgaaaaaatgttgtttgtgtatttataagaaaaccaaaatgtcatttcactaggtatctctcattgcactcatcgcattcagaaacttcgtttcaagaaaaggtttatttccttttaaaataaaattccgaatatataagttgtattaaatcatttttcatgttcattagtctcgttcgttatacatcatcattttgcttcatttctaaatcaagattttattttgctcc

SEQ ID NO: 19689 - DNA, 271 bp, Arabidopsis thaliana landsberg
gtttaacattactgtaactttttcaatggttgatattctctttttatatcggttgtaaatcattttaaaaacggttgtgaatcttttcataatagcagctactgcagctttttcaacacttttagaaaccttttaaaatagcttataaatcgtttaaaacccctggttaagagcatgtttaaagtccttttccattcaaatcaaagcacctgttaacccaaacaaccattatacagtaattttgtaaaacaggagttgaactaaataaact

SEQ ID NO: 19690 - DNA, 633 bp, Arabidopsis thaliana landsberg
agctaacacgttacgaatttgtagcaacagatatcttcctataatatgacttaaataaattctgttttttggcgatttaactgaagatatttttctctcttctgcccattgatagggttagaatcattctcacaatccgagtatattgcatgccatcttcactctcatccatccatcaaattttattttaatgtgataatgttagtttatgataaaaccttcccattataaacaaggcaacacgcaacccatctcttcgtacaggtattgcgacgttcgtatatctccgccatggaaacacagatagcaaataagaatatctacgacgatccaagaacaatcggagaaatctcagatccgattccccttgatctcattctggagatactcataagatcacctgccaaaaccctagcgaggttcctctgtctatcaaaatattgggaatccatcattcgcaacagagacttcatgaaatcgtacttgatgaagtcttccactcccccgcaaagtctcatcttcacatttgagaccaaaacttacgagaagcaattctttttctcatcgactcatccccgaaaatcgaggggaaaccattaatcgtttctctgttgcaacttacccatatgaaat

SEQ ID NO: 19691 - DNA, 496 bp, Arabidopsis thaliana landsberg
agtctaatcagtttggtaatcgtctttgtttttgtcctgctctgtatccgactttgttgtcatgtttaatctggtgcggtaaattcttcttcttcctccattggatgtggatttggagcagtaatctttgattcagagtttttggaatgtgaatgtttcaatcctttcctacactttttgtaaatagaatgttcaaagattactttttcatttggatccttttctactgttgttagtttgtgattttgagttgtggtgtcttgttattatgtagcagattatgaaagatcaaataaaagaccattttacctgcaagatgacgagatagtggttgcttttttttggtctttatgtttattggtttgacttctcagtttgagtggaatgaacaagttgagagtgaaacagagactagtctcgtcctctgtttctaagcaaccacatgtaccacaaggcattgattccgtgcaacaaaggtttgttttcttattcattt

SEQ ID NO: 19692 - DNA, 469 bp, Arabidopsis thaliana landsberg
tgttgtgctgaattttggttgctgcgaggttcaagattttgggcctgcgcacgaaccgctactactgagtttttggcggcttcgaccgcggaaggtgggaatgaatatggtgggtctgtttctgagttttttgattttactgactctgggagctccgttgagtggactgaggagtcgtcggaggaggacttggattattttgcggccttggacgtggctgcggcggaggcttcgccacacgccgtggacgcgccagacgtgccaggttctagcaccgggcgccgacgacgaagggcggttgcaaagcgtagggttagtgcggagtaaggggctcggcttcgcgtgagtagtgctggtcggcaggagctgttgtctttgtcgagctgcgcgggtacatcggaaggggaactgcgaagtctttatgcgggtgacgagcttaggataatgttagttgattatagggagatgt

SEQ ID NO: 19693 - DNA, 440 bp, Arabidopsis thaliana landsberg
cgacaaggatgtagaagatattcttaaatggggtgttccaaacaacatcgatatgattgctctttcatttgttcgctttggttcagatcttgttaatgtccggaaagtccttggatcacattccaagagtataatgttgatgtcgaaggtacaaagttacaccttatttcacttgtggctaaagttggttttaaaggtaggattgtgattagaatttttatcttattaaggttgagaaccaagaatgagtcctgaatttcgatgagattttgcgtgaaactgatgcattcatggttgctcgtggtgatcttgggatggatattcctattgagaagatctttttggctcagaatatgatgatctacaagtgttaccttgcatgtaaaccgttgttcacagtcacttaaatgctcgagtcgatgatcaaattaccacggtct

SEQ ID NO: 19694 - DNA, 707 bp, Arabidopsis thaliana landsberg
cgtactttacacgccttgacttgattgacttgaaaagttgaacttataatatggtttgtgttgactaggtgttcgttgaagaggtcatgtttgccaatataaaagatatatctttttcatataatgcatatatgtctagaagattagtgtctagtgtctactaatttgaataccaaaacaaaattatataaaaaatgttaggaattctacgtcggtccaagtatgacatgagttttattgtcaacaaatttgatagcgacattagttatcagaaggccaaaaaccacaacagaagcatgtagtagggttttttccttggggattatgccccctacaaaagtccctcctaaagttttacccttcttcttgcacacagagacacaatctttagaaacacaaaacccggtttttttgttagttggaaacgggacacatcatcgtctgcttttcttttgttcgacattacccaccacacctgttatcattatatttaaaatataaaatctcaatttcactattgaaactaagtttgcaaatcttgtaaactacacaagctctataagtttgaaatatataggccttgaatgttttgtagattttgtaagagtttttggtttttgtttttcaaaaacttattttcataccaaaaaattttaaaattttggtttccctacaatttagaaaaacaattttgttagagtttccat

SEQ ID NO: 19695 - DNA, 1527 bp, Arabidopsis thaliana landsberg
cgtgcagattagcccaattttatttgtattaaccgactaatggtctttagtatacagaatatagctacgtttctcttaggtcttttgcgaattggctctgtctaggtcttacttaatctacaagttctgttggcttcgtctgatcggcgatcatgaatccaagcccaataacgattgatctcatcttggagatattggcgagattgcctgcaaagtcagttaagaggtttcattgtgtgtcgaagcgatgggcatcaatgcttagttgtccacatttcagagagttgttcctgaccaggtcctcatctgctcagccgcgtctcttattcgccatcgaaaaacataatcagtggagcttgttctcgttgcctcagcgtctgactccatatgagaagtcttcttcgtcgtctgttgtagtaacccctgaatttcacatgaagttccctccagatggtatgctgatctatcctcgtcatgaccgacggttttcatttggctatgcctctggtttgatgtatttctatggtatgtggatcaacgagcacaattacgatggagtgcctgtgatatgcaaccctttaacaggacggtatgccagcttgccttttctggaaaggtatagaaagacgaattaagctttttcgggtttgatccgattgacatgcaattcaaggtattgtgcatggcttatccatttggtcctgataatcagtaaattcttacatatgaaaccggagaaatgaggtggagagagataacatgttccttaacacatgatattgtgagtgaaaggatatcaatatgcatcaatggggttttgtattacttaggtgacacgtgtgatgtttacaacgatgacacgtctgagaagatgcatgatttcaagtttatttacctagagagcttttgtcatttgattaactataagggttaggtttgatttattatgatgatgtcactgatgatgccatgaagttgcgtgtgtggattctagtggatgtagaggaacaggaatggttaaaatatgcttacagtttgagggatgataaattctttactcatgacgttttcgttgttggagtgactgctacaggtaaaattgttttgtccatgcaaagttttacatctggaaaaccgttttatgtttctacttcaatccagagatgaacactatccaacgtgttgaaatccaaggttttggagaatgtcagcatgaatatgactactatcgtagtagagtagtttacgtcttcgcagaccatgttgaggataataatgttaacgatccaaagctactcgagtcaagtatctatgctccatatgtgaagacagaagattaagtatcagaatcagaagaagaagaagaagaagaagaagaagaagaagaagaagaagaagaagaagaagaagaagaagaagaagaagaagaagaagaagaatcaaaagaacgagaaaaggagaagaagatagagacggtcatcggaggttggataaagcaatattgggcatgctttttgcgcaagtctt

SEQ ID NO: 19696 - DNA, 1255 bp, Arabidopsis thaliana landsberg
  unsure (1)..(1255): unsure at all n locations
ctgtatcaacgttttgggattatgatgttgaaattgtgagactttggtttctcttttgcgttttattttcaatggttattggataatgtttctactatcgaaaagttctcacaagctgtgtttagtgtttacgtagaatgctattgattcttcgttcttcttctccctctcactttgcaattacagcctcctctaaatcgttgcaaaggaaacgttgaacataaactgaggttaatgcgtttactctctnnnnnnnnnnnnnnnnnnnnngttagttagttgaggattcaattttagtttcagcttctagaatcttcaaatgaccgaactaccctgtgatactaactctctacaacttcataatcatcacaaacatctctgaggtgagcagagagattgagatgatatgttatgatttccttgacatggtttctcgcgtttataatgtgtgcttagctgttgatatgtctaagctcagccacttcagagtctcctactaaaagtggatttcagctgcttctctcagctacaaaacattcgcactataaacaaaaaaagtcatctacgtcaaagatttgaaagttttacattaagatttaatagaattgatctgtatccaactcccactaacataatgtctaggtgtggttaggtggaaatgaaatgttgaaaactattaacattatataatcaaaaagagcaaagctggtggatgtgaagtgggaacaggaatcattatcatttccacataagacagcggaggagtcacaatggttcataaagtttccatgaaacgataactaggaagcttcctctgttttcaccattctcagtcaatggagtcaatgctgtgtggtcaacaaatgtacaaagcctcttaatctgtaattccttgctccacatatagcgctctgttattaatcatggattcttgaatcctctctccaccatatactaataatggattcttcttttttactcgaaactgttgctgctgcaacaggcttcttcacacttttgggtacaatactttttatggtttacagaaaattcaaagaccatcgagaaaacaaagaaaatgattcttcttcttcaacacaaccgtctccttcaccacctctgtcgtctttatctctcacgcgaaaatacgatgtctttccaagcttccgcggggaagatgtccgcaaagacttcctcagtcacattcagaaggagtttcaaagacaaggaatcacaccatttgttgataacaata

SEQ ID NO: 19697 - DNA, 1331 bp, Arabidopsis thaliana landsberg
acccgcgaagaagacgacgtcgttttctcatttctttaattaatcgaaacgtaagtctctatcaccacctctgtcatctctttcatcggaaccgtcgtaatctcccttgtcgtctccctcattctcaaccacactatcatcgtcccccgaacttctgttttcaccaccaacattttcactctcgacatcactccccagatattcgtactcgagatcatctgggtcactctcatacactaacccttcatcgaaagacattgaataaagaccccagcacacccaaattagaatcgagaacccaaaacccccaaaattcggccaaccctacaaataatacttcaagttttaaatatcgtttttaagattgtcactttacaaacataatttatctttactccttagttatttttgatattttattaacagatggacttttcaaataaacaaaaaatttatgaagttttttctattttggaaaattttctactccctccgtcctactaagataatatttttaaaaaatttcacattctttaaaaaatattgtataatgacaattttaacctcttaataaactttaaaaataataataaatatttatctaattatttaataaaggtaaaacaggtaaatagttttaaaatttgcattgaaaatataaaacttctatctttatagaattattttatagtttttagatataaattgtaaaattgcaaaaatagatgattttgtggatttttttttgcagaaaaatcttcttttaatatctctgtttttctactcatctaatttcttaaaaaatgtagtattaatcactacaattttccatttgttcttttgtaaggaaaaacaaaaaaacaaaaaaacaaaaaaaaatcgaatttttaaaaaattattacctaaagtcgaaagtgtctagatgatcagtggttgttcaacaaattgaccttgacaattctccttttcattaaacattttcttacaaacgtactcaagttcttaaacaaaagtagtgctaaaaaaagatatacatccacttgtgtaagaatcaatacttttgttttcttcctcgtagttaagtaatttacatgtatttgcaaaatcgatccccaaagtttgatattactcacactttgtaaccaagaaacaacaatactaatgagacacacgagattattatgcactgggttctctgggtcccactgcttctgcttttgtcggcttgcgttttgtgggtggagaatatatgtcatgagaaacgtatcatctaaccgttagatcaacgacgtctacatatctttcaatacaccgcgtaacactgaaaacaa

SEQ ID NO: 19698 - DNA, 2173 bp, Arabidopsis thaliana landsberg
gtagtcaatctttggagatggactgtagtatggtgggggtggggagctgtagacgtatgggggtggtggggacttgtagtcaacctttggagttggattgtagtatggtggtggtggggagctgtagacgtatggtggtggtggagacttgtagtcaacctttggagaaggagagtagtatggtgggggtggggaactgtagacgtatgggggtggtggggacttgtagtcaacctttggagatggactgtaatatggtggtggtggggagctgtagacgtatggtggtggtggagacttgtagtcaacctttggagaaggagagtagtatggtgggggtgggaactgtagacgtatgggggtggtggggagttgaagtcaacctttggagatggactgtagtatggtggtggtggagagccgtagacgtatggtggtggtggagacttgtagttaacctttggtgaaggagagtagtatggtgggggtggggagctgtagacgtatgggggtggtggagacttgtagtcaacctttggagatggactgtagtatggtgggggtggggagctgtagacgtatgggggtggtggggacttgtagtcaacctttggagttggactgtagtatggtggtggtggggagctgtagacgtatggtggtggtggagacttgtagtcaacctttggagaaggagagtagtatggtgggggtggggaactgtagacgtatgggggtggtggagacttgtagtcaccctttggagatggactgtagtatggtggtggtggagagctgtagacgtatggtggcggtggagttcttttagttaacctttggagacggaaagtagtatgctggtggtggagaaatgtagacgtatggtggtggggaaattatgtaagctttggattacttcctcagaatttcttgtatatgatttgactgttcatgcattacactatttgaagctcatcatgtcgttgtaatatttattacagcccaaaattgataataaaacatgtcatgataaattcattgtttccatagagtggtttgttgcatgtatagtcattgacttgttattatttcagttagaagacttttatggtttattatggaatatcttgaggaaggcaaatttcaaggatgacgatcttgcttgtatttttggagctatatatgacatcaaatccgttctatctccaatgttattgtttttatatatttgctacttaaagatcttaacatatgaaaaattctaactaaacaatgatacacagctatactcgccctaatttgtatcaatgcatttcgtattgatttggttggacactcatgtggcgaagaccttctttcattggatgaagtctctattgaaggtgaaggtgtagttggccataccttttctatgttacatccttctacaatcataaatgtggtattcatttttctgatcttttaattttttgggaaaaatgtccaaaaaatcacgaacttttataaatgacaaagtttatgttgacttttcatttgagtcatgtcgttaagtaggttaatataattatttcacggcgttaagttctcgtttatctcctctgttagaacaaaacaacattgtttattgcagctcgttctgtctgttaaaacaaatttaaaccctgaatctccaattcgattttattatctcaaaacaggattcgaggactatcttgtttgggaatggacaaccatggcacggatcacaaggtgaaccatctcaaatttcgcagggagctccatctgcaccatctcaaccagctcaatttgaatgacttctgaaatcgattttgaggtaatgaaatcgatttggggattaaggtttaaatttgtttcaacagacaaaacgacgttgttttgtctctacaataaacgacgttgttagttctaacagaatagataaacgtcacattatatccgtaaaaaaaattatgttaccctatttaacaatatgactcaaatggcaagtcaacaaaacctttgtcatttatttagaaagtcaacaaatactttacgacttatttgtcttctgtgaagttcaagattaaatcgtcccaaatttgaaagttagtgattttattgacatttttcccttttactaataaggaaagaaagagatttcaaaaaagatata

SEQ ID NO: 19699 - DNA, 557 bp, Arabidopsis thaliana landsberg
tctcttttccgggtgaactatttttggagcggtggacttttttttttttattaaccgatattaattagataaaatttaggagagccattcataataatattatttatatatgttatatgatgcagttcggtatagatttttcgtgccaaattatccgttttgatatttgcactacgaaagattaaagataaagaaaagctagtgaactttctcttatcgtttcgtaatttttcttctcatcattcggttatacgtgaactttctcttatctttcgtaatttttcttctgatcattcggttagagaagatatatactatcttcgaccctcaacacagtttattaacaaaatatataaataaatcaggacttttttttttttttgctattgaaaacgtttgcaaaaacctacaaagagactacatctaaaatgtacaagagactttacatatggattggttttctaccaataaatttcgtaatactatttcaccaaaaaaaaaaattaaaacaaaaagccatagctcatttcatttcacgtagtattattcaactctta

SEQ ID NO: 19700 - DNA, 1454 bp, Arabidopsis thaliana landsberg
gtacactatctcagtgtatcgaagtctccaagcagggaaaccgaggtggctccttataggtccataaaccagtaacagatcgggtacatgcacattctcacctgccatagtattgatgatcagattcttggaaataaacttaataatgacttgaatccaatatgagagagtcaacacaaaccaacaactcttaatgcgtcattcaaatgagactctgtaaaaaagtcttcccctttgtcgtcctcaggatggctggatttcaagtatctctgaagaagtatgttggctgctttcataacagcttctttattgtctgaagatgaaatgaattctaatgcaatgcgctttccgtcaggcgcaacatccttttcaatctcctgggaaagaaaaacaaaaacattgacaaggtaaagtttatatcatgagctacataactaacaacataagctaaagatttgattcacaagtaaagcagcaaactaaatgaaaggtatgagattaatatacctctaacaacatggaacctggaacggtttcaaggatcaaatccttggatttcttcaataaacctaaagaagccaacatcagcaatcatttaatgaacgtgaaaaaacgagataagtagctaaagcatgtaccttgagagtcaaatagaccaacttgtttaaccccaatggtggttagccattgcaaaagctcaacaacattggcaacatcttgagctgcttcgatgtccactacaacagctagacaccggagtttctcaagatcgatggaaccgtactttttattcaatcctaacgttatggcatagctttctattgcctcaaatatgccagagacaatgtaccataagctcacaacaatgtgtataaaacgccatagcaaattaagaccaagatcaccaatctgtggaatacaaaaattcaacagaaacaaagttatggcttgaagactcaaattggcaacaccaaattgttcttaaacacttaattccataggccttgttgaagcattaatgagctaaagcctgtcaatgatcaaggaatacaaaaaaaaatctcacttgaccaatccaagcactgaggagccgcatcgattgattcgaatccatatatctgaaaaatcagaaaacacacaacagaatcagaagaaatttgaacaaaagggttgtcagaaatcagaattaacaaagagaagagagacgtacacaaaaagtgactgtctccgtaaacaacgaaggtgtttgctgcgtgtgttagggagatgtttccaaaccaaccaatcgaactttcctaaaacccaaaattccttttcatcggaatcggaaaaggaagaatctttggaggcgaggttagaaaaagtgagacacttctgaagatgatcttattagcctctgtatcctggctttggcgattcgtttgcttaaaccttagcaaaaaatcactctagtt

SEQ ID NO: 19701 - DNA, 1290 bp, Arabidopsis thaliana landsberg
agccgtgtaattttggtagtccatcaaacctagatgcaacctctttctactgatcttcattcattaaattatatctcaggaaggagtgattgaatatgttgaaggcgatgatgaactcgaagcagaggaagaagaagacatggaagacttctctggtcttccatctaaggagtcttaccttgaaggtgatgatcatggtaatattcatctccttcctgtttcgtacttttttcactcaataattgaatccatgcattttgtgaaactattttaacccgtgaactctctacagactcagatgacgaggatgacgatgatgctgaagaacaagttgtgattcataaaaagggaagagctttaaagaagtctgatgataatggaaaagcaaagaagaaaccaagagtagttgttgaggtgagattccacaagattgcttaaataatttgcaaggatacttttgtgtttacgatttcgatggtttcttacatatatgtatgtcttttttaggttgagcaagaagatgcagacacaagaagatccctgaaaagccttaaaatttgagaaagattgtgaaagtttttggtacttaatgatgaaaaaggtaaaaacttcttcagttgagaggcctttggttttgtagaatttctacctttatcttgtaaaagcttaatatgttcttacattttaaattataaaccattttatattcaagttacaatttagtttttgatattgttactgaaaacttgaaaacaagaggccttgtttgaatgaattttgatgtatcaattattaaaactggatgaattttttgttagatattagaaactttgaagttaaaattattagaagctttgaagtgaacattagtgtacgttttagcagatttttggatacatctatattattattttcggttttatgtcttttctattttttttaatatatacttattattgaaaaatatgaatttcatttgaagataaataaaaaaagtcaaatttacaataatcctacacagagcaaaataattggaaaatgatatatttacagtaaattaccgacttaatgtattcaacagtcagttacaaattatgaaaaatggacaattaacatatttttaccagagcacagaaaatggacaatagacattaggcagacagaaatagaaagaatctaaaatctatagataataatgattctaaatgcagaatcatagtttcatcgttctctctcacaacaaaaaaaaaaactctaaacccctaaaccaaatcaacgaagatgtcaagt

SEQ ID NO: 19702 - DNA, 2144 bp, Arabidopsis thaliana landsberg
  unsure (1)..(2144): unsure at all n locations
gcatttacctattcagggacacaattgatggtgagtgcatggaagattcacagggatccaaatgtttggtcgaacctcgaacagttcgagccagagagattcttgacatctaatagagaattggatgttggcgggcagagttacaagttttttccatttgggttgggacgaaggtcatgccccgcaatccccctaggtatgaggatggtgcactatctcctagccaggtttttgcacagctttgacttggcaagaccatcgagtcaagatgtggacatgaccgagagcaatggattggtcaatcacaaagccacccctcttgaagtcaatatcattcctaggcttcataaatctctatatgaagtggatcatatagggactgataattagtacattgttcgtggccactgagttaaacaaaannnnnnnnnnnnnnnnnnnnnnnnnnaaatttgttatgctatttgtggaagattaatttcatgaaaataagtattttgaaatatggtggttatcgtaaatttttctatcataaatttgttgaaattatcaataagttatttatattgtaaattttggggagtgaatttttgactcgagatattcaatccaatgaaaagcacatccattatcgatatagagtagagagttatcatatgatgaagtctaccacacgctgaacatatatgaaaaaaattatacactttttgaatatcctaacatgtggacatttgattataatcaccaaccaaatgtatgatcataatcacatagataaaagtcttgttctaaaaatccccgcttagtccgattaatctcggtttaatcactagactcattctatttgcctcgactaatgactaatcccttaaaaagttagttattttattatttttcgtttaatctgatttatttccgattaatttccgcctaatcttgcatatcctaactttttttagattgtaagtataaaacaatttttctttttgttattcaatcatttagttttaaaatttgtgatgttttacaaaaagtttaataaaaacataaacttttgtcttaagaatagagttttatgtatttactataattttgaaaaaaatattagattaatatgtttgaaaaacatcaaaataactctaaaataattcctattaatcttctattttaatccgatttttctattaatcgctaaattcatacacaatatctgattaacgcttagtaattttttaaacaaaggataaaagcatattattaatgcatatcccagtgtattacacgtgtttcaactaccaaccagtataaggacaaaaacttgttccttttagacacataaattatcagcaactgttaaacaacgatttttaaagatttcactattatatttcttagcttcttacataatatatgttctatctcttacaaactattaaattattaatatagttaaataacttaggggtgggattaggttcagttttttttttacaaaaactaaaatgatatagagatcgatataatttggtttggattttacgatgtttactgtttattgattttataataaataaaactgtataaaaattatatgtatttgtgttcggattggttttggttttgtttgtgttttttaaggttatttcatattttatacaaaaatatatatacttgtttactgcataatagaactttaaaagtaaaacgtagaatataaataatatatcaatcaatctgtaaataatttaaagagtagaatagaaatttagtttatatacccaaataattcaaagaatagaattcaaaattataagcccaataaaaaaaatattcttaaacacaatagaaactgaaaaatataactatatttgatcatccgaaattttcttcaaaaccaaaaaaaacattctgttttacagattttaaccaaatcaaacattaaccaaaaccttactaaaattgataatctagtagtttttaggctaactcataaccaaactaaatcatttatttcggttaagtttggttcggttttttgagttatgattcgttttgcccacccttacttttgaaccacatggtttgaacatgttttgtcataattcacatttatgcaaatctatttactaccttaattcataata

SEQ ID NO: 19703 - DNA, 696 bp, Arabidopsis thaliana landsberg
atctaaggatcgtgtacaacggctgcgagaccaccagctttttgtaaagttatcaaagtgcagcttttggcagaaaaagattggatttatgggtcatgttatttcagaggaaggtgtagctgtggatccagagaagatcacgactatcactcaatggcctagacccaaaaacgctacagagattcgtagttttcttggacttgctggttattatcggaaatttgtggaaggatttgccagcattgccaaaccactaacacaattgacatgtaaggatgccaagtttgagtggacagaagcatgtgaagaatgttttggaaagctaaaggagcatttaactcagacacctgtactagtattaccgaaggctggggtaccttatgcggtttatacggatgcatcgggaacagggttaggatgtgtacttatgcaggatggtagggtcattgcatatgcatcaaggcagttgagaaaacacgagattaatgttcctactcatgacttggagttagctgcagtggtttttgctcttaaggtttggagagcctacttgtatggggagaaggtacaagtatttactaatcataagagtctgaagaatatcttcacccaagcagatttgaatctgagacagaggacatggacataatttcttgcagaccatgatttggatattgcttaccatccaccgaaagc

SEQ ID NO: 19704 - DNA, 702 bp, Arabidopsis thaliana landsberg
aaaaaaaatctaaaagaatttcaaatgatttttagtaaacttaatattctagagtaatttgatttttatttttttttaaacgtaatgaaaatctagacactaatccataattccatatcatttgacgaaaataattgacaaaagtaataaaatattgagttgaaaagtgaatttcacttccgtcactgcacagtggtgcctctagaagcttccttcttcgaataaccaacaaacaagttcacatacaattgcgatggtcatacgaattcaattacctcgttgattatggcttcagtgagtctctcttctcaatccgaacacgttcgctttgtgcctggattcgcgtaaaattgagtttcgatctatttggtagatgtagatataccattttgtgttcgtattgcaatccatttcactggatctatcttctcattttctatctctaccagtcacgtgtgtattgatggattcgttctgtttctattgatggattcgatttttgttgttgtacttattgattcatcatctctcgtttggatttatcttgatctctgtttcttggggttgtgattctattcagcttatgtattggcttgttttgtgaggaacttataaagcatttgtaattgaggactttgcttaaatgtactttgctacaaccaaactttttagcatgaaattgttgaaatgttaactacattc

SEQ ID NO: 19705 - DNA, 1136 bp, Arabidopsis thaliana landsberg
attagtaattaataaagaatgtcttacttgtacagaatatataagtaaattcatttgtttgttatcttcgctgcaaacttggttgggtttcatctttgtgacccttggacatcagattatagttgatatatgccagctgtcagagatgcttcataccgtaaaaagagcgagtcacaatactaaaactgattcatctctctgaagaacaccattttcaaatgctactcaaatcacttgccataacggtacaaatacaagccagttcttgactagaattaggggaggtacagcccacaagttcataaactgtatctatagccgaaggattctgcaagtctgctataaagctaacaacctatgttgcacttgattgatgtgtcatcctcatacaaagccatccttacaactttaattaggacccaactaattatactgataaagtttgcagcaagttctcaatcctaaatgaacatgcaagggaacttctacaactgtataaaactatgatatatcgtatacttgggtgacaagggatcttaggaagaaagtcatgataaaataccttgaacgagaaattatcgaatgggtaattttcagagacactagtttcgaactccgcaggtccgcagggtatatcaacctgcatatacaatcattgatccaattcagggcactacacatctaaaaatttaacgtcaatatttctgacgagtaagtaaagagagtggatcagcagatattaccccctcgtcgtgatgattgctcaagcgaccactactgccacacaagctgtcaccttcactagaatcttcattctcattggttggaaaacatcgctcacccgaatagttccacgagtagcgactctggaagtaacttgtgtcaaaagcattttctgagtccggcacaaatgcagcctagaggaaacaagcaataattgccaaaataaaataaataatcaagagttcgggctttgcaaagcgtatgactttaaaagtaaaagataaatgaaattcaccttctgttgtgctagagtgttccagtctatgtctttaaagaagctgtgctgcttgacctgagtcatgatatttgtttcatcactatactacacattacaattaattaaaatcagtcgc

SEQ ID NO: 19706 - DNA, 890 bp, Arabidopsis thaliana landsberg
ctcctgctttcatatgttgctttgaggtgcgtccaagtgtagaataaggaagatttccttgtttggcttcattttgtgcggtacttgagaaggtagttcagcgggtagttcagccagtctgttagcaagtacatcagatatatgtactcgtgatatcttcgaatcattttcttggtaaatgattccttgatgacttgatgttgcctcgttaaaaacctttttaggtaaactcattgggacacatcctaggtaagggaaaaatagtgcaacggtcatatccccacaatatggtgactcggctcgctggtctttgacccttcttgaattatcattagtctttctagggttaatttgcaggtgaataattaaacctacgccttgtgcttgattgagactccgatccaattgggcaagaatcctccaaaatgatcttttttaatatgtttgatagatgtaccggctggtttggtatgctcccggtttaattagagttggatgtttgtatcaccccgtagaccaaataacgtgaaccgtcaacggcgtagcacacaaagctctcagttaccaactacattcgcgtcacgtgaaatcaaattgatgaactattcataagctctttcagaacggaaccaaatgaaacaaaggaaatgataacactagcttaatctaccaatctctttccctaaggtcggttgacacatttgattggtcatactagctcttccaaacaccaagttatctaataaaaaaatcaaagcacaagccaacacaaatcaaatctccatagaggcaacaaacattaatttcaacacacgaaaccagaattaggcaacgacaacaaaattttctacctaatgtattctataggcaacaacaacaagaaacaatca

SEQ ID NO: 19707 - DNA, 544 bp, Arabidopsis thaliana landsberg
acgccaaaccaacatactttaataaactaaacaaaaggaatcttaagattttatttttgtcgaatgaatatgaattaagaaatgtatgtggttaatgatgttcatcaacttttctaatgagagactttatggtcatgagaatgtcctttggattaaccttggacccatcatgctcttcgtgggtcaaaacccggagataacggctacaaccgctgagtactgtctttatgcacttcctattttttttaccaatactctgcttcagccgttacgagtttatctaaggtcctagcgagtgactaaaccaatgatgtggtgtactttagtagctatggtgttccatgtgccgttgaattattggcttgtgatggtgaagcattggggtgttcttggtgtggctattgcatctgttgtgacgaatttgatcatggttgtgcttttggttggttatgtttggatgagtgggatgttgcggaagagagtgagtggtgatggtgatggtgggtctactacggtggtggctcagttgtcatctatgttggag

SEQ ID NO: 19708 - DNA, 1853 bp, Arabidopsis thaliana landsberg
  unsure (1)..(1853): unsure at all n locations
gaggtctactccctctttaatctcttataatcccagagtcccaaaagtccttcatcaagttattcacaaatctcattctcttttttttttttttttttttttctttctgttcgttacatatttgtttctcttacacacaagttcctagaagaaaaagaaacttccaaaagcctattttaaaagtagaaaaccctctccccataaaccccctttctccataagaggctccaaaaaaacgagccattttttttgcctcaggggatgtagtttcttgtttaagccatgcgcaacaaaacacagacacaaacaagataattccgaaagacaaagcaaataagaaggagacgaagactgatagagaatagaataaaaattagttggaatgattatctgttttggaagttgttgttagtgttgtttcaacttcccttaacagcatccggagttggttcccaggcgtcattttcttcacttcctctttcgaccatatgaatattctcttcaccatgttgcagaactcactgcaccaccaaattaagtcaacagatatgagttttgtgtagtgattctattgactaagagataaagagtaagttacttacggccatgggtcatcaccgacaagcatcatatctccctcatcgtctgtgaacactatttcccattgattgcgactccgcagttccccttttatgtcaaacagcttctcaatgtcatctatgagctcgttgtacccctttagcgcatttaaatccacagccctgcccacaggtacgccttgcatctgcacctgttcagcgataaagaattcaggatcctgttcagtcccgcaaacattatacataatgtgtatctgttttgcaactcacagattacacaatgtatatacacttcacggtagccatgtaggcatatatataccttggtacggcttcttgtagaactgctttgcttgctttggacctcttttggtgatccctccgcaggttcctgctttttctcttctgatacttttgaaatctctgattttgggtctgagtggctgtccatagtcggtttggatatgttgattggtcgcatgggtgcagttttctcctcaggaaccgctagggaggaactcatcagatcaattccaaataatctataattagcggttgtctcaggcttcttctgctcgactggggaaaccatttggtcgttcagtgttgagtcttttgctacatttgacacagagtaagagttatttagccagtcagatttcttagcatcctcatttgcatcacgatgacattgctgaggagaactccactgtgaggtgatgcacgattgtgcaaactcatggggttgcgtcaaaacagagctccaaaggtttgaagctgttatgcctacatctaaacacagcatgtgagatttagcaaggaaacttaagctatgtactagcaaatcagtggcggttagattgtgcctcaccaagtgcagatacttcactaacttgacggggccttttgttcttcagcataactgatttgggaacgttttctgaatttacaaacggttcaatttcccatggtgaaaccttattgggtcttgaaatcgatgcaggctcatcccaatgaacctacacaaacatgtagcaaactgattgagttttcacacttaataaacactttaaaaaacatgtaaaagtggaaggaattttacttctaagcatcgccattttgagtctttccagtgaggggagcagtctttcacaccaataaccgtgccagaatatctttgtaaagaaatagatgtgtgagaatagctttggggacaaagtgcaggatacataacanagaaaaaattcagactac

SEQ ID NO: 19709 - DNA, 476 bp, Arabidopsis thaliana landsberg
  unsure (1)..(476): unsure at all n locations
tgaggttcggtgcctggaagacaagttctacgggctcgagctcaaccacatcgcctgacgctacaacgagactgtggatgagctggctaaaatagcctcggggcgaacaacggttcccccggacgtcttctctcgagacctgcatcaaccctccgtcaagatcgacgacacgcccgagcccgaggcaccctcggcccagcccgaggaaccctcggctcagtctgaggcaccctcggctcggcccaaggcaccctcagctcggcccaaggcaccctcggttcagcccgaggtaccctcagcccccgagggtgaggcactgcgcgtcgaggaggagcgacgggtgtcacgcctaatcaaaactagcagaccccgtacctgcaatatctccaccgaggagagctaccctcgaccgagccgaagctcggcggttggcgcggccganatcnngtttgtcttggtgggggatgggaaggagc

SEQ ID NO: 19710 - DNA, 366 bp, Arabidopsis thaliana landsberg
ccgaactcagtccgagacttgggattcgcggtcataaatgacctccctactaacattgagtctagctcgttagggaggtcatctttgttttgcttaactcagttttttatacgaagagtaaaccgagctcagctcgtaattcggaaaataaactagctaattcaattaaaataaacggtcccagtgacctccaaaatcaagtacttaaaaacaaaaaggcctccgtgcccaacgtaaagttaagtacttcgaacaaaaggccttcgtggccaaataaagcaaattcgagttttaaaagaaaacaagtggggtccacttcggttcaaaacaacctcattattctctctgctcggactctttttcaac

SEQ ID NO: 19711 - DNA, 538 bp, Arabidopsis thaliana landsberg
  unsure (1)..(538): unsure at all n locations
gagtttgcttataaggttggcttgagtgagattccagagtgtgatgacaagaaagaagatgagtttcnnnnnnnnnnnnnnnnnnnnnnnnnnnnnnnnnnnnnnnnnnnnnnnnnccatagcaaggtgtcggctattgtatctttgtttagacttaagacaaaaaaacgggtggtctgacaagagcttcaatgattttctagagatattgctggagatgttgccaaaggataatgtgtttcacaaatcactgtatgaggtgaagaagttattgaaatcttttgatatgggttaccagaagatccatgcatgtgtcaatgactgctgcctattcagaaagaattacaagaagncttgacagttgtcctaaatgcaacgctttaagatggaagactaacttgcacactggtgaaataaagaaaggtgtcccacaaaaagtattaggtactttccgataatcccgcgccatagagantgnttaggtctgatgaaatgccaaggattaaggtggcactttagcaacaaagcagcgatggaa

SEQ ID NO: 19712 - DNA, 434 bp, Arabidopsis thaliana landsberg
gcatggccggcccggggtgctcgttgctatataaaaaaattcagtaatatagttaattactgctttgactattacacatccatctctggtacttatatattcacatgagaatatctattccttcatcatcttttttcaattcaacaagactaatttcctacttttatgatgttatagcacaagaagaatacaaagagaaaggtagatttttgtatggagaatcaatgggaggtgcagttgctttgttgcttcacaagaaagatccttctttttggaacggggctcttctcgttgctcccatgtgtaaggtcacgtttcttctcatctctatcatcgaaaccctatatttaatcaagttaagacacaaaatttattagttttagacacaacttaattatcaacattttcattagttttgtgtgtgtgggcagata

SEQ ID NO: 19713 - DNA, 635 bp, Arabidopsis thaliana landsberg
ttagttagaccgaaaggcataaccacaaactcaaaatgtccatatctggtccgaaatgctatcttagagatatcaccatcccggattcgcacttggtgatagcctgatcgtaaatcaatctttgaaaaccaatttgctccttgaagctgatcaagtagatcgtcgatcctaggtaggggatacttgttttttatcgtgacttgatttaattgccggtagtcaatgcacaacttcatactaccatccttcttcttcacaaaaagtacaggtgcaccccaaggagatgaactaggacgaataaaccctttctcaagtaactctataagttgcttctttaactctgcaatttcctggggcctctttgggctgattaggaagccggatagctatgactacatacaatgggaattggttctcgaaactataatcaactcggattttagttggggatgtttctacaactacactgtaaaccatactcttattatcatcttctgcttcaacatgatatatgggtaccgaagagttactttaaaatccacaaaacttcaacattcgaagaacccttggaattttcaaaaagttaaatctttccctcccaaccaccaattttaagggtttccgcggaaaaatgg

SEQ ID NO: 19714 - DNA, 405 bp, Arabidopsis thaliana landsberg
aacctctagaaactctcattgtcttgtcgggagaaaaatttttttaatatgaatattgccgacaaaagtgaacgtccatttcactaagcacgtatttgtttctcaccaataaaacataattaatctaacctacgtctttttatttttcatttagttgaaattttaacaatattaataaccatatcaatacaactattgataagttatattagctagaatatttgtaattcatacttgataatcgtactagcatcagcaatatatgtcacatcatgcatctatttataatatccaaattacgtcatatgaccataatcgtatatatcgccataagatagaatgagaaacggttgcagtcttgatcaaccaaactcaaccgaattagacaacccacgagaaatctta

SEQ ID NO: 19715 - DNA, 1493 bp, Arabidopsis thaliana landsberg
aatctgttatacatgtattggtggaaaaaattttacaattttaaacataaccttaaaccaggcatacaggttatccttttctctaaagggttgtgtgcggaaaaccctactaactcatctattttgtaactttaccatccgcttctgagaaatacaaattaatcttttgaagtctataataatacgtactgtaatcttttcgcccttttttactaccatcaattttgtaaaatattgacatatagtgttaagtcgaagccctcgcgatgaagagttaaattttacctttaaaattttaaaaattcaatgtatatgtgatcgtaaaaatgtttataatatacgtataaggatcatattacgtattattttagattttataaaattaatctgcatttgttggaagtggaaactaaagtacaaaaatggatgagttagaagggttttttttgcacaaaacctttcttaaaaaaaaattaaattttaaagaaaaacgttagagaataaaaaacaagagacagggtcaaaaaatcaaacctccattgagccaaagagttaacggtttagagtggggttgcttctcagcttcgacgaagtaataaaagagactccgaccagctttgacatcgatattcgacatagcccgcaaattgtctgaatgccacttcaggttgtccaggcagctttgtcacaagatcttgtactggaaatccttcagctaaattaccattataatcgcacgaccactgcaacaccattactacgactgctacttctaggaaccgccacttacctcccaccatttctctttctctctttctttttttgtggaggctcgctctctgtgttttatgttccgctctttgtttatgtgccttgtgtacttgtattcgtaacgttatttatagacaaacacttcttctcgacgaagtttttcactctaataaataaagttacgtgtaaaataaaataatacaaaattgttgcaacattttaacaaacaaacaaagaaatatttatgaatggagaaccgacttaataagtaaaactacgtttcttgctattatttaattcccacttttctgatcagtcctatttcttttcatttttttatctcctctttatttccatttttttgatatctcaactttcgatttatatgcaatgcaactgaactaggtatcgactgaaatttcttgttttagatttattgtatatttgttttttttttctttttcttcaatgcttattaattagtggtgtattattaagctgtttcattattgttaatgtggacactttttttactgtatctgtgtgattgtttagtttgattgtggggatatttgtgttgtatttaatatgtgcttgtttagtgttgttgatacataatactccatcttatttaaaatattaaatgtttaaggtaaaagcacatatatttagatagttcaataaacaatttgtatttaatatgtggtggggggggggggggg

SEQ ID NO: 19716 - DNA, 1398 bp, Arabidopsis thaliana landsberg
aataaacatgtagagatgttgctcctcccttcctatgcgcatatctatttacttcttttttcagaagtatcaaaccaatgcaattcatagaagagctaaaacgttttttttttttttttaatgattcaatgaatgactgacaaagattttgtgactggtcttttcaaaaatcttgaacttcaacaacatagcaaggaacatagaaaataaaacagaccacccgaaacagagcaagtaaagaaaccgaacacaaaaaagcagagcacaaaactgaattttcttttatttaaggccgatagattttatggggctaatacaaaaagcccaatatgtcactgactagtatatgtggggctggattcaccacaaccgcggaaaaaagtgagagagataaattcgcacaagcaaatcggagttactatgtggaccgtgaaaccggcggcgatgccggttcaatttcatatgagacccaccgtagcaacttccgtcgcctattcacagccaccaccacataattacgacggaatccaccgtcgattcattaacgttccgacgaaatcacaaacttccgaatccgtcggcggattaggccaacaaatcctcctccgcaccgtcgattcgaacccaagaaaaccaatcccgaaggagacagagattagcggatcagacgtgctctgggcgattcagagagcgacggctcagaggaagagaacaaacgccggtaaaaagaagacgaagaatcggctcagcggtgtggagctatcatcctctgcgggcgagcccactggagataacggtgttgattacagtaacgtgacgccgttaaggatcaagagtgattggggacacagattagaggaattcgagaagcttctcaaagagtttcaaaacacggaactttgactttgacctttttcctttgccacatcacatatattaaatccacaaagtatttttctgtaaattttccaattttaatttacatgtaaattttccaatatcgttattgtgttaacgagtactctgtaaaatttacgaaaatatcggacgagcatgtaaatgattattgtcattagtaagagaccaacacactagcatgtagataattattgagcaataacgtcacttaggtacatgtgtacagactctagcctctttgtaaacttttcctggtcgacacaaatagcctttggacggagcacaatgagcatcatctgaacatatacacaaaccctccaatgcacatccatcttttactatagtcgggtttcctttgatccctaggatctgatccgtccattcgctcgagaataaaccattcggatcataactctcttttactttcaagaatgctggagcattcttgtactttttaatcactccatcaaacgctaagtt

SEQ ID NO: 19717 - DNA, 823 bp, Arabidopsis thaliana landsberg
ctaccaaagcatatttgaatgtgatggttgccaccgattaggttgtgggtttgtgtacagatgcagtaaaagaaaatgtgtctttcgactagacgtgaggtgcgcttctcttccggatccttttattcatgactgtcatccacatgatctcttcttcaacttgaccaaaggtaattgcatagggtgtggttctgatgagtgttcatcctatttcctagagtgtattaaatgcaactcctttttgggtataagatgtgcgtctttgccttttgaggcacactacaaacacgataggcatccactcattctttgccgtgatgaagatacatcaagtggcctctactggtgtgagatttgtgaatcagaattagatccaaaaacatggttttatacatgtgatttttgtacgatcactctccatgtcaactgtttactcggaaaagatatgtacatgaagccccaatacatcttcaaaataggttatcgtcatcgtaaagttgaaattgctcgcaatgatggtaactctcggctcttttgcactagatgtaaacgtcattgtatgcagaatttgatatacaagaggataggtagagaccaaagctattgtactctgaaatgctttggagctaggcttatgctagaattattttgagataatgagaagacgatgtatgatacgaagtctgagtctgaatgagccactgaaaaaatatttcaatttcgtgtggtttcatgtttgataatttgaaccagtctcttggtttctctcttatgttgtaagtaagtgttaaataataaaataaaataaaaaacgttccaccaa

SEQ ID NO: 19718 - DNA, 106 bp, Arabidopsis thaliana landsberg
ccatattaactccaaatactcttttgaattgttttgagaagttggttgttttaatcccctttcttttacaggtgctgattctggtctgaattaaattgttgccttc

SEQ ID NO: 19719 - DNA, 771 bp, Arabidopsis thaliana landsberg
gacactataattgtagcaagttgcttacaaagccacttcttttgctacaatcttattgtagcaaatttattatggtgtcttctcgatcttccaccaagttgttgtttaattattggcttcgttttctcttttgttcgaatatatatatgcctcatttttctttgttgtatattcattcaaatctttggcttctcgttttctctcttcatatctagcaacaaaaaaaaaaaatctttcatattcattctaaaatttttcatttgagtaaaccatctcttttttcttttaattctattctattatcttcttctttgtaataaaaaatgtcttcgagcaataatatagaaatcataagaaagtggatgtataatcgtattaatccacgcactggacgtgtatccgacgaatatgaagccgggttaagtcaattcatggagtttgcaaactatcgattatatgatgggggtcgaatatggtgtccatgtcgaaaatgtagaaatagagaacttatttttatacataccatatctaaacatttgtataatagagggtttcaacccaactatcatgtttggacagttcacggtgaggagtttgagcacggacaccaataatatgatcaagacgaagaaaatatattttaagcagttgaaccggaatgaaatttttaaactagttatattggagatactgtctcaacggaaaatatgtcaataccacaatcaaagtaaattattagttatatatatataataaaattgaatttaaaat

SEQ ID NO: 19720 - DNA, 959 bp, Arabidopsis thaliana landsberg
atcaaaattctcaaattattcaaattgttgatagagttttatatttgttcaagtatgcggagatattgaccaacttcgctatatttatatgaaaagaattggtttaattgactttgaaaaattgggtagtgattttgtaaaaattatgcaacataaatgatgtatttattaatttgatttttactctagttatttatttattttcggatgatgattatttttaattctgattttttttatgaacctttttttagtaagtcttctagccttcgtaatcctacttatggctatgttgttgacttatcatgtatatgcaggtaccgacttggcagaccgtcaaaacaatatgctccttggtttggacctgttataaaaatagcaagagtgtcgttaagcattttgaatatgcttaagagggaacgtagggttgctaagttttcatatgctaatgtcataaagaaaaaaatttgtgggttaaaacgataaagcttacatggacaaattatcttgcagcttttcgaagagtatcccgacaaggatatcaaaaggtgtccatttgttactggtcttgcaagtaaaatgcaggatatgaaccacacgaaatggatcatcaagaagaagaagaaaattctgcaaaagagaaagaatctgaattcgagggcaggcatagcactaatggtatccagaatgaaagctatccaagcaacaacaactcgcctcgtcaacagaatttggggagagttctgcgccgaaaaggcatggcccaagtggtatcccgaatgaaagttatgcaagcaacaacaactcgccttgtcaatagaatttgggaagagttctaaaccgaaaggcgtagcaaattgatgtcaaggatcaacgggtcattaaccatcacaaaacagatcaatgataatttttatcaaattgatctccgaggtaagtataatataagttcgagttct

SEQ ID NO: 19721 - DNA, 1716 bp, Arabidopsis thaliana landsberg
cagtgctctgaatgtcatggtaatcacattcatccaagcgcgggtatacggcgggagtgcatatgtctctctaaaggtagccatatgcctcgtaatataattagtcacgcgcatgaatggtcacacatatatacccactgtccctgtcgtactatcaagattacgctcacgcgaacaagcgagcattgtcagcatcaccgcgaaagctttaagctccacagccttgggtcacatccggcaccgccacctcaacagcagggagtaccatggctaaaagccctgctagttctggtcttcattcctgtcgtcatcactcgaagccctccatctttctctcccgtcttaccctttttaatatctcgcgacggtgaagacggagacgacgaaggctttttattcttccggctgaggattccacaaaacatacgaaccatcgagatcgtatagcaaaactcagtcacagcttataacaattaataaagagcgtttttccttgttttatgaaaaaaggatgtctatatataatacatgcatatgattgatgttcttttacttgtggatatccctcaatctctgttgactttgtaaatatataaacttacgacatattcataccctatttgcctttaaacaatacaaaagttgtggaaaaaaattctattatgcgcataacgaatgtgaccgttatttctttcaaatacataggagatccgttcaaaatctacatacctaagcaaaaatgttgagagatgaataactctcttttgactatatgttcccatatattttaaagctaattgctaatagtatattaatgtatatataatcagataaacattgtgtggtacaagtactcgtaccactttgtttgtttggtggaagcagggcgactaaaaataataaaggacccagagctgaaaaaaaaaatagttctcatttcctgtgttttgttatgcaaattcttttttggatcgtaattgtactagatttactttaaaaaaaaagagaaattttgggtggacctgtacatcagctcctccagcacatgtgtagagccgggcctgggtggaaggtaagaacaaaagaaagaaagaaaaagaatgcacgtatttaagaccattttgttacaccaagcaacagccaccaccatctaagatggtacggtaacatacgtttgaaccgttaaatcaacggctgcaaccgcagctacaattatcgcaattattcatgtatgtttatacggaattaatgttcaaacaaaaaggattttcacttaacaaacacaatcaaatctctctttcttttccttctctattaggtttaaagcatgtattttacactggaaccctagaaacagtcaagagtcattatcttttcgatcacatagatacaaattaaagaaaatctcgtgagtaacaactaacaaaggatacaatacaaatctcttgagtaacaactaacaaatatcgaaagaacaatggcgttatttcggtaaccatgaaaggtatatatgacgaagaagctaatgcccaaaaaagagataaagaattatcattatcttatatctaaagagaacctcaaatttaacatcccccacattcacctctttcttccccaccaccacattccccaccaccgtcactgtgaccaccatcacaaccgttgtcaccaccgctactgccaccacaatcaccagcaaatgctgaagtagaagct

SEQ ID NO: 19722 - DNA, 509 bp, Arabidopsis thaliana landsberg
ctatatcaaaacagaaactcagccataacataaacatacttttccgtcatataacagaaactcagacgtcggtgtaaggttaaaccataactcagtcacagcataaaacaaacttagacacggatgaattgataaatcataaatcagtcggcaaacaaacagtaacttagccgtcaaatcaaatagatctaagaaatcggccaccatatgtcaatcaacgtcgacgttaaaacccagctttaaaaaccatcgttacgcatcggaaaacgatttcagtgacgagaatcacttgagattgaacttagatgtcagagtcttacttaatggaaagatactcaccggaacttagatgtcgaatgtgacttcgcgcttacggaaatgcgactccggcgtctgaatttcggccggaacagacgagaaaagagcaaaacggcgaaagaaatcgattacgttccgtcgagagagaaagaggaagaaagcgacagtttttttttttttgggagatgatg

SEQ ID NO: 19723 - DNA, 328 bp, Arabidopsis thaliana landsberg
atatgcccgtgctcgagtggagcagcattttatgaacttagcacaagaggcaaggagtgtccgttcatacaagcaagctttcacgagacgaaggaggtacttatacaacagacaagacgatgaagcattgatggtgcgtagatttttaagaggactcaggccagagatatggggccgactacaagcagtcacatatggtagtgtcaacgagttaaccgaacgagcagttaatgtagaggagggtattgagttggagaagagtgtaaccaaaaaggaaagcgatccgtcgggagggaggaagactaataacgcggagaccaaaaacaac

SEQ ID NO: 19724 - DNA, 2230 bp, Arabidopsis thaliana landsberg
aaaacgattacgcagattaatctctcctgatctagttataggatgggttgggacagcttgataatgaaacatatgtttttaatgagaccttatgtttcacactgattgtcttttttttccttcgattcaaaaccctttagctgaggtaagtggttgctgctttagtgttttataaatcttagaccatagacatgtgtccaagattcgctttttcgtttaaattctcagatcattctgttttacctcacacatgaaaagtgaacaagtatgaaattgttgacatcttacccaaaacaatattgtaaaaaatgaacatattctcaataatagccatgcaaaacaaaaggaaaactgtaaaatagttcttaacaaaaaactgctacaagacttttaaaacacactgtttacaatttagactgagaatgtaaatacgaatttggatgattatagttaccttgctctaggaatacaacgtattgaacaaaagtaacgaacaaggtctcctagagtttgcttcataaggaaggtggacttgcaacgaactttacaacccgtgcagaaaggtcgagtagcaccattgttgggatgtatttcaacatcaggttttgggattccaagcttcatataatgtaaacttccaagtacacaattagtatggagacttagaccacactcatcacaagtatagtagcataaactcggatttgtctttgtctcacaaatatcgcaccataagtcaccggtatcgtacacagaagaaccttgacataatgacagaaaatgatcatcacatctgtgttttacctttcttggtaaagtagcgcacctcatgcataaagagtactcatcacaaaccgtacaacttaagggattatcagatatttttatgtcacaaatctgacattttctggaactttgcaaggtaaaatataagggatgttgatgcagatcatggtgaaacggttccgacactgaactacaccgaacatcatactcaaaattcgtaccttcgcaatcttcatgaagacacttatatatgaaaccatctgtatagactccacaagctctacacttaatatatggatcaagtgtcgataaaagagtgagtttatggttgtgcaataaatgtcgcttcttgcgaggaagattagcacacgcttcatgaaggatgaaatcacattccacgcatttgtagcatggatcaccgttgatagcaagaatgcaacaccgacattgcatgtaagcatcatcagtaacataattctcatccaatctgagaatatgcttttcatgacaaaaatgaacgatatctcccttttcattaattaccttgaatggatcttctatttcttcttcttcttcgggcacatcttcgagctctaacccatcccacacttctcttcttgttgcacaccttgaatgaacggcataactaggacatcgagagcattgataacctccatagacccaattaattgtcttccgacaaacgccacactctttatctccttcgccttgaccaagatgaaaagtatgagatatgcgatggtcatggcgattgatgcttatgacgcgcggtagatactcaatacaatctttgtggaccatcagattgcattcaagacatacataaggattgcggtcgtcttccacaccacaagcattacaagtaaaggtgactaacctgaacaagagggtgaggctatgcttgtggttctttggttcagaaattgtgagtggttgtcgttttgccagacatctaacatccatgcttatgttgcatatggtgcaacgagcaaaccaacgccatagctcgtctcgacaaagatagcaacagttgtcagttatgctgtcaagtggtgagagaattgtatcaaagaacaccttgagaacgtgattgcacataaatggctgacaaagtaagtggccaacgcattcttcgtgcatataagcgtcgcactccttgcagtgatagtagatgttagaggatcttcggctaggacgggagcacaataagcagtgttcaacagcacgaacaacatatgataaaggatgatcatgaaacggaaaggtgtatccttcaacatcagtagaagacatttttttacttacaaaaattaaagaacaaaaagagagaaagcagttgagtttcaatttttggccttgctagagctcctttttcataatgtaccttaattttcaggaaacttcattttagttgggtaaattt

SEQ ID NO: 19725 - DNA, 318 bp, Arabidopsis thaliana landsberg
gtttatctatgagggtaagaatttcagggctaccaaattcagatgtataggggccaaatattctttataactttaagggttcccaatccatttttactagttgtggcgtttgtttttgtttggacaagtctgttgtttctccatgggctatggaaggcatcctagagtatataaagcagagctatggcaatcctccagtgtacattcttgagaatggtctctctctttctctatatctctcgatctctccattgatgttgttgttgctgttgctgttgttgttgttgttgttgttgttgttgtctactcaattatctt

SEQ ID NO: 19726 - DNA, 1213 bp, Arabidopsis thaliana landsberg
gctatagttaagatacgattttttgttattcatgatacacctattctaaaataaatcttttttttagttaaaattaacgaaatagaatgtgtaagattgaattaaaaaataataatattaaattaactagaaaaagtgtgttgaatacgatttagaactaacatatcatagattaaaatagcatttatttcttgcaccttctgtttacacgggttttatctagttacactgttacaatagaaattaaagttcattacaaaattttgaaacattaatattaataagtttcctttttaagcaaaatttaactgaaaaacttaagagaaaaatcgagcgtttttttttagtccattttgataattgtttttcaaaacccaaaacttcaaatctcgatccctaaattatttttccattaaatacaaaaagagcaatcgaaagattcaatgatcttgactatataacaacttcaaatgttttaaccctcttaatcattcatacttgcgtacaaaacaacttcacacacattgcatacttagatttcttctactcactacacccattctcttattagactctaaacttagcaactattttaccttacctctagacattagccttagtgttacaagcaagcaagcaaacttacacaaccttaccttagccactaaccttacacaaccttaccttaacaaccccaacaacacttaactattccatcttaagtacttggctaagatttaaacccatattacacattttctctcttgggcctaactaagcttaacagcccattagtattcttagcccaaaacaacaaaataacaatcttcctcatcctctttcacttttcttatcgttgacttctcctcctttctgtagcaatcgaaagattcaaatctcttgaaagaaagaatcttgagtaagttttcttttttcggtcaaaaacaaaagaatctaaaaatagcaagttcatcgtttgatattttagagtttaacaagaagaatcttgaaagccgtcacctacagatctgaagaatattctcaaggatagagagagaaatggcgacggacttcaagtctttaccagtcatcggtactaacgaaaccctaaattcttctaaatctccttatactctctgatcaagcttcactcaaattcgatcatgacgattgtgcagacatctctcgtttacctctcaagtgtgatgatccc

SEQ ID NO: 19727 - DNA, 656 bp, Arabidopsis thaliana landsberg
tcgttggaattattttttttactttttttgcactaaaagatagattatatatgaaattatataaaggtggcgattaacaagataattccagaaactaagccgtcggataacatgaaatcttttgaaactaaagcccaagaatatggggagcttaccaacactactgctaatggagttttgttggacttatatatcagagtttattgtacaatctacaataataacatctaatggagttttttttttttgggtaaatgacatctaatggagtattgattatttaatattctagacaaaaaaaaatcaattgaatatctcgtgaatttttttaagcacggtgtatttatttagaggtttcaagatgttctattttctttaatgtatatagattataaattaaaatactaatcaataactccccttagatcttagattttttcatataagtgataacggaaagctactttgggcttgataaaatacgaaaagttacgaggttaggccacatccacgaaaagctagaaagagaggcctgccaaggcctcgtccaaacgtatactactaatcaaattagttaaaatttcattttgttaactttttaatatattcatttggtcaaagctggtagggaaaaaagtttttcacttataattttt

SEQ ID NO: 19728 - DNA, 1842 bp, Arabidopsis thaliana landsberg
gctctcctttgaaagccattttgttttttttttcggcacttgtacagatacctggaactcctcggtgatcaatcttgtgaagagaacttgatcacttataaatggaatcaaaaccatttggcaatcactcaccaaagactcccatattgttccgggaccacaatgggtcacaaagcaacctattgatggatgagccaatatcaaaggttgttgcacccatcctccccaaacaacaccacgatctttcacccgctcctcgaacccttctggtaacccttcttggaccgttgatgatcctcttggtggctttaccgctaaaagaaatggtaaacctgttagctccatccctaaacagagttcttggaattgatctttctcaagaactacttgacttcccaatgcacaaaacactacagagccttgttcaaacccgttcagccaatgactccatcgatcttccagtggtttacctttgtttggctcaggaagcattggacccgtcaagaaaacctttttatggtattgacgctcaagatactcgcagaatttaccctcgatttctttgcatgtccttatcgaaatgaaatcacaattcataagacctgtgatgagccgatgagaaaacctcttgtagtagacggagaaggacaacaaggcgtgagcatcgtgtttgcggtacaacaactttgaggaaggataaccaggtggaggaactccaagttcaccacctgggacaaagtcatgagctatagaagtagctgatatgatgttgtacaacatactcttgactctatactctttagccacttctggaacccatgaagcaatatcgaacaagatcaggtccggactcaaggcactaaccgctgcttcaacttgatcgcgtgtgagatctatagctgggggcaagaacttccacaatggcatagggatatccgagaaagtctcggctccagcggggagaccatcaacatgaggaatagtaagagagtgaaagacgatgctgtctggaaacagattgagatgttcaagctgcttctgagctttcttggggatcaagaaagtgattctgtgacctctctcagctaacttgttggctaaatgcaagtatggagtcatatgaccaaaagcgaaccatgggaacataaaggcgtgaaacgtttggcccatttttcgttcccaatattcgaaagaagatcaaacaaaaaattaaagtgccaaaagaagaaatttatgttctatttctaaattcgaatcatgagcatttttgcttagaagtaattttactttgctcttcccctcccatatgggcatctctatatttagcttctgaaactgtctgaaacgtacttgagattaattactaatagtggattagtattttaagttaattattagctgttttgatatgtggtttacgttaattattcgtggagatttggaaagtactgtgttgcatgtgtcatgtttgtttgatttacacattaatgtaatgttatttcttgacttgacaaaatacattatatgaagcatctttgtttttcttaagcatgaagaaaaaatttaagcatcttaagcaataagtgcacaacaataagaagaaatttttgttgtgtttaaaattctaagcatctatgattttcttcttttttgtactagaaatttttaagcatatgtttagcttgtgaaagtgtgtgcagttaggtaaattactagtgagttattagtattttaagtgacttataagtggttgattgattggtgatggttcaagtcaatatattttaagttagtaattgcatgtgccatgtgacttgagcaaagttgttttttgtacatata

SEQ ID NO: 19729 - DNA, 1129 bp, Arabidopsis thaliana landsberg
  unsure (1)..(1129): unsure at all n locations
actttgctcttagacttgctatagatgcactattgaatgcaacacaagaaaaaccattgacttggtccatttgtagtgacaaaaccgacgctgagcacatgttattgaacgacaaatgccttcaccgtcatnnnnnnnnnnnnnnnnnnnnncaagtgaaagtgaagcttcgtagcggaatagtgcccccgtgccttgaagatggatgcaagtctgagctcactcttgaaagttgtagcatggttttgacaccaaagctgattgagatgtggaaacgtaaaatggaggaggacttaattcccgatgctgagaaaatctactgcccatatcgaagctgctcaatgttgatgtccaaaaccgagctttcaagagaagccgaacaatccaatgtccgagcatgtatcaaatgctctgaactcttctgcattgactgcaaagtaccatggcattctgatttgtcctgtgctgattacaagagaattcactctgaacgtctggttaatgacatgatgcttaaggttctggcaaacgaccaaatgtggcgtcaatgttccgagtgtaagcacatgattgaactgactgagggttgcaatcacataacttgcaggtaaatatattgaatccgacaaagctacttcatatggatagttttatttcataatgtcttcttacattcattgtgtagatgtggatatgagttttgctacagatgtgggcacaaatggactaagtatcatgcttaccgttgccaacttatggataatgatgaagatgaagaggattataatcttcatgttgatgctgaggtcaacaatgatgatgatggtgatgacgatgaagattatgtatttgatgaagattatgaggaggatgacgatgatgacgacgatgatgatggcacaacatacagcttagaagactttcgaagagagatttcgtgaatcatcgagaccaatatatgttaatccaaagagattaaattatgtcatatgaccagagagataagagcagataaactcccagataattttaagctttaaactatttttgtaatgtgctatattattatttaagatttctatagtttgaaggtaatttacatatagtgttgatcttattaagccagttt

SEQ ID NO: 19730 - DNA, 509 bp, Arabidopsis thaliana landsberg
cccggggaccccatttcaaaacaaagcagtctttgggtcctttttttaacagcgtaatttattgtttgggaagagcggttttgtaattcggtacggttcaactgcgctacgtgcgagaaaaatgtatttgcaggacaagtgcggttagtacacaataaacggtagaaaataaaatttgactggtgaaaatactatttacggtatacaataaaatgtttgaattatatgaataatgattttttgggtaataaagaaaattttcatatatttataaattttaaatatacaaattgatataaattaacaatttctatcttttttttgtcgaaaataggattatattaatgaatttaaaaagtcaagatacaattgtttagtgagctaataggcgttgtgcgatgtattgatgataggttagccaatatcctgaacgaacggtatattctcccgttttatggtaatgcgaaacaagttggtctggtattatggttttaaggatatgcatttgt

SEQ ID NO: 19731 - DNA, 532 bp, Arabidopsis thaliana landsberg
  unsure (1)..(532): unsure at all n locations
tcaccgcgagcttccggttgttttggattgtcaagctttttctcctctgnnnnnnnnnnnnnnnnnnnnnnnnnnnnnnnnttcaaaggccaagtttgtttccttctctctttcttaccatccttctttttttctacttttactaagaatgctgaacatcaaagtaaacaaaaaaaggctgaagtttaattaagaccacgataccatgtcaagaaaatcttcaaatcttgtgttttcactatgaaggatcctcaactgaacacgccatgcagtcttgtatagcaaaacatctctagaggtatgcataaaaaatattttgctaaatgagaattctcatgaatcgtttagactgactcaaattattcttatggtaattgttcgatatgagatggttatttatagatgagaatttaagattttggttgcgtcggttttggaatatcttggagagcacgtngaaaaatcatagatacgaatcanaaaatagaatcattctcacatatttaaacgaagaatgcgaatcatttatata

SEQ ID NO: 19732 - DNA, 2944 bp, Arabidopsis thaliana landsberg
aaacaatgttagatacatcttgaaccctcccccaaacttaaattacacagtcccttgtgtaataaaaattcaaagaagaattcaagagaaataaccacacaaagcaagaaataaaagaaatgcaatgatatgtacaatgaaatggagtgatacctcaacatttagacgaagaggttctggacaaactcgtccaggcggtcttgtgtgtactcagggtcacgtgtggaggtgttggggttgttggggttgtactcggttgaccggtcgagcatgtatcccgagtagtactcctctcggcttgggtcagcgttcagaaccaactggttcactggaccggatgggcggctgttgaaacggcgatctgaaaaggtggagctcctcccgagctcgtagtttgaggctcttggcgggtcgaaacgagcgtcccttcgcggcgccacacttgttgagttacttctcctgaactcgggtcgaggtggtggtgatctctgtctttgttgcagctcctgaatctgaaccgccatgccatccgttgctctcttcatctttctcaccttcttcttcaacccactgaacaacttcctctgaagcttgcccagacctttgagcattcccaacttcttgtgaacttgaccgggatctctctctggatcggactcagcataatcctcaaagaaaaactgctccgctgcagcttcgcacgaatcttcttgtttatcaaactgttcagcttgactgaactcagcttgttcaaactcgtcctggccatactcggcctgctgaaagttactcggccgagtataagcttcctgctcggcttcttcttcattccactctgctccttcttcttgagactcacttcctaagctcggctctgcttgtagaggcgcaaggacattgactaagatcgattgaggaggatcaaagtcaatgttgttcccaatcctaatggtggtgaacttcttgcaaggtagtgctagcctagagagacctagcgtggagtgcttgaacttgaagtagagttgatccgctggagcagacctatccaagtagcacttcctcttcaaatactccatatcgatgtaggttgctgtgtgagtgggggtatgaagaggaactccagcggctattaggatgggcgtgatcactcctccagcacataagcttcctccatagccggattggtggattccggctgcgtactccctaaaaccaatcaagtgatcaatcaacaccaccgaaagggatgtatcagccctatccccttccatctctatcccattcctcgtgtgtcccaaaatgaagcataaggtgagatcaagcaacttcagctcgccctcattaacatggccggttgtcttcttcgggaagaaggcacttgcaatgcaaaggtggagatacctaagcaccgggctccttatcaacgaactcttggccctagatgacttgtaggggtgtggaccggcgattgtcaaccatagatcaaggagctcgtccttgctgaagttttggcggattccatacttggtggggaacttgaaaatagcatccaactgcctaatgggaaccgagtattgaattccaaacaccatgaatgtgatgtaaccaactcccttatgcagctctctctccctttcttcagcatagaaatggagcttcaaagtggctaggaattggcagctctcagttttgtatccttcatacttgtaggagaagaaggtctccagcttggccatctccatgaggtagtcaacatctctacatatccccaaagcttgcatggtaggtctatggggatatcttgtcccctcaaaactcagctccatgagatattggtagtgctcttctatggtaggttctttctttctcctcatggtgttccttcttctacttgtaggaactatcgggacctcttcatcaacttgcacatcttcctcagatgcttctttctctatctcaggcactccttcttctgcaactggctcggactcccagaccctcttgcctcttgctatttcctcttgagtagcggcagaacgacccacagaggactccggggccatactcggccattgtactcggcctgtcatccgagtaaaaccaggactcgcagctttctgattccttgactgattcttctcattaatcatctcaaaccctcttgctacggcttgaacagaggctctccttcttgattcttcgggattcatgatcttggggtgatttactgcaggtagtcaccacaaaataaccaaaggtaggtcaaagtagaagagaaattgatgtttaaaaatgaacaaagagtgtaagagaggctttgaaaaggtttgtaacaagagattttggcaaagtttctgagaaatctagagaagtgagagtaagaacttgaaatgtttggagagaagtagtaaaattcgaaatttttgaacaaaaagagagtgtgagtgacttagcttgttgagtgtggttttatagacaagaagatttgatactagcgctccaaacaccttagatcctcacccttcatttggtcaaggggacatgtctcactatttgctgaagaatctttgaagggctttggggagcaggatttgattggtggggccgagcaaattcgaattcaaattcgaatttgaattgtgttaacctcgcacgtgtgaactcggccgacatactcgatgcgcgtgtcgagtatagtgttgggcttgatgggattctttttctgactcggcttcaggccgagtgctgcatcttgttgggcctttgaacagtgaggcccatactcgaccttgggccgagtggtgtggtccgagtactattcaatcttgggcctttggtcgattgaagcccacactcggcctacagccgagtagtacggtcgagtgtggcctgaaattctccagaagtctttttccgtgaaacacttaaacaaaaacatcaaaaa

SEQ ID NO: 19733 - DNA, 597 bp, Arabidopsis thaliana landsberg
caagacatcgataatactcacacattctttcagatcagtctctttgtgttttgtgttatttctttaacattacactctgttacattctacaccagatgttttactgtcgcatataaataaaagtggtgcatatcttgatcttctatgtttcgaaatgtgctgcttgtggggtttcgaaatgctcctcgatttaaagcttgcattctgtcttcggtggagaggcgattcagagtggccagcctgataaaaaacgagaacttcggggttgagttcttgaatcagatacctttagaccacgactgcagaggatttggagaccttattagagcccaagtttcttttgcggagaatttgggtcgaaacttgtcttctaagccacgccaaagagcagcaacatcgttctctgagctgaggactctgttcctaaagcgatccaattcgagctcaaccttgtttacgtttgcagtgcgatggtgtctacgccggtggaggcggagagcatctattatagtgaatgtggatcgaagtccaaattcaatgaaaccgcggtctcccaaaagactgtgtagctgtcctagtgaacaccacttattaaac

SEQ ID NO: 19734 - DNA, 448 bp, Arabidopsis thaliana landsberg
  unsure (1)..(448): unsure at all n locations
aaaacaaaaatttcttaacatcggttttggagcttcgcacgagccattgaagagagtgtgtaattaagtaacatgggcttaaaaatatactagcaaaaaaaaaaaaaagagagagttatgagttccttttttgcagcatctgaaagttgagccaacagaagaaaacaaagctttcatgactttttgttatcccacacgacaaagaaaatcttttggcggtacaaggctctcaaaatcctatagatcttgatctatctatctatgatatatattcattattctttctctgaggtctcaatgaccaacaggtttttnnnnnnnnnnnnnnnnnnnnnnnnnnnnnnnnnnnnnnntcggacatccaacttggtctagcgactcttgaagaagtgtgttttaacatcgcaagataggctgaactagaaagcgcaacagcttgaagaaacat

SEQ ID NO: 19735 - DNA, 1367 bp, Arabidopsis thaliana landsberg
gttgtcaatttgtgtggccagtaaaaaaaacaaacaaacaaaacatatgtcaattaaagatgtgactttttcgaatatacatatattctagaagatgcattttcaaaaacctttcttaatttttttattatttgttaactaatatgaacaaaaatcaatataactccaacaatactctatattttgtattcaaactcaataacaaccataaacgtcgtatcagctactaaacccagcaaaaatatggattattatctagttatacttatatataggattaaggtagatggcattttactagccacaatgtctaaatatttgatggagacattaagcagccataagaaacaacagaacaactaaacgtgctagtcattagctctcttgataagtgacattgaagagtttgatcataatttccaaccgcgttagtgagggtccatcctttaacactaattccatcaaaacatcaatcatggcagtaacatccatatataatcaagtgcatgtatggtgtaccagcttcattatgctgtcaactggatttttagaatgaccgtaacacatcatatatgtattagagagaaaataatatcaaatgcatggaaatttaaataaatatggctgacatgttattgcaaatgtaagttattgcaaacgaattgacatctactatctccaccagttacaagagaatttttaccatgaaagactctttatctttgatcaatttttacttttacctgtgactagcaatgaccagagatgccacatgacatatatagagtcaaagtagatcaaacaagataaatacgtttctatgtgtagtaaagaattgatgaactaagaaaaaatagtaatggttctgagttattttgatatatttgttgaacttcaaaaagaaaaaaaaatcaggatacacaaattaaaacagagtattaacattatttaaatacaagatcgaaatagaacattttcatgtatgagagatagattgggagaatatccataatggaattgtgatattgtatatgattttgttcatatactcatagtgtgagagatttgatttaagagaacactgagaattcatgacaaacaaacagaacgcgacatgaccattctcaagcctgtggctgataggtgaagccattaacagttagacctccatcaatacaaatggtttgaccatttgaccagtaatatatgaagctgcagggagacacaagaagaccactagtgatgaaacttcattcggctctccaacgcgacgaagtgaagttctactccccaatgcctccttgaaaccaatgtcaaaaaaaaaaaaaaattggtatttgggtggtagagtttaaactgtagtggaa

SEQ ID NO: 19736 - DNA, 1257 bp, Arabidopsis thaliana landsberg
gctacaagttgttccgactctcttcaacttggcatctcttgattatgtcgtcctggagggatgctcacttttgaataactttctagatatttccaccaatatcagagcactcgcaatcgcagatacaatgttagaagaattgcctaaattaattaggctttggtatcggcttcggtttctcagtatatatggcagtgtcagagatccacatgttggtcgtgcagatatcgagaaaattccagattggattaaagatctccatgggttaatatctctgcagatatttggatgtccaaaacttagatcactgccagagctccctggctcactcgaaacactaatagctaacacttgtgaatcattggagacactagtatcttttccaactgactctcaacttgtggaactttatttccccaactgcttcaaattgggtcaagaagcacgaaaagtaattactcaacagtcatccacggcatgcctaccccgaagaacaatacctgcggagttccatcatcgagctataggaaattccttgacattccgcccaggttcatttgggtttaggatatgcgtcgtggtttcccctaaaccagagatggaagaacatattactcattactcgatgtctcgcatatgcataaacggtgtcccgactgatcaactcatacttacgggtctttgtgaaatccaaggggaacatctatgtataactcaaattgatttgtctgacgaagatcgatggcttgaaccggagaaagagatattgttggaaatcatcaccacacaccaagaagtcgacattattgaatgtggtgtccagatcttgacggatgaaacttacataacaataagaagctacgactctagaccagaacaagcctctgaagacgacgatgaaatatctctgatggagcaatgagtttgatgaactcagagtaaaaccttccaaggtctgacaaggtatcattttttcttgatttcagatgttcttttatatacttttctaaatacacgctaagacgtgagtatgtgattttttttgtatgcaattttccgttttaccccttactattcgtacggacttcaataatttacttgttcgaaaacagtgagcttgtggtgatttgataaaaaaaaggtgaatttaaaatatgtacttggaagactaaatatttaagaatctatacatgaagactttttatttttatttaggtaagttttttcttccaaagttaatatgacaaacgtgcccct

SEQ ID NO: 19737 - DNA, 472 bp, Arabidopsis thaliana landsberg
  unsure (1)..(472): unsure at all n locations
aactgcacgaaatccgaaattcacatggcttcatattcaagtgtctcttatcgaagttntgtgtctatcggtaaaggcataattgactagctatggacgagttcagtaatcttgagaaacatgaatctgaattaggagcattctttggagacttggcttttgaagaggattcatgcaggtaacattctcatgtcttttctgttcaccttaattcgagtatatatgacataagtttctgcttctctttattgttctgatttagaatgctctcctttggttctgtctcattcataaaatcgacattactctttttgttgggcagtgaggatatatcattgaaagggcttcaacaagaacttgaagaatgtgaaagtgacgaggtgagaaaaaaaaactgaaagtgaacaaagttttttccagtatcatatctactcagtttttacttactctgtacatggatagaaattttgat

SEQ ID NO: 19738 - DNA, 2509 bp, Arabidopsis thaliana landsberg
aaacccttataatccctctttcatccttacaatactttattttttatctttagaactgtcgaatcatcggaggacggtgtgggatcatcccacggtcaattacttgaccgatgttgatgtttgatatttctccgcttcttataactaaaatatgttttcttggatggatttggacctgaggactcatcatgtcaatagcaccaataatcttgtgccatcttatatatattagggctgaaaagtcaccgatttatcgcgccaaaattaatccttaaatggctagaacgaagaacacaaaactatacacatttgtctttgagatattcccttaaactttgcatttctcccaaattacagatttcacttccaaattttcaaatgatcaaatattcccttaaactttaacaaattctaacttttttaaatcgatcggtcttatctaaaatatttattttattttttcataagtttgggtattgcaaatattacactcaatctaactgccacctcatatttattacgaaagcaatttttatttttctagtagaaaagttctttctacattatatagtagaatagaaaatcactcaaattcttcttctttattatcactaaaagaaattaagcattggatggggccgggctgccagagccgtgggatccccaaccccatccccaagatccccaaggagagctaaaaccaccagaattcggacctccagggtttgaaccgccagagtttgaatcaccaggggttgaacctgggcctgaggtagaggtgctagagccatcagatccccatccccagccgttgccgtcactagaactccagctccacgcctctgcaagagaagaggagagacatgcaatggctataacaagtaggaaaaccttcttttgcgaaccagagagagccatcgtttttcttcttcttatgagttttgtttaattatagaacaaacaatacacatagcgcaagaggatggattattcgggatcatgaaggaacaacaaaagcctggggatcttcatctctggatcatgtgaacattgaaacatataacactttaatttacttttataatattgaaaagaaaaagtgaagatccggaagcaatttccgtaaaatttagaggttaataagttcttttctttaaatgaattaagttagagaaaaggcaatttggttaacgaaaatatagtgaaaatttgagagacaagtcagcaaagtacatgtgacaaatggagaatgtttcagttatttgtgaatctattttttatttattatatatagatttcattgttcatataaaagtctgagactcttaaatagttttttcaagatattatatattttaaggtaattatatatagtagttattatttatcagattctaggtatttggcctctaattatgtgtagtagagagactatataaattaaatctgtaaatatatttaaataatttaaacgttaactttcaagataatatatatagcgagacaacatgataatatttacataatacaattattcttttaaaaaaaatcctaatataaaaaagtacatatgaaataagatccacatgttttaaatgcatcagacactaagacaagttgtataaataatttttcccacaaaccaaagaagaaccaccaaaatcccaatcataatcccaattaaacaaacaaaaatgaggaaatccatctcaatagcttttgtcattgcaatcaccattttcatgtcacatcttaatgtttttacagtgtatagtttaacaccgtgtgaagaagcaacaaatcttttaacaccttgtttgaggtacctttgggctccaccagaagctaagccatcaccagaatgttgcagtggcttagataaagtgaataaaggtgttaaaacgtatgatgatcgtcatgatatgtgcatctgtttgtcgagtaaagcagcaatcacttcagccgatcatacaggtttgataatttacctaaattatgtaatgttgctttattcgcacctgttggtcccaaatttgactgtagcacgtaagttttgttatttgaaactatataaaaaatatttttgcttatactatttagttaatatattaattttatttttcatatttgagaatatttcactcatatttttctcaataatgtttttttgcagcattaaagtttaaggtgaagaaaaaaaaaggtaaagtgaagaagaagtataaatagtctcaatattgtaaagtttcgtttgtttaattttgattaataaaaacagagaagtttattctcaattaaagactttgagttcttgttgttaagatccattaatactcaaaacaaagaaatccgagcaacgggttttgttatgtgaatcaatagatctcggaaaacacttttcatattatcccatatattatttatacgtaagatccttaaaagattaaattgatatagtacttattaaattaaattctatacctttttgggaaaacattaaattgatata

SEQ ID NO: 19739 - DNA, 1318 bp, Arabidopsis thaliana landsberg
ttttcgtgtatttttttttgatgcgaaattatttttcatgattactattttgggattgattaaaaagcgattttacacctctcttttttttttttttaacgataatagatttcaaactttagatataagatgcacacaacccatatggtgattcaattaacaaaacaaaggaagagttagtgtcgaattaaaggactgaagaaaaattgaaccaaacgcatctaatcaaaattaagtttccaatttttaatggaatccgggaaatatggtgcaagtcaaataatataaaataatgttataaactcgaaattatatgataagtttttgaaaatggcaatcactaatcttcaagacaaaacattgtagtataaattcatgtttttacactataatataaaatatttccaaaaaatcacaattatagtttgttcttagtttataggataaaaatacttctcagtttggatttaaatagtgtatatatattctaaattagcaacttttaaacactaagtcaaacagatattccctctgttcctttttgtttgattgtttagaaaaaaaaatttgtttctaaaagattgattttttaagttttccatgtaatattattggttaatattagtgaattgtaattttcaaaaaaaatagttaattattattggtttagagttatagaaaactgtaaaacactaaaaataatacatttataatcaacatttaatatatttttttaatatgtgtgttttttctaaacaattaaacaaaaaagaacagaagaagtagagtgttatgcaaaattatatgaccaaacaaaaatcctgctagtttgatgatattttactatgaagtctaatatgaaaatataatttacaccaagaccatctcgggtttttaagctttgaccgtttaaatggttgtttcgtgtaacaaagcagatggctcgtctcgtggctctgccagtttttctgcaaacttttttacgcttttcttttgagcatgtgtttcaaagaccagtggtttttgtttaaagctcattctatatttattttgctgttttaatttgaatgagtaatttatagtaattgtaaggatttttttggaaggaagctaaaaaaaattatgagttaaaataaaccaatttatggatgcaaatatatatatatttttaatggaaatagatattttgtcattgttcaagcacataaaaccctaaagtttcaacagaacaaaataaggttttttcacgacaactttgaaaacaagtaaagaaagaaaacttgtaaatgtattacacattaacttacaataaatataa

SEQ ID NO: 19740 - DNA, 518 bp, Arabidopsis thaliana landsberg
  unsure (1)..(518): unsure at all n locations
tttgggtcctgggttctttgatttttttcaccttataagttcctatatccggttttatccattgataatataattagtttgtgggctttataaaatgtaaatggtattttttaggtataacatcatcttaactatagtcaaaataattcttttggatcgaaactaacaaccttaatatcaacatgaaattgtgtttattttagaggtgaaaatgcgccaaacctcttcttgtctttgaatttcggaggaccataggttctggaatgctgactcgcgtatgggaagatccatggattcccactatcctagcgcggcctgcaaagagcattcttaacataagagattctctactctatgtcaatgatttaattgaccaaaacacaaatttgtggaaattggaccgtctccaagcacnnnnnnnnnnnnnnnnnattccactcattttagggattcgcccaagtcgtacctacttgagtgatggctttagctggtctcacactaaatccggtaattatact

SEQ ID NO: 19741 - DNA, 1834 bp, Arabidopsis thaliana landsberg
aaatcaaatttctccatgaaaaagcttatagggagattcaacactggcatccacccatttggcttacatagctctctcaatcgccgatttaggtctgcaatcgtgatgtggcgtcctaagactttgacatccagacactgtaggtacaaatcgttcatcgcgtcgaggacttcctgtccaatcgtgatgatcgcttcaccttctgccctagtcagaaactcgacattcatcctcgaagcgacaaactctgcactcaatctcgtctcaggaattggaattcctccacagtagcaactttgaaccttatcgacccactacggcgaccccgttaaaccccctgccggcggccggccgttctcctccatgtgctcatcgagatctcctggattcacgaccctagcggcgctagggttttctatcgacatcgccttttcaatcttttcgattgaattatggaaacagctttctaaaaaagattttaagatttgttaatgattgagttataactacagagctaattcggtagagtcttaaagaaaatagtgttattttttttctttatttaatcaatttttcaccaactttcctaattaaaaccatttgtttctttttaaaatcaatttctttgaatgattgtttaacgatttgatttaaaaccaaagtttatgataattaattattttatgattgtaatatttaaaaatatttcctaaactatctcaaagaaatcataaatgctaaatcagttttgataatatttatctattttaattatacaaaaatatttaggaaatataataatgttatattatcacattttcagcatcaattcagattattaataaaattagattttatagttaactgtaatcatcatttgttatctctttattactatttaaatattagttgttattttataatttatttactatttagttttgaaactttgacaaatactaaaaaactaaatgaaaacttcgtaaacaaattgaattagttagcatttaaggttttttgaaaaaacaataagaataatccggtacaatatttctaattaaaaacatatgttacatttaaaaaacaacatatccggtttttgttaagtaaagtttttgtttgatattttaatatctatataaaaaatatttattgaaaggtgataatgtgattggataagtaatattttagaatataataagtattataaatccctataatataggagtataattagttttctaatttgaaatccacgtaattatgaatggtattgaataagaaaataaattaattttaaaaaaaagaaagctttttcttcccaaaatctgactgtataatttgatttttattgaaaaaatcaacggctactatgaaatgtaatggatgactaagattagaagttatgacccgttattttaaaatccgggtcaaaaggattcgcgcgttttgaaacgagtttttttcattacataaattttttaactcaatggcaaacttgttatttcttcttgatagtcttgttatttgtaaccccaaattaagataatcaaattaaattcatagattgaataataaattatgtactttattttaagaggaattaaaaaattaatatataaataatgtggacttttatgttcccatccattatccatttatatatgttttcttttgtgtgttttacacttatcacaaaaaagggtgtattgaacttagtattttgtaagattttgtggattttagatttgttgagattttaaaagacggctagtgatttggtggatttttagaagaaataaaacaaaatttaagtggtcatggaaaaaaaagt

SEQ ID NO: 19742 - DNA, 543 bp, Arabidopsis thaliana landsberg
  unsure (1)..(543): unsure at all n locations
ttctatgtttgattcttctctaacatgggaacatcgtttgataatggctgtagaaatagctggaactcttgcttatcttcactcctctgcttctataccannnnnnnnnnnnnnnnnnnnnnnnnnnnnnattcttctggatgaaaacttaactgcaaaagtagctgactttggtgcttcaaggctgataccaatggataaagaagacctcgcaactatggtgcaaggaactctaggttacctagacccagaatattacaacacagggttgctaaacgaaaagagcgatgtttatagctttggggtagtcctaatggaactgtnnnnnnnnnnnnnnnnnnnnnnnnnnnnnnnnnnnnnnnnnnnnnnnnnnnnnnnnnnnnnntttgcctcagccacgaaagagaataggttgcacgagattattgatggccaagtgatgaacgagaataatcagagggagaaccagaaagctgcaagaattgctgttgagtgtacaagattgacgggagaagaaaggccagggatgaaggaagtagctgc

SEQ ID NO: 19743 - DNA, 1060 bp, Arabidopsis thaliana landsberg
accttccatgacaacatcaagaggttaatgactattttttatatcagccctcaattgtttgtttaactctcgctggactaaagcgtaactttgtcttttatattcatcaactgcaacgtgttatgaaatcaaaaatcatatatacgtatatgaatgtcaagaggtcaattcacatttttaagccttaaaatattattggataatactatgaacattaaaaaataattttattaatcctttaaatctccaaataagattttctttttccaacaaatattctacattataacaatcaaagaatgtcgacgcttagccaaaaaaatgtatcattcatcgtaacggaaaaatctgctacgagattttttacattcataaatactcttttttcggaatatttgatttttttgataaaaataacaaatttaagaaattaattaattttgagtttattacattaaaaacaaaaattaatctcttttaaaaataatttgaccaataatataacttactgtaaaatactaatagttgaaaattgtttaatttaatattttacatagaaacttgaattgttttttttttgtcatcctctttaatttagagctcaaaatagccatttttatggtatgttgtttacataagtgagtgatgcttttcggaacagactttccgtaccgaattatccggttttatatttgcgcatcgacaaatttgtgaactcatctttgtcgctctgaaaaatctccaaatttcctaaagatgctgtccattcggttgggaaagacatcatcttcaccgggtcggaacaatctgtaaaaaatggtacatcttgcttttgtggaccaatcatacacttcatcgcccaaagaagggcttcaacttttgtatggagtggggagagacttttacagggttagcagcgcccatgcttcatgtttcttcatttgatgatgtacaaaaccatcttaatcctaaaaacttatcaatctaattccaagatccgtttacaaaacaacgaagtcctgcatacgtaatatcccgtgagatatttttcacaagactc

SEQ ID NO: 19744 - DNA, 600 bp, Arabidopsis thaliana landsberg
tgtatgactatcaaaattttattcaattagtagacttttcatgattaaaatgtaagcggtgtgagtgcattatccattggacctatctaacatataccgaaacagagcatttatccattagaaaaaagaaaaagaaaaaaagaatggcaatctctttactctgtctttttctcatcgcctttgcttcgttaatcttcctcggaaaaaagatcaaacggtctaaatggaattttcctcccagccctcctaagtttccggtcatcggaaacttacatcaacttggagaattgcctcacaggtcacttcaacgtctagccgaaaaaaccggagatgttatgcttattcacttagggtttgtccctgtaactgttatctcatcgaaagaagcagctgaagaagtgcttagaactcatgacctaaactgttgcagcaggcctaatcttgttgggacgaggctactttctcggggttttaaagatgttggttttactccatacggtgaagagtggaaggagcggcgtaagttcttggtgcgtgagtttttctctttgaaaaaggttcagtctttcggttatatcagagaggaagaatgtaactttc

SEQ ID NO: 19745 - DNA, 575 bp, Arabidopsis thaliana landsberg
  unsure (1)..(575): unsure at all n locations
tctttttattggttttgattatgggctccttaagcccaactgtcatgggctatacaagaaagacggacgttcatggattttatttggcttttcgatgtagtcactttagcttttttttatttccttaagactgaataaatggcgggttgagccaagcccttgcaatagtgcaacgcatgggagactcgtgaaagcccagatagcaagctatctaaacgggcttcctcccttaaaaaatagagttaatatcgtgtgggccgatggcccacatatcagatattaaactgataagaacagatactacacttgatcttagccaaaaggccgagaaaggtatgatttgctaagtgccatggcctcgtgctttataccactcgttttttctttcacgttcttttcttagcgatgtgggacttcgtgaacgagtgaaactaaacaactataaccctctttctcttttagcgggtttcgtaannnnnnnnnnnnnnnnntagtcttaaacctgaagccaaacaagcttncaacttttttaacctttttttgatagcaagaaaaagagagcgagtcaaataaaa

SEQ ID NO: 19746 - DNA, 359 bp, Arabidopsis thaliana landsberg
ccttgaggtgggtcagggactctgacttagaaagtgacatcttttggttgatgtgatgttacagaacgaaaaatcatagtggaagcataaaggtttaggagagagaatagtggaaaacagctgctttctactgttgttattggttatccaaaattttgcggggaacaacgtaatatattaggagacctgattacctgcaagcggaggacaatgtaatatataatgcattaggagatatgattacatgttagcggagaaattccgcggaggacaacttaatatataatacattagaagacatgattacctactagcgggagacaacataatatataatgcatttgggaacatgattacct

SEQ ID NO: 19747 - DNA, 484 bp, Arabidopsis thaliana landsberg
tgcttatttgaacttttctgggcctcggtctcaaattttgcattaagcttctgcttttcttgttcgaagctttctgactcagagagaagcttcgtatttaattctgctattttagcttcagcttccgccaataagccttcgtttgcctgaagctcgaagttcttcttttcaagagcagctgattggtcttttattttgctttctaagctctcaattatgacttcgtgttttttatcttcaaaatcttgctgcattttcaaagctttactcaacaacatactctgcatacaaacaaccttcgttagagaacatcgtcgttgttaaaaacaataaaagttaaagaaaagttgtttaccttgaaattggaatagaataaactagcgacgatgtgctcactacaggaaacacctaaattttcgtgggccaaaaacccacgaaaataagcctaaacaaacgaaaatagcatattttcgtcggcaggccg

SEQ ID NO: 19748 - DNA, 4016 bp, Arabidopsis thaliana landsberg
caatatgtttggttttcgtttcacaaattcctcgcaagtacctcgcaattttgcgagggatatatttgcaggttgtagtgaaaccaatagttggtgttaattctcatgaatatgaccacttggttttgaaaaagaatcctaaagacaaggatttgttacatgtttttgatcttgtgatcaaaaggtataaaataagcaagaaggattggagtcagggatggattgaagtggaacaagtacatgaaggtagaattaatcaattaatgagacctgcaattgaaacacttgtgtatcgcaccacaaaaaggaattcaatgtcctttggtgagaaaataggagttgtctataaaaactgtaaaattattagggtcaaagttggaaggatggtggactatttagggattgaaagagttcctgccagttctactagagaaaaaaaaaaattagcgagagatatattggtcgcaaattttgcaacgaagtagtgacattctcttatctgctccaaaaatcctcgcaattccgcgacgaatttgcgagaaaattcctcgcaagttactcacaatgtcctcacaatgtcctcgtaattgtgcgagagatatatttgcagtgaaaccaatagttggtgttaattctcatgaatatgaccacttggtttcacaaaacaatcctaaagaaaaggatctgttacatgtttttgatcttgtgatcaaagggtataaaatgagcaagaaggattggagtcaaggatggattgaagtggaacaagtacatgaaggtagaattgattgtgtaatgaaacctgcatgttgaaacacttgtgtatcgcagcagaaaaaagaaatcaatgtcctttggtgagaaaataagacttgtttatgaaaactgtgaagttcttaggtacaaagttggaaggatggaggaatatttagggatcgaacgagttccttccagttctactagagaagaagaaaaagaagaggaagaaaaaaattttgcgagggatatatttgcaggttgaagtgaaaccaatagttggtgttaattctcatgaatatgaacacttggtttaaaaaaagaatcttaaagacaagaatctgttacatgtttttcatcttgtgattaaagggtatataatgagcaaaaatgactggagacagggatggattgaagtggaacaattacatgaaggtagaattgattatgtaatgaaacttgcaattgaaacacttgtgtatcgcagcagaaaaaggaaatcaatgtcctttggtgagaaaataagacttgtctatgaaaactgtgaagttcttaggtacaaagttggaaggatggaggactatttagggttctaaagagtttctgctagttctactagagaagaagaaaaagaagaggaagaagaaaattttgcgggagatatattcctcgcaaattttgcgacgaattagcacgttctcctattggctcgcaaagtcctcgcaattctgcagcaaatttgcaaggtaccttttccatcccatatgttcctcgcaaatcgcttgttttcttttagtgaaaaggattttaaaagaattttaaagtgttgaaaaagttactgtaaggttaacactttaactgttagtaattgggcctagacctcttattttcgaaaaaacgaaccgttttagtaaaaattcattaaagcccaaaattcactaaaaagcaaaaaaaaaaaaaaaaggaaactgtgaaagtaacaaaaagtaaaaaaacaaaattaagtgaaactgtcgtctctctcactgtgtcttcttccttagaaaaatttgaagaaattctgtttctttagcaaaagaatcaattgaaggtaacaaatttgtgatactaaattttgatatttgggtttgttcgattttatttatttttgtcgtatctcttctatgttatagcaatatcttgggttttcgtttcaaaaattcctcgcaagtaccttgcaattttgcgagggatatatttacaggttgaagtgatacgaatagttggtgttaattctcatgaatatgaccactgggtttcaaaaaagaatcctaaagacaaggatctgttacatgtttttgatattgtgatcaaagggtataaaatgagcaagaaggattggagtcagggatggattaattttgcgggagatatattcccgaccaccacccggaacttaaaccagcggagcagcttgtagtggaggaacctttggccaaaccaagaagacaaatgactcgctcaaagaccaagcttctcaaccaaggtattttggactacccaagcacttggacaagaaccatgatggttgcgatatctttccaagacgattggtaatgggctaagtgttgctttggatgctctttttccctgctaaggctttgtcccattgggttttccttagtaggtttttaacgaggcctaagtaacacttccaaatcccctattatcaatcaggcccaagcccaccaagaggaccacgaatttggaaggccatgggtctatttttgttcaaattttcatttatgatttctcctcttccgagttgtcttggagcttgttccaagactaactcttcctcttctcttcttctatatttaaactcttgtatttcctcatagtaaactcatctatatttttaatctcaaactcttttaagctagatcaaaggtaaatcaaaggccatccgcatcctttgtgtgaccaatcgctccacatcctttggtttgagtgatttcaagatctcttagatgcaaagtctatcccctactcaacctcaagagtgtcgatcttagggaattcatcttaagtggtatcagagcacattctgaatttgagtactccatcctttcatcacttcatcatttcgttccattctattcatcctttcatcacctcatttcattttgtccgttcatcttctcatctgtcttttcatctttgctgtcatcttgctttaattttcataaataattggcttgcgataaaattgcgaaatcaattggaactgaatctaggacgagtctagtattttatgatattgtttctggaatttttaagcataatttgataatttattttgttcgatctagttcgtctgttcttaggaaaacgtttgatattctccttgaactagtgactggtttagtgttgtatgttggcaggaatggtgagatccaaatcacgctcgggagtgagtgctaatgaccaagtcatcatcgatgctatcatgttacaaatggagaaaataattgatgccaaacttaagccgatcaacgaccaactcaaaggaatagagcaccaagttgttactcgtatataagtagttgtagaaacgagttgagtgatcttcttggatgatcagggcaaggaacgaggatattcaaaaacaaaaactctcgtttcatgcataatgatggcaccaagtcgtaaggtgtcatgataataagccacaattagtactacgtcccatgcttcccaaagggattgaatccatttgtacgtacacgactccatttgtacgtagtacaagaatacatttgtacgtagtacaagaatccatttgtacgtagtacaagatatatgttccttcgctcataagaaaaactaggatgcattgtttgaaaatatgcttctacatctgagggatgcggaatttctccttcggttgtttgctctacatgatctcattggctccgttgtgcgcttagattgatataatctcttcaacctctctgataatggttgataacacggctttttagccctttttagctattgttttcttatgtttcagagagattttagtgtcattttagagccaagaaggggagaaacatgtattataggcgccaagaaggttttaagagtttctaagcaaaaagtatcaaaaggcaatcaattccagtacttcagaagtttaccatccgcccgaagtctttcccgtcgcgaaaacggaacatattggtatgaatggaaagctagaagagttaagattaaag

SEQ ID NO: 19749 - DNA, 737 bp, Arabidopsis thaliana landsberg
ctctcatacctaagcattgttgggtaagaatccatggatgtctatgagttatgttgtcagagattttgctatcgtctttggattggctgctgttgctgcttacttcaacaattggcttctctggcctctctactggttcgctcaaggaaccatgttctgggctctctttgtccttggccatgactggtatcaactaatcctcatgcttcatctgcctacttcaagtgttttgatctctctctatattgttaaccaagtattcatgttgtttaccttgcagcggacatggtagcttctcgaatgatccgaggctgaacagtgtggctggtcatcttcttcattcctcaattctggtcccttaccatggctggtgacttttgctttcaatcccttcaatataatacaaaccttttctctcttggtaatgaatcacttgaagaataatatcacattcttcatgacaatgtttgaattttccttgtaggaggattagccacagaactcaccaccaaaaccatggtcatgtcgagaatgacgaatcatggcatcctgtaagatgttgcactatccataatcaaacacagatgtcgaaacatggtttcattttttttattactacttagatagagagcttatgtttttgtaactgcagttgcctgaaagcatctacaagaatttggaaaagacgactcaaatgtttacgtttacactgccttttccaatgctcgcataccctt

SEQ ID NO: 19750 - DNA, 582 bp, Arabidopsis thaliana landsberg
ctaagtaactacacattgacatatgatcataaattaataatcaaaaattactattgattctttttaacggaattgttttgtaagtttgatttacgttatttatataaaaaaaacataatgcaaaagtactactgtatagttatttttatttttaataatgcaaaaatattattgtaatactttttcattcttatcaatatttttttcttatattcaattacccaccaacacctacatttcatatttctcttcacattcattgttttcttgctcttctattccttcttatcatcttcattgccaatttttcattgacattgtcatcgttactttgtatgtatgatttttgaacatttaatgtgaatcccaaccgactataggactatcaagaagttttcaaacttcttaagaaagatcttgaacctttaaagcaaatcccaaccgactatagaaccatagtcctcttccttgttgatgaagctcttcccgtgccggcgaaaatctaggccataaaagcctcttcaacatcacctagtatattgaccgtgaccatcttttcgactattgctttgtgaatgaacc

SEQ ID NO: 19751 - DNA, 354 bp, Arabidopsis thaliana landsberg
aattatattatcgtatttattttgtttttgttttttgatcttatttttttgttatatttataatactaaagtattataatatatatgtgttgacactcattattttctatatataataatattgtagcaaatggttgaaagggtagatttattaattatagtatttgagtatttttttttttttttgccaaagggtgatattatttataagaaacatattgtacaaccattcatgatacagagaacatattatacaaaccaaagacgtttaaagaaagaaattacaaagaactaagtcaagactataaacatcaaaagggagaagtctggatgctcgatgatcaatcaccagag

SEQ ID NO: 19752 - DNA, 220 bp, Arabidopsis thaliana landsberg
  unsure (1)..(220): unsure at all n locations
tgtatatcaggtctagtcaaggtaannnnnnnnnnnnnnnnnnnnnnnnntctgatatatgttgggttttcaaattgttggtcttgatgagataccttgtttaattgtagaggcaggggtgttggcatggtagcacagtcaagcatacccgctccagcggggagggcctatgactccctgtgctccgagagacacattcccactgaatggaattccccct

SEQ ID NO: 19753 - DNA, 337 bp, Arabidopsis thaliana landsberg
agcgcactatccaacattcattacaatatcactgatggaatgagtactccggttaagtgcaaaatgctccgatttacattaccattggagatggaggcaacatagaaggaatcgctaacaggtaaacaaaatctttatatatatatatatatatatatatagtgattttgattaaagcttttgtttgtgaattgtttaactaagattatttatttttcatgcagtctcaccgatccccaaccaagttactcggctgttcagggaggcaagttttggacaccccctcttggaaatacagaacaggactcatgcacattacactaggcataggaataca

SEQ ID NO: 19754 - DNA, 1256 bp, Arabidopsis thaliana landsberg
  unsure (1)..(1256): unsure at all n locations
tataatctaccgctaagcgcaaaagcataatcgagagtataagatttcccattaggaaccaagccttttcctttcatctcactaagcaattctctagcactaatggtcataccttgagcacataatccatgtattagataatcataagtaaacgaattcggttcacaatcgtataccacactcatctgatgaaatatcctaagtgcatcattgacgtgaagcgagagcacgttataacctttaaccaaacagttcaaagcaaatacatctggttcaaaaccactatccaccatttgtcgaaacaaaggtcttactgtctccatatacatatggcttgtgtaagagttgttacctctacccaacaaggctttgaagagaatatgatacgttctaatcgttggtctacattccaagttcttactagtcaccatgtgtctaaatatattcactgcgcgtatcagcttcccgactttcgtgaaatagacgatgatcgaattgtaaagagtctcgttaccaatatgacgaacagagagtacctggttcacaatatcatccatttctgtgtacgttttcgcagctccgagtttccttatcgcgatatggtaagagcaattcccgtggttgaatcttggctgttgtgatgcccagttaaagagatggaaacacaaaaacaggtcttcttcaagagttatagcatcagagagttcttcaggggtgaatcttggtggaagctttgatatcgtatcttgaaactttgattcattagggattggttttgtactcgatttctttctattgctgattctccttctaagtgaacgtgttgggactgaagttgagtattgtgtacacatggaaacagatgctaatcgacctacactttgattcaagagaaatgctctccattagaagacgtgaccaagttgatgaatcatcacagataaagagaaagaagtaccttgactagtggaagcaatcgcaatcacaggatggatgatgctcaggtcttgcagaagagaacttctggattcgaataaaaatcgaaactttgcatgagagtaagataaacccacaaacaaaaacatttaatttatcaatgatatcatcgcaaaacgtagattccgggaagatggaggattacctcgaaatggaaccttcgatttgagactgaggcagagaagaagaagtgtggaagcgagaggaagtganattagggtttgggagagagagtctagcgatgggtgagatcaaaactc

SEQ ID NO: 19755 - DNA, 204 bp, Arabidopsis thaliana landsberg
atctaaaatttaaaaccaaactaaacctcacaccaaattcatgattcaaacacacaccatattcattaatattgtaaccaaatataagattcaaattgcaccaaattctgaaaagataacaagttttgacaagttcatgagagttttaaagggggagaagtaacttaagaatgagttggagatgagataggttctgtagttgat

SEQ ID NO: 19756 - DNA, 601 bp, Arabidopsis thaliana landsberg
cacatgactcgtaaataaagagattataagtctaagaccatgtacataggtgatatatttagaatattttgagcaataaataattttttaatagattaaacaatacatttagctctgatccagtatcattgcagtgattctttggatacccactatcaggtgatgtggaggctcataattcgtcgaaatttcctaaaagcaaaaaaaataaaaaaataaatcattctacttttcgatagtctttcactgttttagctaactaattatattttttgcgaatgagtaattttgcaagctcttcgtgattattcgacataattttgcagtaattttgtaatgttatgttttctatatttatttttcgagtttgcaaataactttttttttaatgataccaatatcggtcttaccgctagaaacatatttattaccaatatcataaaaaatcgcagacaataaataaacattaaaattaatactaaaaaattgataatgatactcatagagtatcaactatgtgcatgctctatagtccctttctgaacctattttctattcttcacacatccaccgatccacgcataacacattaagtaagaga

SEQ ID NO: 19757 - DNA, 1586 bp, Arabidopsis thaliana landsberg
aagacgcatcttttattttcatcagttattaatagttacagctgttgtaatatcacttgggttgtttttaaggttccggttgatgtaaagagtactatgtttatccaaaatggttctccattattggaagatgcttttaatgtcatatataaaaatggttttgcgtggaaaagaaagaaaaaacatattagaaactgttttcttctccctctccttttgacgacaaaagaagcgactttacaaaactttttctctttggtttcacagtcgtcgacatttttcgatggattctttatatttcttagttaattttttccttctgtttctaataattatgatgggaagaatcctctctaaccaaattttgtctagatctatttttcattttggatggtgatggcttttgtggtcatgtttacaacagagtcaaataattgcaaaattcaagtgaagccattactagaattcaaataagaggattccagcccaccaatatctttcgtcacatatcatgtcaattcgattgaatcgtgagttattgtcaattataatatttgtttatggtgatctttttcatcagcgtcatctccggttctcgaccgataaatctactcctgatcaatgcatggtttgtagaaatcatttgggtatttgattcggggatcaatagacaaatatttttgatcgaaggaattggcctctatgatgacttcttttttctaaggataccatccaataatggtgacattctttttgtgccacatttgaaatgaataagttttatggaaaagaaaatcatggttactaatctacgacgatggatatggcgttacaaaagacatgatcgaggaccatttcaaacaacatataagtgtgtttgtttaatcaaggtgatacaaaaaacatttgggaatttcatctataagatgttagcatttcacgaatatataaagagaaaattttacagatttcatatgttgcgtgtaaaaccttttttttgggaaacatgattactttaatttttgaaataattactaggatagaacacaattgtatgtttattcctagaatataacacatcttttttttattactcacatgttttcagtacttgtgtaattacagttaacacccttgattagttttaattaaatattattattaaatctattgttaattaaaaataaataaaaagcaatgattatccatgtcaccaatccatgtcatttaccctgatccacgtcatccgaaaccaaaaattctcctaaaacttccagtttctcattttttcagcatgtttcactgttcatccgcgcaaaaaaaaaaaaaaaaaaacgcgctctcttctcttattcagtcgacggaacctaattttgtcgccgttctctacttatctcgtctcttccggccgaaactccttcggtggtgtcgaatttcaagtcatcaaaaatcaaaacccaaatcaaagagatctatggaattttgtatgattcgttgcaggtttaagttgaatcaagaatagctactcttttattttgattttatatgtctctcgtttaatttttctactcgatcgatcaaattaa

SEQ ID NO: 19758 - DNA, 814 bp, Arabidopsis thaliana landsberg
agccttagaaagcatgaagaaccttagttaatgttttggagtcaaatatgtttagattgcatgtgtatgattgatgataagtgtgtattttgcatgttttgagcatccatttgtcatcattttagcaccatatcatcactgttttataccatttctcatcatttgtcctcactttgcatgtttaggatagttttgcatgcatgttgcatatttgtgttgatttcaggtgatttggagctattgacgagctaactggaagaagcggacctgatcatgtcaaaccactcgaccccttggccgagtagatgcttcacgacctcaagagaccactcgaccccctagtcgagtaccaccatgagagtcactcgatcacatcactcgaccacctggtcgagtatcatcacctccaccacctgaccatcactcgatcacaccactcgaccaaaaggtcgagtatcttcatcaccgtcactcgatcactctaccaccaagccgagtaccaccatctccatcactcgacttcatactcgattgccagcttcagagtcttctccattccacactcaaccagacacttgagcacaaggaagaaaagaagactccagcttatcactcgaccattcactcgaccaccttggtcaagtaccgtttttaatccgtcccaatactgcatcgttttgagtataagggtttcggaatatttcgctataagtagcatgtactttacattttttataaaagagttttattccgtagacactgtgttcttgacgtttttgtaatccggatttctcttaatctattcagtattcag

SEQ ID NO: 19759 - DNA, 565 bp, Arabidopsis thaliana landsberg
atacatcttggttttaatgatgtactgcgatcgtgtgagtcgttgatcctactttaagttaattatttttcaattattatatctttactaaggtaaatcggtttgaattatacatattagatatttagattaatgaaatatgagtagaaaatgaaatttcaaatttgtctcaaattaaattttacgtcgctctttttcttggcaataaatgtttcgttgaatttgttttttataaatctgatttatataaaactaaattgaatcagtacacatatggggatgtagctcagatggtagagcgctcgcttagcatgcgagaggtacggggatcgataccccgcatctccattatttttattgccctctttattgattttttctttcgacagctaccattttatttactagaagaaacacgtcagggaaagtctctgttttgacatatacattatcacctttgttcatccactatgcaaataccattttggcattttccttttaaaaaggaattgtaaataataatagataagataaccatttgaaatatgtttagtacaaaaaataa

SEQ ID NO: 19760 - DNA, 865 bp, Arabidopsis thaliana landsberg
ttggatgtgatttaaaacgtcttcagattggattagttcatttttttcttgttgtggccagtctttttggggcgggcacacctattaatcttcaccttcacactctttgatttctgctaaatcacataaaagaagtaatcaatttctgaatatttatatgaactaatattccaattaaataatgagaattgcacaaatacgaaccggaaattccccaatggatttgattcgcagatgtttggatctcatagatgcccttcttgtcctcgggaggaatatattcagactttcaattccatttggaataacaacgtcttccaggttgagttcaggatttattacatccttgtaagttgctttccaagttgttgtcttgtaaaagtctactattaaggattcatatgactgaccaacactagtagctgccaacatagcatgtccacatataatttttaaattattgtactccttgcaagtacattgtttacggtcaagacagacatgatgcttccccttgaacagccccacaatttcataactccaagtgttaacttttccaactttgcttcctctgacttttgcaaggtttttcgtcaacactttatctactttttgagtaactacacatgtatactttgtgatataaccgtatttttactgcttttagctatgatttagatataggttttagagtccttttgttatttctacagtcttttcaagtctttacatgtttggaatgcatttggagattatggagcattctatggagcaaaacagacaacttaagttgcagaagcagttttgcagactaaaatccgcgtaggtgtcgaacgacaccacccctggtgtcgagcgacaccaa

SEQ ID NO: 19761 - DNA, 1423 bp, Arabidopsis thaliana landsberg
attatgtcacggttcaataattatcttgaatagtgagagcaagaccatcacttgggagtctgcaaatccacatttgtctgtttaaaatgtctgtgaatttaaacagaacaaagaaggtcataatatatttgcacttatgatttcacgaacagttcaacctcaggaatatgaactggattgattatgacatccgaaacatcaaaagcacttgtaatactaatctcacctttgtaacagaattagacaatatatgttaactaagacatgcacatatacatccaatattgactactttaaacatagttaagggaagagtgaatacctttaaaattattgattttagcatagcatatcagaaccactgtcttctcgtcatgctttacactttttaaagcactaaatactttctcagcaaacacaccccacaaagtacaagacaaaccctcattgctttaatacaataacaaacgatttcaatattacttgtttgaaaacatagttattatgaatcaaaaattatatgaaaacaatgttctacttgcctgacatctcttatttgaatctctagttttttgtttggtttgttttgagccataatatcttcccacactcaccacttgacctaatatgtctgccattgtaaagaataccctgttaatattaaaatccgtaacagacatatagtttgagttaaactaatgatagggaatttagaaaatacataccaattagaacattttcatcataactctcggtcttaaccccttcaaaatatgctagatccagaaaaacactatccgatacaggatcacatttaatcacatctgtgttatggttaaagcccattcgatagctcaaactcgatatcttgtacttgccagacgaaggactcaaagtgaaggtatcaatgatcatccaatcaccaacctttagtgacatgttaaacttgccaatataatgctttctaatggtaatctgcatcttagatccctatatcaaagccaaataaacaaaaacacataagagcatgttatatgtttcaaaccaaaatatatatatatagattcatatatgtaatcaatagcattctcttttaccttttcatcacatataatgacatctaacgtttctcctgatgaatccttggtttgcctccactgatgaagaatcttcactcggacacgccaatttgatttgaaaggcttgacatcactaagatacgttaaacgtaaaggtaaacccattgattatgtgtatagactcgagagaaagtgatgctttagaattgatgatgttggatatatatttatacggttaggacttagttataaaaccctagagcccaaccccatttttaggtatatgaaatcataaataaaaatattctctcaatagaatataggaatcttccctgattggttgt

SEQ ID NO: 19762 - DNA, 771 bp, Arabidopsis thaliana landsberg
agtccttttctgcttgctcctaccaaacaatataaattcttcaccgagtgtccgaatccattagaattttaatgatatagcctatcaatcacctcaagatggtctttgttttgtaaattccatgccgttgacttcaaccgcgtttcgccctcaccgagaagaacatgttccacctagaaaccagtgaacaggtgaaactctagtaaggggaaaaagactctagagcatttctccatttcatgtttcatattcaaaagtttaagcattcgacctcagaatcatcgtcgtccgaacagatgtctgattcatccgaatattcagcatgtctttcacccccatatgtttctccttcgcctttctctgcgcacaaaagattctcaagagctctaacgatagcaaataaaaactttaagctgataagtgataagacatgaagtaaactcacccgaacattgttttgcccttttgcttacattaacttgttcatcgtggtttaagttaccaatccctccctcgttttcttctctagctgctttttccattctctctttctctgctcgctgataagcaggaggatccgacccaccaacaactccaccagaaattataatgaactgccggaaaaaatttggaagcatctgattgtcaactctcggagccatttgtcaccagttgcataagcatcaaaacaataaaatggaaagagacttacatcgtcgtaacagaacttacataatccataaccaaagcgttttaatccttatgttacag

SEQ ID NO: 19763 - DNA, 1233 bp, Arabidopsis thaliana landsberg
ctctaacgcaacaaatctgaggccattcatatttttttctgaatgaaacacggtcgaggttgtttgttacataatatgatcgaccttaattttatataattgagataaaataacgtctacataaatgttacagatctccaaaaaaatctatctatctatctattatatgccagccttattggacaaaaggatatcaatgtcagacctaaaagtaaatgtaggggtcagaaacataaatctgaaaaactttaggggaaataaacagttgtctgaaaaaaaaaacagggctagctacaaagaaacatgggactttgtcacttgtcatcgactcactgacgttcatatttctacaaaaacaaagtaccttttacttacgtataacgtatcacacattttttttattttttttttgaacttttgattacgtatcatacacattgttccacacaaagaaaatcatcaaccattaataaatcatacaatttggattatccgggtgattttcgacgtcaaaaaatggtcacatgacaaaaatacatacaaaaacgacatagttttgagtttctagtaactttgagagaggaagggttcttcatagggaaaagagtcccagaagccatcgatgttatggttcacgttgagcaagagatcaggaagatcggagaacgcgtcgtcggagagtgctatcatagccggagatgacgtttccgtaactgtgggagatggcgacggcgaagacgtctctacatccatgtcaatggccacagcggctgcagctgcggcggcggcagcttggatgtctttagggtcggcactagctggtctagggaggtgataagcgagctccgggaagttgagatgtgcagaaccgcctttgatggctaaagctgccacgtcgtgagcacgcgcggccatctccgccgtggagaaagtaccgagccagattcttgatttcttttttggctctctgatttcggacacccattttccccattgtctcattctgacacctcgaaaatttggatgcttcgaaacaactttctcatcatcatcatctttggctcttttcttctttggtttatatttcactcttctctccgtcgtctgcgccggcgagtcctgaaatctccggcagtcgtcacgttccattaattgggatattttcttttaaaagggacttagtgtgaacgaaagagttaattttttgtgggaagatttgagagaaggaaataa

SEQ ID NO: 19764 - DNA, 1495 bp, Arabidopsis thaliana landsberg
cggctaggcgattccggacctgccaacgaacccatcaaaacacttttcaggtcccaggagtttagaaacactaagtggctcttcccttctgctccaccaaatccagtctcttgcaattgtatgattgccctttactttctgattttggtgttgttcgtttctttcttctctaggcgttgactttgatcatcgtttttgaattgattgagctgaacaaatttgcattctcctaaataattcgaacttttaggtctagtccttactataggaatgatactagtgtgtctttcttttggatttagtgctttgatgtgtgattcatttatcaaattatggcttagtcatctaaatcctccctcattggtaaatgcagtggacaaaattgagtaaagattcatactttttcatgagaaatcttatgtacttgctaaatattgtgcctttgcctcttaatttgtcttgtgcagatggtgcagtgatgccttcttggtttgacatccctgagcttcctcttactgcggtaacacttcttgttcaatactttctaaatttgtagcttcagattttctaacatagtttggggtcatcagtacttgtttagtagattttaaggtttataatgtacaaagaacaggctgctttagcttattaaggagtttgttctgttctagagatattttaagtcatcaagtaagtaagtttttatgtgttagggatctccgaaagatgaaagcagtttgcttaaagcagttaagaacgttcatgccattatagataaggagattgcaggaggaatcaatccagaaaatgtgtatatctgtggatttagccaaggaggtgatttctcttagcaccctccatagttacccattttcatggatttacaccttccaatttttctttaaactgcaaagctacaatgtgttgatttatttgtattgcgactcctgaataagattttctacaggtgcattaaccttggcgagtgttcttctttaccctaaaactattggaggaggtgcagtctttagcggatggattccattcaattcttcgatcaccaatcagtttaccgaagatgctaaaaaggttgttcattcgtttttcggtttcttgtaaagggtaaatgttgattttcctgtcactgttttttgggtatctgagtctctaaattttgcatatgcagacaccaatcttgtggtctcatggcattgatgacaagactgtactattcgaagctggtcaagcagctcttccttttcttcaacaagcgggtgtgacttgtgaattcaaggtataacaataagaactcaaatcaaacactcatatatttgctcatataacagagcagtcaacctgatcacatggaaagatcttagaaaccgattcttggaaatgtatatctaaagagagttcgtttatctgcaggcttatccgggtcttggacactcaatcagtaatgaggagctgcagtatctggagtcatggttaaaac

SEQ ID NO: 19765 - DNA, 450 bp, Arabidopsis thaliana landsberg
ctaggatacgaaaagagttaaaccgggttatacccaccaatttgaattaattgttgaattatggctcaaatctcaaacattatctttaaaaagtgctgtaaaaatatgtatatatatatatatatgtgtttatttatatataattaataattaaactttcacccgtaattacacacacaaaccaactaaattcaaaagtgttgtgactcaactaatattctaattataattccaataagtgttaaaatatatcatgaaacaaagcagaactactataattttcaaacatagtgaaaattcataataagctaagaaaataaataaagtttaatatatatatatatatatatatatatatataatttcttaaacatttaatagcataaaattaacgggtgcatgacacatgtccttacctagtatgaaatcaaattggtgagctaggatatt

SEQ ID NO: 19766 - DNA, 1060 bp, Arabidopsis thaliana landsberg
cctaaggaagttcacgtcctgaagggtcacccaatgattacctccggtttggtggataatatacaagtgatctatatctgttatccacttcttccgtgtcgggacttctcctcccataccgttaatccactgttgatacgcggtgtctttgaaagaaaacctcttcagtttgatcttgaacttattgtaatctgtaacccaataggtcgtgatccacaggtctgaatcatgacgtgttcgttgtggtatgggcatggatctcgctggagcctcagggcgaggactttcatatacgcaccaatttgctgtacaaaaataaaaccaacccagacacaacacaacattaattcaggcgtaaccaagtaaaactcagccgcaacacctaaataaatcagccattatctagtttaactcaggcagaacaataccctaacttagacataatcaactacaactctgtttgcacaccaaaataaaccagctataattcatttaactcagcctgaacaacacgataactcagccataaagtagacaaactcaaacacaatataacaataacttacttcatcacccagccatccatattttgaatctggccaggactttcttgcggtcatgataactccgtagaaatcaacctcgtctattccattgtccaacaattttttgctaccaaataataaaagaaagttaatatacacagatagtgtaagcatgtcgtacttaacaacttattaaggtataaagggccttacctgtcaggacttggcaaataatccttaagtttctgtaatttggccggatcacccggtgccataggatcatagattccttgtgaaggcagacaacccttcatcatgcagctcagcccgttgtctccaattactggaaaagtcagtggtcatttcatcaagtttaatcaatgaactcccatctggggccagcttaacactttttctcctcacagcttttactctctgcaacctcatggtttcctcctcatcttcatcagactcgagtgcagcaggcgattatctttagctaaccacggtcagta

SEQ ID NO: 19767 - DNA, 734 bp, Arabidopsis thaliana landsberg
aagaagaagtcaaagatcaaaaatgacagtcaggacacccatatgcaagaagaaatcaccataacgttttgagggttttgattccacaacgtagatcatgatttagaatcaaacaaaaactacctttctatcaaacttcatcacatgatagtcatactcttatatttaggtcatcatccattcatcaatgctaattatattgttatcaacaatgtttcataacgttaaagtaacatgaataatcaaattatgagtatgataataatagaatccatgtagctaagtggattaatcaaaaggattctttgtaacagggaggattcatttgaaagaagcttactaaacaagatcttcctgttattggcgagatttttaggattcaaaacatattggggcattactaaacatgagcttaatcatcttcctatctcacaacgctttgttaaaatagcttctctagctatatctattcttcctcaagtagcaaacaagaaacttcacactagaagcccatcacaactatcagaaactaattgtctccgtcagtccaaaccataaaacaatcggatacaaaacttaaattctttatacaatctacagagctttagttgcttcaatttccagtcaaaagaagaagcaattaccactattcaataacagaataagatcccaaaagttgatataaaaagctttcacttttagtaagaatcgcttctaagaagaacatatcatcc

SEQ ID NO: 19768 - DNA, 368 bp, Arabidopsis thaliana landsberg
gagaacaaaacagattgcatttacctgaaagtttcgactatttgccttctacttataaactattgtgctggtcagaatttccaatgaggtgtatgccttctaatttttgccctaaaaaccttgtcacgctcaaaatgacgaatagcaagctacataagttgtgggaaggagctgtggtaagttttgagaataatatatgtcattattgcaatgcttattctaattttttgatataacaataatctatttctattgatctctgtgtttaattgttgttgaatacagtcacttacatgtctaaaggaaatggatctagatggatcagtcaatctgaaagaaattccagatctttccatggctactaatct

SEQ ID NO: 19769 - DNA, 1405 bp, Arabidopsis thaliana landsberg
cgcctttaaaaaccggatgaacgtaagcattttgcaagtagcttttaaggttcaggtttggttctcttgcgctttccaatgtatctttcatcattgcttcctgtaacacgagtaaacaatacaagaatgattcatgtttggtatgattgtggaatctaaaatgtgattatggttgttagaagaaacaacaaacctgtaaagggtatctgatgaaagctggctcataacgacctttgcagaagtggtggaaaccaatggtaagcacaggcaaagcaatgagaaacggtgcagctaatgcagcgtgcttcgttcccaatagacccatcagaagcaactgtgatattaccaacgctgctatgactcgtccatgaacatatggccaaaacgctgcagcactctcgtattcttgattgtatacgtttatgatctgacagatacaacaaatatattcaagaatctgctttaaaaccagttcgatacccaattgaggaaagaaaaagaaacttacttggtggcgatatacaatgtaagcaagggcgaagaacaccaagataaaaggaagaagcatcggtgtcacaggagcgtagacaagaccaagaagaaagtagagttgtatccgaggctcacctgtattaaaaccaatgcttcccgggtccattgcttcctctctgtctttatcagtcttaaccaagaaggcgtttttgagatggaacataatcaatggtttcagcattagaatctctcctgcaactcctgcccaaccatcaaccattatatacgtgatgaagaaagttgctttcatcggtaatcgccacaccaatggttttggggatttggtttgcggattgattgaggaaagagttaagctgttcaaacgcagctccagcgataacgctagcaagaaagacgttcactaagttgaagatgtaatatcgaaacgctgctcgtctctctaaagatgagatcgatgtgaagccttcaaatttggacatgatcatcagaatggatggcagaaaggcgaggaaaagcttcagtgcaatacccggaaggaaaccttgtatcaccgatttcatgaatttactgcattaaaccaaacaagtcagtccatcattagtaattttttcaggttatctgatgtcaagaagagagagagtaaagaagaaaaactcactcatctacaataaacttcaagaacggagcagctttcacaatcccttcaatggtagcaagagattgaacaaacgcgatggggacaatgaagaagaaggttaggaagaagaaggcaacatgcatgatcaacctccttactgtcagagaaacatatcccatagcaagatttgaccaaaacacatcacaaggtatatggagcccattcggtcagccattgggttgggtttcgggtctg

SEQ ID NO: 19770 - DNA, 600 bp, Arabidopsis thaliana landsberg
tttaaaaatggagttgttgaaggactccgtcgaattattctcaacatcttcacagaagtttccttgcttgttaaacgccctgcaccaagttcttggttttgacttcacaacatcacgccaaactgccacattgtagttgtaaagcatggtcatgttagcttcaaagcttttctcattgtagctccatgccacatcccaaacatacttcttcatctctttatctttcccatgatttttcttcaggtttccataaatgtgtctcacacacattctatgctcaaccatgggcagctctaactcaacagctcgaatcaaaccctgaaaaaaaaaaaaaacgatcattaataaactaccaaaagacaatcagacactatgcttaaattaagaatgcttcttaccttttgacgatcagacactatgatataaccatcaccatccattagtcccaaatcatccttcagcttcctcacaaaccacacccaattatctatattttctacttgtacacaccgccatgctattgggtatatagcattatcagcatctctacctaaagcaacaagtagctgacctttaacctttccttatataaaggttcca

SEQ ID NO: 19771 - DNA, 728 bp, Arabidopsis thaliana landsberg
gaggggagactcttaattctgaccagtttacgttcaagtattctggcgagaaattccttgtgagagatcaggaggccgccagtcatctttggcgtaacttgatgctccccggagcggcggacttccctaatcccgacgacctggttctgaaagagggatatcagaagtttgccagatcatcacttgaggtacgcgcaggttatacgtcttcctgttgcctagtatctttgtattttggatttaaccatgattctttttccagaccgctgccctggccaacgatctgattgcgacatatgatcgcaagttgaagctgaagctcgccgacagagtggccttcgataacctgaagaagtgcgctgaccaggccaaagccatctatgccaaagacatgaaggaaatggcagcattgagagatgctgccgagattcataaggcagagctgagctcgttgaacgacgaggtgaagcggctcaacggtcgagaagctgatcttcagaaagagatcagcgatcttcaagtcgcgttggttgccgtgaaagagcatggggagagggagtgcaacaggctgcggaatgaccgagcttctaaagtcgcccgtacacaaagaaagccaagctcgtcttgatagagtgaaggcttatctcaaggagcaagaggacgtcgtcgggctgaaagtggacgctgagaatcaagctaaagagctgaggagatagtgggtatctgat

SEQ ID NO: 19772 - DNA, 605 bp, Arabidopsis thaliana landsberg
tgacgtgttttagttagctttaaatacctttttgttttctttaatgttatctttaataaaaacactttttatatttgtcgtcacatattttgttttctattgcatttggttagatactttttaaaaaaatttcgataagttaaatgaaattgaaaaaaaaatcaaatcacatgccttgcaccaactggtattggagagggaacattgtttccttgagttatatgtgaaatctggacaagaagaaacaagaaaatatttaacaatcgacagctacaaacttgagaagctctcctccaagtcatcatcattcagtgccgtgtgaatggaaaatctgcacgaggaagaacaaacaaagagtcaacaccttcatcttggttatcaattggactagacacgataagatgaataataccgatgcggtttttggttggatctatcgaacagagatggttgtgagaggaaggatctttcgcagcagaccgcctctaagaaattatgtttcagaaaccaagaaaaaaaggacaaggttctaaatcacatgtcctttttcatacttaaatgatgacaatgaaaagtctctttcagcttttaagatgatgaaaaaa

SEQ ID NO: 19773 - DNA, 988 bp, Arabidopsis thaliana landsberg
gatgaggcgatcaaagagtttgattttcattagaaacgaagaggacccttgcgtttactagaagactagtgcgagcgcgattgcatttctcgtattgtatgtagatgacatactgctcattggaaatgacattcctttacttcagtctgttgagacttggctatgaagttgtttttcaatgaaagacatgagagaagctgcatatatttttggaattcggatctatagagatagaccaaactgaataattggactaagtcaagaaacttatatagataaggtcttgcacatgtttagcatgcattattctaagaaagccttcttacccatgtctcatggcataactctcatcaatactcagtgtccttcaacacataatgagcgagagcggatgagtaaaatcccatatgcttttgatattggttctatcatatatgcgatgctttatactcgtccagatgaggtttgtgctttaagcatgacgagtagataccaatctgatccaggtgaaagtcactggacaactgtcaagaatatccttagggatttgagaaagactaaggataagttcttggtttatggaggaaatgatgagcttgttgtgagtggttacactgatgccagctttcagacagacaaagatgatttctgatctcaatctggatttatcttttgtcttaatggaggagcggtgagttggaaaagcttcaagcaaagcactatggcagactcaacaaccgaagttgaatatattagtgcttctgaagcagcaaaagaagttgtttggattaggaagttcattgctgaaattggtgtgattcctagcatttctggtctggtggatctttattgtgacaataatggagccatcgctcaggcgaaagaacccagatcgcaccagaaatccaaacacattctaagacgatatcacctcattcgtgatattgttgatagaggagatgtaaaattagaagagtttcaaccgtaa

SEQ ID NO: 19774 - DNA, 1833 bp, Arabidopsis thaliana landsberg
tattggtttaaccaaaagaagaaatcagtttcagattaacagaaggatcagaagactcttcccgaattagagggtttgactttgtctctgttataaatagtcttcttcttcctttgttcgttgtaacagaaaattcttatctcaattcttctcctttgtaacacgatcttgagctttgggttttgagcttgagtaaacattgattcatagtggattgttggattgaatctggccctagacgtaggatcatcacaccggtgatctgaactgggtaaacaatcgtgtgttcgtttttgttctttgtttgattgcgttcttgatcgatctattgagtgttccgcgaattgaagcttgatcgagttgtgttgtgttgaatcgatctttgagtcatcgaattgtaacaagtcaattgtttaaatcgttatataaatgctattattacatatagtattggaatgaccgatattatgacacaaactgtcttgttaaacaagtgtacagactgagagacttatgtacgttattctagaagccagggttagcttcaggggtattgaattggatgaacatataggttagaacgttaacactattagggaacaatgagatcacggattaaaaacagattaaaagtacattagctagattatctatcatcgttaatccattacgcacaaatcaaaaaggacatttaatcgtgttcaacattacactcttttgaaatgacattgaatcgtgttcaacattaaacattttgaacctcaaatcctcaagctcttccaccctacactcatcagtccatttaaacgagtgatgccgccgtctctgaaaaaaaaaaaaaatcatcccaaatttacagaaataattaaaaagatctgagaattgaaattacctcggcagatccattagaaaaagaatgaaataatctccccggattagaagccgtctttgacgtacccatccttatagcttcaccgcatcgacatctagttgggaatcttcttccttgatcacccatcacacttagtttccagtgttgctatgcgaagaacacctaccctttccaataagagcttttattacgaaaacactactaactgagaattatttggaaataaaagtggagaacaaatctctttaagcagtctttctcaaacaatggtttaatgtttttttatttaaattgtggagaggtccgttaaacccattggacaatatgaagtgcttagaaattgtttattgtttatgtttgctaatgatcaggtttttgtgttttccaaagtttgttggactattacactaaatacggtgcataatttgtgttcaaacgaggattatatgctgtcgaaagagtaggaagatgtaagtgggtgatttgacataacagtgggacaatttctgtacgctgtcatccatgtggagactgaaattgaataaggattaattaaatataataacagtgtttcgttgatctcttcatcacccttgaagataatccttttatgactctgttttgttatttaaatgtttttctcatctcataccagtcaacttctgtaggatattcagtttgaactaacccttctattgctctcttcttgtggtcaaaagttctcttcagcttgctgagttgagaagtatactcttggtggggttccagtatatgtttcttcatcaacatccatgtcctgaatcccaaatttctgatctcatgttattgatttcccttaagctttactgatgtcaaatctcatcttgataccattttcaaggtttagatcaattttttcattccttacatctatgactgctccagctgaagttcagaagggc

SEQ ID NO: 19775 - DNA, 552 bp, Arabidopsis thaliana landsberg
atgatgaagtggagcctcatcattgttcactccttccattggcacggcttcatcacctgaagtatagaggttctttactggtgggcaaaactcaatgttgccaccatctctcatcgaagtggaagcggggttagggaggagaaaaatagattgtcctgctgcagggtgatcgaacttatacttatataggccattcttctgttgcgaccaaaaactcttggaattgatgaggtgctgcatatcaatccatctaggaggaatcaattttgaatgcatatgtacattgcatgctctcaaaattggggtcgagaaatcctcccacaaccattcttcatggtttcttaagtcccttagcccatcctctatagatgaacagatgttcgattaggtagaacgaaaatgaagcatctgtgtgatctcctgcaagaacggtaccatctgacgctaaacccaatagctcttgcagcgatgtctccatcaactctagctctccattgacaaaggtctcattcctctctcttgcaatagtgcactggctaaagacctatgaaa

SEQ ID NO: 19776 - DNA, 658 bp, Arabidopsis thaliana landsberg
ttaaagaagaatctaacccgaaaattctcgtcaacacattcgatttgctggagccagagttcttttagctattccgaatatagaaatgggggcagttggtcctttacttcctgcggagattttcactggaagcgaatcaggtaaagatttatcaagagatcatcaaagtagtagttatacactttggttagactcgaaaacagagtcctctgttatttatgtttcttttggaacaatggttgagttgtcgaagaaacagatagaggaactagcgagagcactcatagaagggggaagaccgttcttgtgggttataactgataaactcaacagagaagcgaaaatagaaggagaagaagagacagagattgagaagatagctggttttagacacgagcttgaagaggttgggatgattgtctcgtggtgttcgcagatagaggttttgagacaccgagccataggttgttttttgactcattgtgggtggagctcatcactggagagtttggttctcggcgttccagtggtggcgtttccgatgtggtcggatcagccagcaaatgcgaagcttttggaagaaatatggaagacaggtgtgagggtgagagagaactcggaaggtttagtagagagaggagagataatgcggtgtttg

SEQ ID NO: 19777 - DNA, 627 bp, Arabidopsis thaliana landsberg
tatgacttcttcgtctattagtttattcgacgatatcatagaacaatgctttgatcatttatttgatcaacaattcaataatatattctattttttttcacatctattttaaaatatttcaaaataatgtatgcttaatattttgttaattacaatgattattaaattttatgaaataaagaaataaaataattttcaaataatattttttcttcttctgggaacttcattaagagaactatcattggagtatgaaaaaaaaagaaaaaactaaagctttcttctaacaatttaaaaaaaaattatacttagaaaatggagagaaatcatggaggctctctccatccgagatgcttttagattctaacttcgaaaactcttgaaaagatcaccacatgcaagtgcgtggcaacgactctacaagtcgagcaagcttcttgactttgtacctttggtttaatgccggcaaataaaaagagttcattacaattacggttgcaattaattaattggttatcaaatacttgattaaataaattagtcactacaataaatttgatcattattgaactaattaaattataaactgtttggaacaaagatttttaaaatatattatatatatat

SEQ ID NO: 19778 - DNA, 503 bp, Arabidopsis thaliana landsberg
ctagtatttcctctattggtacttgaattctgattttttttaccttccctttcgaggtggtttaacagtatgccagttgagatgtaccaacaccaaattcttatactttttttcttttaaccttgaattcagtattttaaacgaaactatgggaatgtgtttgagacggattttcattaaggacaatgcaaataattatgagatgctcagaattgttgtatatatcaaaaagccaacacctatagttatatatataactttcttcgatttaaaaacaataagtcgctttggccgagtggttaaggcgtgtgcctgctaagtacatgggctctgcccgcgagagttcgaatctctcaggcgacgttatccttttcgttttttcgtctattattaaaccgacttacatagacactgcgtataagacaattgattcctttttttttttgttaatcctatcaaccctagaaaaagcttcacgcccgatttctttttttcccagaaaa

SEQ ID NO: 19779 - DNA, 657 bp, Arabidopsis thaliana landsberg
cataaacacaagttacacaacctttttttttttcatctaacaccaattatattaagttatcggaaagacactctccgctagagagaccatttcaagaaccgatgtgtttgcatgggagaaaaagctattacgagtctgaactttcttagctaaacaatctgctcgagtattagaactacgaagaagaaatctaatacgaaaagaaggaaaaaacaaactaaggagcgatagtatgccaattccgctgcgaatgtcggccaatcttcttgattgtcaatgataaaaatcagatctgaacagtcggaagcaaaagcgccagaagtatcgtcaatatagatcatgtattccattgtctatagcaagaaatcaaattccgcatgaaacaataataaacttcgtcgagtactcttgagggaacaaggacctaaccatgtcctataaacacataaaaatatcgtactacataacttgtatctgtaaaactaatgtaaggaaaatgtcttttatgtcctattctcgaatctgcttgaatagtaaagaccaaactaactaacatgcaggaaatagaaacacaacgtcggtaactttacaatttgaagtgaatgtttcttaaaatcacttacccaagttaaaattttggatgtttaaaaaaaaaaa

SEQ ID NO: 19780 - DNA, 2941 bp, Arabidopsis thaliana landsberg
  unsure (1)..(2941): unsure at all n locations
acccaaaatataccttgtgaaactcgagggtatcatcgccggttttcctaagctctaccacgtgcaacgatggtgccacttcaaacacctattataaccgataaccaaaccaaaataatcaggtaccggccgtattcatgaaaatctaaaaccgtactaaaccggaatgttatcattcctatctgtttttgttcataactctgtagctacagagtgctgacctttacgagttacgaccacttttgtctgcgaaatttacttaaacaatgtttaacaaagacacaacaacattaattgacacagagaaatcaagaagaagaagaagaagaagaagaacaaaccttgtagttgtcttgttgaaatcatgaatccttgattaaatttctataagaagaaaagtttcagtgagaagaagatcatagcaaagatgagaagagcaagtcaaagaagatattgggcttgttgtcttgtaataagtaattgggctaattgctatgttagtcccatataagtaaagtgttgtttaagtaagtcaagtctaggttagagtagttgttgttagagttccaatacaagtaggagggttgtgtaagagtgcctagaactaggagaagtagtacatgtatgtgttgtgttgtaagaaatcatcaatatcatgaatgtagtcttttattaaagagtaaaaacgagttcttgtgtttgtctctaaacaaaaacaaaacagagtgaaacaaagacagagatagagagaaagtgtagaaacacaacatgtgtttactgatattgaagccattcatcttctagtaactctgcaatacttatactctgcatttcagaaatactgtattactttattttgcttaaatttagaaataattctaagaagactggccccgttctcacattgtattttcagataacatttttatcgaggatattaacaaaacacgctatcatataacactagtatggactcaaatttgtagttgtatcataagtcataacaaaaaaaaaacagcttaaacgaaaactaacgtcaatagcttttactgtatccaacaatatctcacactaaacctacaaaattctttttttttttttctctccgaagaatcttactcagagatttaagccgtgagttggccaaaacactagtgacatatattcacgttcaaaagtttatcttgcaaatcttggatttcttagtttcattatcagattaaaacagaatttcaataatgaggaaaaagcatacctactactagtctactactttctgcaacaacaaaacaaaaaaactaaaaccaagaaaagccccaaaagattaccacaaattaaggaaacttaaagcccattgacttcaatatctcaacacagctgtgacttttatcaaccttgtccttgtcttccttaaccttgtcaccggagtttcgaagcagagcttcaatgatttctttaaaaggtataatctcttctttctctttctctttcttcttctttcttccatcttctttccatttcccagcaccccattcgtacgacggctccatccacggcggcaacactctcctcgctgctgcttcaccggcgactgttgatgtggaacctaatttcttgtccgaaaccctagtttcaatctcttttggtggattcaatctcgcatcgtcagactctggtgaagtgggaacagaaaccattacgattccttcttccggattcacgggaggagataaatgccaatcttctaaaatctctgaactctctgtatctgaacgtttctccattctaaaaagcttcggaattcgaaatcggcgaaactgttaaaaaggaagagactttctgcttttctgtttgatttgacacaattcagtaaacttgtttagtatcggacctttttgggctttatgagctctaaaattaaaatgccttatggactgttttgatttgaaagattagagacaattcagagaacttgtttattgttggacctttatgggctttaaaggaaaatatgttatgggctttaacggaatatactttatgggaaagattaaagacaatccagagcatttgtttgatattggacctttttgggcttttaagttggatcttttggacccaattcagatttgttttataatttgggcattcacttcattcacttaatgatattgattatttttttgttaagtacagatttatcatttttttttctcagatttatcatttttaatgactcttgaaatcttgtacccaaatttttttaatagaatcttaaaatacatgaccttatatcagtattagatttaaattttctttgaaaagttgagaaaccaatgacggtattaatctattttgaaaacacatggatttttttctatatatttatatannnnnnnnnnnnnnnnnnnnnnnnnnnnnnnnnnnnnnnnnnnnnnnnnnnnnnnnnnnnnnnnnnnntcatttgaagtatgataaaaaaaaattgatacacccaaattacactaattaatatcatcaatacacaacacatataacaaataaatatagaaaagatttacgctttcaaaaacgagaaccatatgcactattattatttttcttcaaactaaatctcattagagattgtcatttttgcctatcatattcatatattggatgaaactccaaagttatctaatcttgacaatgatactcgatatcctctctaggagtacgaatgatgacgtgatttcatgagaagagagaaaatacaaatcaatacaaagatttgtttctggactagcttgagataattgagatcgactcatcacatttcatatcagaatggattgcaaataaatatctacttcattaatgagctgatgataattaatacataggaaaagaaaattttaaattcacgaactacaaggataataacacatgcctttttaattta

SEQ ID NO: 19781 - DNA, 557 bp, Arabidopsis thaliana landsberg
  unsure (1)..(557): unsure at all n locations
ggattatacttttcttgtaaattattcaggtgggtttaatgcttagaggaatggggttcaacaaaagcacatatattttcctcgcgtctggtgaaatatatgatgcgaatcgaactatggccccgctactagagatgttcccaaatttacaaactaaggagatgcttgcatcagaggaggaacttgctccatataaggtttgcttctttcctggtgtttgttccagagtatatttctcgtgatgaatgataaatctgacttgaaactctgtgttcagaatttctcttccagaatggctgcaatagattacacggtctgtctccacagtgaggtatttgtgaccacgcaaggtggaaactttcctcatttcctcatgggtcatcggagatatatgtttggaggacattccaagaccattagaccagacaagcgaaagttagcaatcctctttgacaatccaaacatcngggtactcacttcttctactcctcgtctttgataaacccctcccaaatctccacatgaataaaatttgaattgttacctttttattcacc

SEQ ID NO: 19782 - DNA, 128 bp, Arabidopsis thaliana landsberg
aaaaaaaagcccccccccccccccctttttttttttataaaaaggctcccccccccccgaagttttttttttttttttttgggggggggggggtttttttttttttttttttaaaaaaaaaaaaaaaa

SEQ ID NO: 19783 - DNA, 964 bp, Arabidopsis thaliana landsberg
tgtggcgacaaattaatgtgttactctggaaatttatacgattatgcaatatgataagaagtattttatgtgacatgattttatttgtttaatcattgagcctcctatgacaaaatttataagttcctagaaggccaaaactttagtagtcaataatttacttcaaatggtatcgaaaccagatgaatggtcggctcttgcctcagaatgggaagacatgacaagataactagataagcctttagacttgctatgatccttgacaaaaacaaaacaaaacagaaattgttcatttaagtcaataaaaaggcaatttctacaagtgaacccttattggaaagattatttggtagaattggtctggtcatttccaacatacgtttattagataataacggataggcggatcatataagatagagttgtcaaatcggggtgtccatgtccattagcccaatccaataatgtctattttgatattggacgaacatagtccgtatccattaacacctttgtccaatccaataatgtccattttaatattcgatttttcctcaaatcgatttaacctaacattataagactattgggccgcccatgtccatcatatctactctgctaaagttcatatccgttaacgactataaccattaaagcccgttttataatggctttatccatgactcggtccattaagtattggacgcaggcagcccacgggccgcacgcccattttgacaactctaatataagataagtgtttgttggtgtcaattatttttgttaaattactgaatgtagctgaatttgtcgaaaaaattatataggaaatggtgttaaatgaattcctagttcaatgattcttttttattattgtttagacaaaatattttcatatggtttagtggatttatttttctgtatcaaaaaaaaatgaaaaatgtaaaactaaacccaaaaaaag

SEQ ID NO: 19784 - DNA, 865 bp, Arabidopsis thaliana landsberg
  unsure (1)..(865): unsure at all n locations
tatataatttaatataaatattatgtggtatttaaaactaaaaccaaatatataatacacgcatcgcatggacaacttctagttaaaaataaattttagttttgtggtatttttggaaaatcaaaacttacagtgatatttctaagaattgcgtaagcggcaaaaaacacaaactttgacgtgtttgttttatttgcgggactttgcctcatagtggtccaccccacttaccaaaaaaatccatgaaacatacttattttcataagtatttttttaaaaatccacttatataagtatctaaaaaatctgataaatccacttatataagtataaatcgtcaaattaacaacgcttatttttataatttaaaacaaaaatcaagattagaaagcagtcgacgaacccccacacaattattctgattcatgtccggcggctagaattttttttgttttaaaaagattaatgagaaattgtaatactttacatatacatatgaagtacgaacagtacaagcttgttcccatctctttctttcttctttcctctttctctctcagtctcttcttatctccctctcttctcaatcgtttggtctctttgagaattgagattctttctggtttgtcccgagaagaaaaagaagagaaatgggtttctttttctcgacccggaaaggtcttcttctcatcatcttcatttgcttggatattttcggatcaaatgctcaacttttgccagaagatgaaggtttgtattaccttcctttntcttatatttacattgcaattaactttcttcaattttactctaatttctaagaaaattcattctatgcttccttcttgatttaaacaaaaagaaa

SEQ ID NO: 19785 - DNA, 1287 bp, Arabidopsis thaliana landsberg
catgatttcaactctcaatgaaagcaccaattgataagacccaaaatgggctatcaagttaagtaacaaaaaggagatgagatagtagaagaattagagatgggaagcagaagattcagagaaggaaaggaagaagaagagatgagatgaagaagataaacttttttttgttcataatcgataagtgtttcagaaacaaaagctaatgttaaatagaagaactaaagaaaacaagctttaaacaataagccataaacgatagcccattaggcccaaatcataatctatcaggtaccttgatctcccatctaaaatcttcaccattacaacactcgttaagctgtcattgggaagagaatgttgcatctcaagttttcctttcgatatatctctcccagcgctaaaggttctcgctgcttgtcctgcacttgagtacttaaccatacatcaaaggtatcattcaaaaacaccacaagtcatatccagcagtctgttgtctaatatcaacataattatgccgcgtattcttggattattacgcttgacacactaagcgttgtcgacctccactactctgattatactctgccggggtctctgcattgtaatttggattcacttgccaaagttacactggacattactttcgcaaaaaaatcaaatgggctgctggtttacggggatgtggaatctcatcagcgggatacgcaacgtcaagaccctgcacctgacttcttctactgtcgaggtcagttttagtgtatgctctcatcctcttttgcctataaacaagaaaaatattctttgtgtgtatatttcaggtgattttagtatgctgcaaaggtggactacctgttgtcaacaacctccttgagttattgttttcgagttaaaaaaaaggttttaggaagcttctgccacttatgctgagcgttctccaaacctaaaactctggttctctcggtatgaagcaaacccttgacaaatcttacttaataatatgactggcattacattaaagtagtttctcttcttgatgtttcagggtctgcatcgttacatatttaaaagaaatcggtttgtggggattcatattcccacaaataaccaagtaaagatattgagtatcatgcattatcaagggagtgcacacgtgctgaaacagattagccatttcttactggaaatggagtgtcttgaagttgtgaaagttgtcatctccaatggatgaccccccaaaggtgccactcaccaaggatctattggaacttgcccccgcttcaccca

SEQ ID NO: 19786 - DNA, 621 bp, Arabidopsis thaliana landsberg
  unsure (1)..(621): unsure at all n locations
aatatatatcagccgcttcatcaatctgttgcaactcacaaacattaattatactcgaagcatttctattgtacaaaaacatttaacagagaagtcttatgtttagatagttaccatcttgttgaagtagatgacactttattttgaagcatttgtgaatgtttctttgactgattcatggtatcaagtagtgagagcagagcaagtgagcgagatgattcaagaagcaccaattgctgtcattgtgatcattgaactgactacttggccacagcagtgagacgacacagtcatatgactccagcaatctacagttatggaacatttcattctttccgctttgaatgttatctatttttccattttcattctcagtttttggttgattagccgtttaacaccagtttctacttgagttatctctccattacattcaagttccatatatatgtttttgatactgatgtagtaaattgatatcaatgttttgagaagttgtatgatacaccctgactttaaattgcatcacatanaccatgancgttgaaattagaaaagcaagttggaaacaaacattcctgtaaatcaggacatgacccannagtaagtaagcatgagaca

SEQ ID NO: 19787 - DNA, 699 bp, Arabidopsis thaliana landsberg
ctttcaaatgaatatttttattctacatatattatgacaaatgacattcaatatctacatacaacttaacaaaattacattaaaaaaaaaactcgcggcttggcgcgggtttcgccctagtaatgtataatagatattacatcaaacacagacaaacgaggttggcaaaaagaaccaacaatacatattagaaaaagcgttggaggtacacctagatataataatctcgaccttttactttctagttctatatttttcacctatagaagaatttcactgtattttaaataaaattcaatgatttagtcttaaagaatcagatgaagttttaaagcataagttaaaattttaagtatatattgttaaaccaaacacacataaacagggttaacaaaaagatccaaccaaaaatacaatatattacataaagggttgcaggtgtacatctaaaataaaagtaaaaagacaactaaaattttaaaagaaaagggataactcaatgatggtatctcgtcttcaagtgcttactagaacatagaatataagatataaacatatcctttatgtatgaaacaaatgttggatacggaccaacaatattgcatatcgagcaaaaaggccgagtagtataattgttgtgtcgaaacaaaatctaaccgctaggaactggggagcctttgaccaaaccttaaaaatatg

SEQ ID NO: 19788 - DNA, 1589 bp, Arabidopsis thaliana landsberg
ttattcctatttgaaatttagttttaatatgttactgtatcaaaaacttttagtgttgtttggtagacatgatatctacaagttactaaataaggaaaatctctcagtaaattaatatttattaattaaaacctctctaaattaataaaattttgcagtcctaacattataaatttatagaggttttactgtaattacaacctttttctcaaacgggattgttaaaatcttatacattgcattatatgtagcctttacactgacgttttacttgatttttcttttggtttggttaccgatcgatgatcctgatacaaaaaattacaactataaaagtttatttctttttagttcgggtttctataattattttggtttggttacgatcacctcaattggaatggacatctcaacatgacaacatgtgctttgtgagtgagaatttgtcttgaaaaataaaagaccttgcaaccaaaaccgttttgacttttgaaattttagttaaacgctacggcttgccgcttgcataaaaaatgggtgccatttattgtttgtgaattgtttttcatctgttttttttcttaatttttttttcaatctttggtctaaatcagcatattttatcattaaaaaatctttttagcaaaaaatcttaaggagtgtggtttttttgggtggatgaatgacaagaaattagcaaacaaagtttcgtattgtgagttttgggttattttgttcgttttactatggaattacagtctgctactatagattatccccatgacattgtttctttaactattcagaaccaatccatgcttacccgacatgcctatcatttacgcgagtgatgccttttttgttataattctcacctctttcactctttaaggtttgtcatatctctctctgtctttcacactctgttactgtttcattgtcgtagagaacaaaaacaagaaccaagtcaccaaaaaaagtatacaaataaagtcaccaaatactgaattaaataaaagtctgctacaaaccaagtcaccaaataaatgaaaaaacagagctcaaaaacatagagccaaaatcaaagacaatggaaaaaaggacaaaaaaaaaacaaaattaaactttaagaaaaaaaaaaaaaaggataactcaaatagtaatacaaccagtaggggaacatagaaaacgatatgagcttaccgattcccagaaaaacattactggatacggacgacgcatattgcaggtgccgcaaattggacgaggagaattgttgcgtataactagaaattcgttacgacccaacgtgaaagtttgaccggtcataaaataccgttacttgttaacatgaagaaaatctaaatcacttgtaacaccaccccctacataataatactgttgatcaaccatcttggcctaatacccttgcataactcacaccaatctgagtcacttgcctccttctccatggacataaatcgggtagacatatgtatatctatacaatggtaggagccatcaaacatataaagcacctcaatgcagtgagacctgtatcttcgtgcttcaatgggcacatgcttacg

SEQ ID NO: 19789 - DNA, 1204 bp, Arabidopsis thaliana landsberg
  unsure (1)..(1204): unsure at all n locations
caacaatatccatgaaataaaaaaatttaaatttgagtattgatgattagaaaaggatttatgtaacataatgtaatctttgctccaaataatttatggttctcagcctatttaataaaattagaaaaggttcaattatattagaaaacaaataaattagtggtattattatttgttgtgtttgtgtatttggacgatgaaaattattatacactaaaaattgaaaattttatttggaacaaaactaggcaaaaaattaatatatatatatatatatatatatatatatatatatatatatatatatgtatatatngatatttgngacttaatttatttaatatatatccgnccgtaactaatgtatattttttgcaaattttggagatttgactaaaactttaacatcaactaaaagaaaaaaaagaataaaaaactaagaataaaaagcattattcattttaaactntttctttaatttttaataattccagcatcttcaagttttgtctattttttcttttctttctaaactctattataaaataatatttttgtcagcatcactatatgttttactctaaaatagagtaagtaatagaattgttctctatttagagcatctatattctctattcaagtttttgaatctaattctatcctagagtaaaatataaattaatatattggagaaactatgctttagtttaaaatagaaaatagaaatatattagagatggtgtaactaaatcgataaaaagaaatttgttaatagatttaattatagcacatatatattgacatatatcacgattattcacatgtacttcaataaattggatcaagcaaataacaaaacggatctaatcttacatacaaattatcaaactctaatttagagtcatacgtacatcaccaacctttatcttcttcgttcaaatatttcattttctacgaacaaccaaaattagtaaagacagagagaaagagagagattggttgcacatgcaaacaaagaaacctttcgtcaccattcgtggttttaagcggcgggttgtcttcatatgctgccacgtgtcagcatttctgacttcaaagcaatctttatcccttgtccgccaataactacgtttaactttctctttttgatttttttttcggccgaccttctttctctcggggtgaacacaacattttaaaccaa

SEQ ID NO: 19790 - DNA, 561 bp, Arabidopsis thaliana landsberg
  unsure (1)..(561): unsure at all n locations
gaagggattagattgtatgatggatttggatcaatagtaatacgagaaaaatcaaacattggtatttataccctaaaaatatatatagatataagagttgcacatttagaaaatacaaaacattaaatcatattttattaaacaaattaaacttttattttttaaaaaaaatagtcccgcggtataccgcggattaaaaaaaaattaaattttaaataatacaatttatcatgtttttattagatacactatacattttaaccgtaatcctaactaaaattctaaaaaaaatacatattataaccgttaactcaaatacataatctattattcaactatacgagttttacttaatatataaattttgtttagaaaaaataaatctannnnnnnnnnnnnnnnnnnnnnnnnnnnnntatacataactttaactttagtaaccaaaaaagtgaaatttttgaaaagcaattattgcgtgtgaatatgaacatctttttttgggtttggtgttgacgattatgaatatatgcaatctatgcattagaatctaaatcgcacaaa

SEQ ID NO: 19791 - DNA, 427 bp, Arabidopsis thaliana landsberg
  unsure (1)..(427): unsure at all n locations
ggggatgtggtaaggttgcattgattccaggacatggcgatggggaagtattcccgtgtagacggtaagaaatcatcgagctatggtttaaccattaccattgttctgttactttccctctgtttagttgggacatggatgttcatgtcttcttggtcagcccctgctgattctgctggctactcctcaactgatactgctaaagatgtttctaagaatgacttgagaaaagaagaaggcgatcgagatccgaagaacttttctgatgaaaagaatgaagaaaatgaggctgcgactgagaacaaccaagtgaagacnnnnnnnnnnnnnnnnnnnnnnnnnnnnnnnnnnnnnnnnnnnnnnnnnnnnnnnnnnnnnnnnnnnnnnnnnnnnnaagagtctgatgacaacaatggtgatggagatg

SEQ ID NO: 19792 - DNA, 1253 bp, Arabidopsis thaliana landsberg
agatttcatttatatataaacaaagggctgacacaacatgttaaattcaaaagattgaacacatttagtgatgaagagaagctgtttttgatatttgcacacaatgataaaacttcagatgatcaatcggacaacatcatcatcatcaccataccatccacacagaccattttttgatgaattaaaaaaaaaaaagcgttgagaacgacaatgaaggacccccagatacatactttggtattagaaggggcaatgattttctagcaaaccagaagaagattccagaagtaactagaagcaagtaccttccggaggttgaacaagcttacggttatgcgacgtagacatttccttcttcaactgtaccagtatatcctccattgtgtactctctttgccagtttgcaagtagcccaaatttcttaggatccacctatacacatacgcataaaaaaattacagagcatccaaagaaacaaaacagagaaaggaagggcggtggtgagtttatacgtaccactcctgtttcgtggttgacacaagccatgttgacacgtgaatggaatcggacagttggaggtttctccgggtaatctttgtcacaaaagagcttcaactgatagattctaccttcatgaacagtctgtgacataaaatttatctctgttactacaagcaaaagcaacaatggcataatctgctcaaataaagcttaagagattgtatgtcgataagatcaatgcctagaaaacaatgtggttttgatgttctgtattccaagcaatgagatgcaaataatattaatctatgcttctcaaaacaattgttaacatatatgaagacgaaggagaatgttagcagataaagaaaaagatataactacgttgtgaggaccgatgatggtgccagtccaagaacgcatatagatgtcatctccatcatccattccatagctcacagttccatccccaatacctttctccccacgttcaagctcctccaacaaccgaaaattcctcggaactatattgcaataacaagcgtaacaaaaacaatacatatcagtaaatgaaaacaagcaatcactttttttaatcaaagcagagaacagaacatatcatattaatcattatccacaaagactaagataagataacactcaacaaagttaacaatgagctatagagaagatgaaaacattcctagctaaggtcttagaaacaataagaaactcaggaatagcattttaaaccc

SEQ ID NO: 19793 - DNA, 583 bp, Arabidopsis thaliana landsberg
gaacatgtgattagaagatgcatcggaaagatagtaagggatatgtcacaaaccaatataagatcagcttcaggcaagaattcaacttgatgagtgacatatatgactgtcttgtgtctcagaagccccagcagaacttcctattttaaaagaacaatgagagatcatatcaaatatcagaagccagtacaaagtatattgtacgattttttatgtacatgaagataatcagaaagaaagggagcattataccttaaagagatgtgatccagtatgagcgtctactgcactaaaagggtcatcaaacagataaatatctgcgtcttggtagagagcacgggcgatttgtatacgctgcttctgcccaccgcttaaattgatacccctttccccaataactgtctggtcatggaacggaagtatctccaagtctttatttaaagaacatgcttcaagcaccctatcgtaccactctctttccattggcttaccaaacagaatgttctcttcgactttgccgctttggatccaaggtgattgtgcaatgtatgcctttctttccaaactttaagatttccagata

SEQ ID NO: 19794 - DNA, 1323 bp, Arabidopsis thaliana landsberg
aattaccctgcactagagtcttctaccctagtcaatcactgtcctacactagccaatttctcacaaaagcccatcgtcttcagtggaatgctacgtgcagggtagtgaccaagtcttcataaccgcgaaggtacgacgatccgaatcgattatactcagctgaggatctccaatcacacgacatatgtagcacttaacccttgcatatgtcaacccgccaccggggttcacgcagaccgagagcacagatacaccaccgtccagcctcttgccacggagggtacacgttactttcgccaccgctccacgcccatctcgtgttgtcttattcccggccttagtcctgcccgaggcaagtcttacccctgacgaggtatgtgcccagttaaagggtcctcgatcatcaagcctacatcgacaaggtccttaatcgactcagacggagacactacaccgagactctcttctcgtgcaagtcacccgcccggtctcagcttaattatttcaacccaaaaacttggtacctggcagaggtacattttttccgatgttgaatccatcatggcccatgatggatccaccatcaaattttattttcgaaaacaaccctccactttgccaaacatcttttgtaaaacaaatcctttggtttttctaaagcaatactaagcatagtaaaacctttttggtaaaaacagggtttcaaggaaggtaatcaagttcaaggaaggtaatgcaagaattgttttatcaagcaacacctatcacctaatgcagcaagcaagtgagaaagattttaaaaacatcaagggaggtggcaaatgcaccggggcttgccttcgttcacaggtgagtctggctcggatccacaaatatcaaagtagaagcagtttcctgcctgagaatccgagggtggtggtgtcctttcttcagtgacttccacttcttcttcgcgttctaacataaccatatacatatataagaatgaatgccatgtaatgctcatgagagtgcgaagataataaagatttattatctaagtcttgaatataactttccttcacggaactacgagaacttagggtttccggagtcggtaaaggagttcatagagcagggggggggtttgggttctagttatcaaacatggtccaaatcaattcaaactctacccaaggcttctaaataatgtggggagtcatataaaatttttgaacatttttgggattccatttacttttaaaaatctagactatttctttaactatttaaatgcccaaaatccttatttacctagaaacatgaactattttataaatctag

SEQ ID NO: 19795 - DNA, 240 bp, Arabidopsis thaliana landsberg
tgacctatggggacacattttgatttttctttgcttataactaaaataaatataggtcctggatgttcttctgtgggatacggggcaacacaagagattggtccatttcttgtcgataataaaggaaacagtcttaagtttaatccctatgcatggaataaaggtatattaaagttattttatttatgtccatcgatcttcgtcattctcatgaagaatcatatttaaaatatttatatg

SEQ ID NO: 19796 - DNA, 709 bp, Arabidopsis thaliana landsberg
  unsure (1)..(709): unsure at all n locations
cagtaatctttagaagttgaaccaatttggttgcatagaacaaacacaacacttctcacgcatttttaagtaaagcacacagatgcaatgagaggaaaacacatagctcacaacgtagaatcagattcaacaaacatagaacagtaccaattcaaaacagttctaattagtaacgagagaaattagggatcttaccgccttgcggagtttcttaatcaaagccataggctttctcgtcaatcctctagagaacctatacaaagagaattcaaattagtcaaaacacatgagatgattctacaaaggacgaaacttttactgagttcaaaaagcctaaccttctgcgaatacgggaagagaagagcttgacaagatcatcggtagacatgtcgagaagagcatcgagatcgactcctttgaaggcgaatttcttgaacgttctcttctttggaactcctgctgctgcaacctctggttccacatcagcctagagagtcccattggagccgaattacaaacccacaaatttcggaaatgtgatagcagtagtagaattagagagatgtatgtagatagaggaacttaccattgttggatctcggcgaaagataaagtggataaactctaaatctgtggtagcttgcgttntccaaatgagcagcgaagaagatgcctttgttcgcggatccaaatatatacgaggaccttg

SEQ ID NO: 19797 - DNA, 550 bp, Arabidopsis thaliana landsberg
acaatttccattgccacaactctgaagctgtacacgtctgctttctctgttagttgaccccataatgcatattcgggagccatatatccgctgcagcataagataaacaaacactgagctatatatattcatcggccatggtgcagttttcattttatactcaacacttacatggttcctgccactttagtgctaatgtgagtgtgttctgcttcatggagcctagccaatccaaagtcagatatctttgcattaaggtcagtgtctagaagcacattagtggtttttatgtcacgatgaaccatcctgatcattgatcattcgtggaggaattcaagtcctcttgagattcccacacagattttttgtcttgctgcccagtccagtttcagggggatttttcctggtgatggatgtcaaaccaacgacaaatgatatcagtttcatgtaccacatttgaatttagactcgcaacgtaaagaaaatctgaatgatttaaattaccagatagcacaagagctagggagttattttcatgttctcatacacg

SEQ ID NO: 19798 - DNA, 1498 bp, Arabidopsis thaliana landsberg
aaaatttcttgcttcccaatcttttgttagacgtaccaccgttcgacaatagcatcgttttttattaagttgatctattgttatgtaatctttgttggtattttgaacttatatcttcatattttgttttgatgataattattctgatttcttaaatagaatcaaagataaataaatgtaaacaacaacgaagaataattttttgcaatgtaataacgtaagaacagtgtcaacctagaaaataaatataacagatatatacgtgttatagtcaacgtataagtaaaatattaagtaattaacccagaaggaagtttttacgtaccaagaaaatttaaataacattcaaaaataatatttttttcgaatgcaagcatgatctaaaatactttgatatcgtaagaacagggtaaacctacaaaataaatattgtatgacagatgcatatcccataaaaagttttacgtaccaagaaaacaatgttgacggcaaggtatagtgattttgaggggtttttttttgtgaaaaaaataagaggttgatgtttacatttttttttttgtagaattatgtatataatcctttctcttctataattgataaatatatagttgtacaatttccctttttaattgttggtaatttgaattagaattagtgaatgcttttataatcctttttcttctataattgataaatagttgtaaaaatttcccattttttaatagttggtaaattgaattagaattagtgaatgcttttctaatttttatttttatctaataagatacatatagtttttgtataattattttatttagttttttcaaataaatttccttaaaatgtttaacttttaaggagaaagtaatattttttctttttttcttaagaattggtaacatacaatttgccttttttgtcttcaatttctatttttctttaataaaatacatatagttttcttatattttcatataatgctttttctgtatatattttctttaacacgtgtcatgtaacatcgataaaattaccatgtgtcataatttggtgggttagtaacttttgaaaccgtactttatataataaaatttaggtttaaaggatttttttcttaacataccaaaaaactatatttctaatattgttaggcacgaatcggatttcgacgaggatctaccacttaatcaatatatcagagataatccgatttgcgcttaacgatactttaaatactatgattacctttaaaaaaaaaagccataaactaagattcttacatccataaaatcttgccgccacctcgagtgaaactaactcaaaaaatattttgcgatttgaccaaaaaaaggtaaacttggtttatataccttacaagattgagaacccgtgcttcgtccgggtgttatgtttctaaataattcaatctttttgtatctatataattaaattagaatgaggatttttattataggatttagtatattggtttgga

SEQ ID NO: 19799 - DNA, 787 bp, Arabidopsis thaliana landsberg
gttgtctatctagttgcgatcgatacatatgcttcggtttattttccgaggcctaagttttctagattaggaagtttaggcccatgtttttatatacattttagtcctgaaaatagtttggatggggtaggcccatgtctagtttcaatgttgttaagttgataggatgacatggaaaaatagtaagtttttattggttaatgtaaatgaggtgtattaatcgaaatgttctgattgactgttgattttaatgaggtgtcaagctatgattaactgaaaaagctgaggtgtcatcacatgagagacttgtagtgtttttatggtgttgattataaatatatatatatatatatatatatatatatatatatatatatatatatatatatacttaaaattatcaaacacaaaacattttcttttcaaaagtaccaaacagctgattgagtacattaccaatgaagaagaaaaaagatctgaaagtgagtagtacattttcttgaaacatgagcccatgggctctagaagtaatgaaaatagaaaattagcacaatgggcctggaatcctcatgagcccatcttagttggagaaggccttggcttatgctgttctatatatttatcaaacagaaaatcttcaaattcgttacaatattttcttatagacgaatatactcttcatttagttgttaatcaattcttccgcgctatatatatatatatatatatattttataaatagattctcaacaaaactaaattttaaacccaaaatactatatttcta

SEQ ID NO: 19800 - DNA, 2921 bp, Arabidopsis thaliana landsberg
  unsure (1)..(2921): unsure at all n locations
gtctataaacttggtcattggttaacagaaacaacatttaagtctgccttctagttattgttcaatacagggggacgggtaacaacttgaagaaaatactaacacataaatgcatatcattgtataagctcgacactcattataagctctataccacgtcatccatgtcatttgtatcgaactggtagtcttggtttagtctggttagtctctacttgattcattataaaataagtaagtcattaaacatatgaagcataataagcaaaatatgatgtaaaatcatcataatgtcaattatgaacacttgccttggctttagaagccaaattacttgatctaaattcatcagatgaattacttttggtcttttttgtgtgatctaagaaaataagaatacatttgaagatagcaacttaactaacaacttcatcaaacatctctcaagatctaaacaacatctacaaatgattgctcgatacacttaaccgctaggtagtatatgcgaggtcgatccacaaggaccaaagatattctaaggatttccgagactcgttcttagctaaagcgaaaggttatttgtttggtttttggattgtaaattaaaatgcaagaaaataaaagattaaacttatggattaaagacattggacgttagggtatttcaaaagacaaagattagcataataaacaaaacagggaatttaattatgaagaaccgttctcaaacataaacataattctagactaactctctctcgagatactagccactaaatttgactactcaactactaaactttcgtttgcagtctcctaattcgcattaatgagttggtttatttagttcacaatgtgttctaacgtcaactttcgatggctagaaatacagtgttcaatttatattcgttcaagcattctattgaacaattttaatgcatagaaaaacttaagttctaaaacaaggtgatcaatcctattctagcattaagaacacataaattgaagaacctaaagatgagaattccctatgacagtttagttactaattcattgacttcctacttagaaccttattttccaattgaaagattactcacacgttgcggtgggaatcaagcaaagagatattaaagaaaacataattcagattaaataaataagaataaggtttagaaatcttctccaaattgtcaagaatgatgaatctttaatccccaaaggtgcttatagaaaggttctccaaaatgttacaaaaaagaagcgtaaaagaaaacgtagaaataaaattaggtctctagttttaaatacccgattacagaaaatagaaaattatcccagttaaggaaaaccgaaaccagtcgtcaggaagtcagatcgtcggatctagaggtggactgattacaccgtcttctctctgcttcagcttttctctccctttcttgacccgaacaagctcacaaccatccaatttcgtcacaagttcctgaaacctgcaaaagactcaagacacgactaaaaagacgcaaaatacagacttcgacaagacaaatgactcaaaagtaagggacctaagacaccaaaaaagcaacatatcaggtatgatttaggtattgtttttagagtctttttattattcctatagtattttctagtctttttcaggtttttacactttagggatgcattggagatcatggagtattttagaggtaaactgagtaaatcaagcttcaaagacaaattcggattcttaccaaggcaagtgtgtcgaccgacaccctcttagtgacgatcgacacaattcgcgagtagggattgagtatttaaataccgatagatctagttttatatctaggtgaacttatcaaacctgatcttagtgaatgttctgcgagtaggaatttgcaacgagagttggagtccttaattaataggcatagtaagtcgatgcaacgagagttggttgatcatatattagtgatttgagctctagaatggttcaataacaatcctaattatagctagaactattagtcatccatttcctgaaaatatccttaaaaccgacactttaatcatctgaatttactataatcttatctgctacatgctttcttgcttctttttacttttaatactagtagatttagtttaattgtgagaccataaccttctgtgtggataaaagaactttgtggaattcgaccctagagtactgcaatttatctcttatttgagagagtgcttaggtctaatttgatccatatcatctggtaaagcagccatcgagttagggttttccttaggtaaggagacgatatgtaaattggctttgaaagcatccgccatcattttatgggaagacaacggcacttctctttgattatttatctggcagaagcagatttgcttattcgcttgtattcttgtagactgtagagcaatcccccgatcgccatccatcatagtatcagccttggcgtaaaggaatagaaagacaactcgctttgctatgagttagctgctgacattgaaaccatctctttcggattctttcataatcgatttcaatcttaactatcgatccgtttggtagctaaaccttgtttgaattccgcaaaccttgagagacatcaaacaaaactcgaacacgcatataggcttgactctctgatttttctgcatgaaacggacattttatcactattccaacaccggccgcaacttctatgatatatttgttnntgtaataattaaccggacgattacgcaccccaatccatactagatggaacctggaagtaacatctggttgttccttaacacactattgcattgctacgcaccaatcatcttgggtatactacagtctctaaactttnctagatcttcctatatcataatgaattatatcatat

SEQ ID NO: 19801 - DNA, 1358 bp, Arabidopsis thaliana landsberg
gtcgaggcttgaattggggacaaactcgtagacaagaatctcttcatctttttcattacaaaacccaagaagcttaaccagattcctatgttggagtcttgtcaagagtaagacctcgttcttgaactccatacctccttgtcctgaaccttttgttaatctctttaccgctatctcttgcccgctcggtaatattccctgaaaacgaattctcatgctatagttaaagatcactgacccatcttaagattttgttaggactcttcttactagtttttttaccttgtagacagttccaaatccaccttggccaagcttattttcaagagagaagttattggttgcagttacaatcattcgaagatcaaaacgtaacatagattgaccattatttgaatcaaaaacatctgcacgtcatcaaataaaacatgtcaagtttaaaaccaaactcttagtaagataaggaatatatatgttgcttattttaaaagactttaccattgattatggtgtgtgactgctttctcttccatgagaatattagaaccacaaatatgatgagattgatgactgaagggaccacaataattgctatgttgcttccttgaaaacttttctcgtctctcccgtaatcgataatagtagaagaagcttgaggaggaggagcaggaactcttacaacattgtcaaaagctctgtagtacggataaagatcccaccggaaataacagctaggccgactaaccccacctccttgtcttccccaaaactgcttttgaaagtcattcacacactctctaagacatctcttgcagttgcctggcgatagatcaggcacgcattgcatcaacgcgtaaacatctgaaatttgtgtgaactctgttcttgtggcgctatagtacttaaggactgaggagttctcagcggtggaagcagcctcgagtgtccggttaaccattgcaatccattcttggctgaacatggtcatgttgttgaatttggaatctatactgttagggttagggttaatagtatttggtaagagctcgagtttgccaagagttgagtggttggtgtaacgtagagagcaagaaacgtcgtcgaattcatcagtgacccacgagaaagactctttttggcgaggacacttggattttgtgtcttcaatcacatgttcgagacatgtcttacaagcttgcttctcgtagcctcgtctgcataaggcaacaacgtggactctgttgtttttggaatctctgccaaacgatgcgttgtagaaaccgccgttagcaacgacgttagaaggaagagaagagaagagatagtttcgactgacgccgtagttaacattgaaaaag

SEQ ID NO: 19802 - DNA, 683 bp, Arabidopsis thaliana landsberg
  unsure (1)..(683): unsure at all n locations
gaatttatatctattatcaaggtagaatttgaattttttatactgaggcacttttttaaaaaaaggaaaagaatttgaatattttatttatacgatagttgccaacataattccagaatctttgttttttttctttcgggtaatacattttccataatcttttatatcctaaatttatgcatattagccttagagagttccgaggagacaaccagtgttacgatggggccggaaatctctaaatgggccgcaaactatttctcaatctggactctgtgcaattacaccatacacctaatatagttatttgcaggctttccgcctacaattttttttggatcagacatttattagagttacttttgtttttattttaaacagagttaatgtgatctcaatccgatttttatgttcaaattaaacagcaaaattcattactaaggtacaaagtaactttgccacgaaggtaaagtaacacaagtagcgcgattaaataacaaaattactaattttggcctcaaggttcttcacgctgaagaaagcaaaacttttataaactcatcaccttccctttttttcagataagaacacacaaaacattcgaaacttctgatcctgtcttccaaggtaacacaaagggtcgatatcttatttgagggaaaacattatattnttggtctata

SEQ ID NO: 19803 - DNA, 589 bp, Arabidopsis thaliana landsberg
acttatttactttttggtggttagaccatctttataattttttcttatttagaaactatgagagagtagaatgagtctctcaagtgagaaactctaaaaaacccataaaaacacttgtatatcatttattagtcaaatattactttattgttaaaatttaattatataactaacatttattaaaatactaatatctttcttttttgaaaaaccaagaagatatttcactgatggagatgcccttaataattctcactaattcaagaatcacatccataactttttgctcaaaaactctgcacggacaaattagattacatatgacatatctacaatttgttcctccatttaagaaatcgaaatgagaaatctagttaaattcaaattttgtaattattactattaagttgaaaccattttatggcattggaccaatactctagaaataaaccatcattagttagtcattgctaatttatttatggcaatgatatcatccactatattatctaagtacggctagcttcaaccgtccctaattttcttaacatatatttgatgaatacagtataggactaaattatatgga

SEQ ID NO: 19804 - DNA, 1151 bp, Arabidopsis thaliana landsberg
acaacacttcccttctcactttacaaccgtatgtctattcggtatgtatgtggaggaggatccaatgcgaattttaaagaaagctgcttcacttgaaaaatgtttctttgtttcaatctttcagtgggaagagaatggtttgctcgggcggtgggtttcctcaattgcagaagctttcaatacgggaaatagagtgggaagagtggatagtagaacaaggctccatgccccttcttcatactctctatatcggggtttgtccaaacttaaaggagcttcctgatgggctgcgatttatctattcattaaaaaatttgatagtatcaaaaagatggaagaagagattgtcggaaggaggagaagattattacaaagtccaacacattccttctgttgaattcgacgactaggaatgctctcagcaaacacagagtatgtatatatatgtacacataaagagctgcattgatggtgttcgatgaattgtctaactgtgactatgcttgacgagatatgtaacagcagagccaggagtctcataagcctctgtttccacccaaaatcaggtaatctcatgatcattgcctttaaaattttcaaagaaaagcttatcaaacaagagacctgaataatcatgttctttctgcttagaatcaccaaacaagaacattttgcaggtcggaagatagttgcaggtaggaagctaatcaaacaagacaccttattcttcacgacgagatgttgaacccctgaagaatgttggacaccattttgatggataaaacattttcataggagaaatgatgtgagtaagctttcagatcattatgataatcttctcctcctgtagtcatttctctcgttactcttacaaagtcctatgtagtatcttcagttcaaggtctatttctttcatataaaactatattatgtaatgttcataacctgaatgttagtagtaataccttgtgattagaaatggttaagagatgacatagtgacttactcaactctcataatcttatttctgaagtcaagaactctagcttgcaaagttgcaaaatttggttagctcatactgtaccttttactggagttgtagatgatcttggtttcttactaaaaaagcttgtgaaatttcatattacttc

SEQ ID NO: 19805 - DNA, 712 bp, Arabidopsis thaliana landsberg
aggcggtgacatcatagcgaaaaagacctctttggaaacgatcttcccactagaaaacataaggtatttgatacattactcaaacaattaacgaattggttaacgaagtgagaactttttaacatgtatccaaaaccactacctctccaataactaaggattcgaggaacgtcaccggagattctgtgttctctccgacggatttatcaagattcttgcaggtatataaaggaagtcttgcccctgaaaacacaaacaaaatgtcagcaaaattcaaattcaaacaaaaagaagaactttgccagctctataaaatgtaccattgatgcaacacttgctcagacaattccgaccacatccaccttcttcaactgtctcatctttttgataattcgatacaactgttggaactcttttgatcttcaacaacattgctcacaaatattataatctcgaaataacagattaatacaggactctaagaactaaaaacctaattagaaaaagggttagggttagtggctatttgtggaaccgcctccggcgaggaagaggagatcggagggactgccgccttcagacggcagagctccacgtcctccgtgaggcaaaggattagttatgattaaacaaccctttcgttggacatgaaagctcataggccgtggctttatcccgtaaatagccgtgattaccgattaccaatcttccc

SEQ ID NO: 19806 - DNA, 607 bp, Arabidopsis thaliana landsberg
gatacaaaacttctaactgcacaatacggacctaaagcaagaacgaaaaagaacgaaaatgctgagaaggcttgtttgatttcatatggaagccttaaaccggatagattggtaatcgtaaacgcgtttagttttcagaaggaggcttgttttgtatagtacaggtgattcttggtttttagattacaatttcttttgctttgaatattgataggaaaagttgaaaaagagtatgaaacgatactaaaaaggacgctacagagtatttgtgttttgagagttgttccaaataccaccacctcggtgataattcaggtgagtagctattcaatgttgtgtatatatatggtcaacttgagttgtatctgatgttttcattttgtaatatccgtgtaggttgcacatgatggaggttctgtatcgattttatgttccttgcaccttggtaaacatttactaatgctttctgaaacacatataatacggtataaacaatgtatgttcgagtatatatagagtttatagtagtgaaagtctgttacctcataaactgagagtgtgaatatgtttttgagaaacttttactggaaaaaactcttttgaaatg

SEQ ID NO: 19807 - DNA, 1045 bp, Arabidopsis thaliana landsberg
agccccgtgagtaattttctcactgcaattttctttgaggagttatttttagccgaatgattgtcaaaaatatcgaaatggacatcaatatctaccttggcagataatcattactgtaaaagttgttttttaaatgcatgatcttgagacgaggtagagaaacatactcaaaatctggcaatgacacattccttagtttcaaggataccagagtctcacaggtgtgtaaacgcttaggtccatcttcatagcaaccaaataactccaatcacatacaagatccaaacgcataaccgcgttgtggatccaccgcgtcatgtaagatggatcacggtgatttatctcaaacgacagtttaagtatgtgaatgcataagtccttagagtagtctaagaaactggtcataaagctcacaaatttatggtaacgacggaaatctgaaattttcaaatccaaaattggaaccaaaaggcagacacatttccatctctgggacaaaacactagtcctaacagcaatgtttgtaggaagattgagagtatctgacacagaaaatgatctggtaacaaacttatcctatcttctccagttctactacgacctcttactactcctcctcctctatcgctcattgcttgcttcaattttagactctaacaagatcaacaaaattcccaatttaaacataattagacatgaacacattcaaaactggagcaggttagaaaaatgctaagcaagagcaactgagagaaataaggtagcaacagagtcgcttcgtcgattagaagaaaagagagctcaccgtcgattcgtcgccggagaatgtagcaccggagctcttgataactctcagagtcactggagatttttgagaaatttgtctgcttaggttcggatttgggaaagttttttcaacagaatgaggaaaatatttcttttttaattgggcctgaggcccatatagaggcttttaactttttgagtttaaaataatctcaaacatcatctaaaagctttggctaaagcttaaaaaaaaagtcca

SEQ ID NO: 19808 - DNA, 232 bp, Arabidopsis thaliana landsberg
acatatttacttcttgtgtctgaccacctaaattttaatataatttgaatctaatacctaatctttataaaatgtgcaaaaatcagagtcaatctaacggatgttagtcgccaccgttacgtgcacgatgacttgtctttaaacgacgttaccttgactttgactcatttttggttcccatttggaactggattgtttggtccacactcttgttcttttgctcttcagtttt

SEQ ID NO: 19809 - DNA, 386 bp, Arabidopsis thaliana landsberg
tactcgaccaattgatcactcggagcataaacacaaaggcgcaaattttgtttcaccctctttactcgatccccaagatcgagcactcgcccaaaccgcctcaagtcttttgtcttctagtgaatatagggttttcaacatttcactataaatagatcactttgggatttgtccaaaggatctagcttttatcctttagtttttctttgtgttcttgaatcttcaaaacttaattactcttaatctattttgtttttgcacttagttcttttagtaatgttgtgtagcttgtttagatctacattttgatatgattttagtaatttctgggtttatgttcttagttatgttgcttgagtagtgattagggttcttgaggatggact

SEQ ID NO: 19810 - DNA, 108 bp, Arabidopsis thaliana landsberg
gacagaattagagaaaccagttttgccaccataagtagtggtgctgattaaattttctctcattatttttaacatattctccactggctcacctttatgcacaatgta

SEQ ID NO: 19811 - DNA, 1942 bp, Arabidopsis thaliana landsberg
tctattgttgtgtatccatctaccaagaattgttgtaacaatcgcttcgaacgcagtagggtctgaggttcatgtgatctctcttgtattctaaaagcataccattgcctcatacttatacacttgtttgcttgttttcctgttttgcctgtatatcccttctgtattcctggtctaaaaccatcttcaccataattaaatatgagaggatattgcattgggacataagaaggatgaacttcgcttattcttgatagctgtcctgttttcttatcttgaacgataatatcacgtgtaggcatttcaggacgaaagtctccaggaatcaaagctgcaacttcagacgttgtagggttacaataggttctgccatcctttcctaccctatcactagtcatgttaatatgggctaacccaccccaattaaacccaccccatttaaacccaccccatttaacttcaaacccatataaacccatttatatttgaaccccatttaaccttacccatttaaatttagtaaacccatatggacccatttaaaccaattaagtgagatattgtcttttattaattcattcataaacttaatagataaataacaatagcccataaacattagctaaatctgaaatatttataatttactaaaacatagatttcaataacatataataataataatattttcaaatttggccaaaaataattttttgtgattttggcgggaaaacttgattttacggttttgcgagaaaatgtcgtttacggttttggcgagaatacgtgattttacggttttggcggaaaacactttttgtgattttggcgagaaaacgtgattttacggttttggcggaacaacgtgattttacgattctggcgggaaaacgtgattttacgattttggcgggaaagcgtgattttacgggtttggcgaaaatacgtgattttcaaatttggaaggaaaacgtcattttacagttttggcgggaaaacgtgattttacgattttagcggaaaaactcgattttacggtttggcggaaaacagaattttacgtttttggcggaaaaacgtaattttacgtttttggcgagaaaacgttattttacgattttagcggggaaaaataattttacggtttcggtgagaaaacgtgatttttgcggttttggcgggaaaacgtgattttgcggttttggcgggaaaacacgattttgcgggtttgacgggaaaacgtgtttttgcggttttggggggaaacgaaaatttacagttttggcgggaaaaaacgatttgcggttttggcagaaaaacgtatttttacggttttagcgggaaaacgaaattttacggttttatcggaaaattttgattttgcagttttagcggaaaatttaatttttatttttttaaaaaataattggaaaataagatttaagtctatttgtttttatctaaaaatacatctaaataatcaattaaaataattagggtatttttgtcatttgttaattttgactgaatcatttccatccaaatgatccaattaaattcagccaaatgagtttcaaaatttagcctaaattttcaaactcatccaaatgattcatttggatggatcatctgaatgaaccgttttttgcactaaccgaacatcaaaactcatctccatccagatgatccatctgaatgatgaaacgaacagagccttaatagaatctgaaaagagtgggtcctcaataattaaaaaccaagaattcaaggggatgggatttttcctataaagaagccaaagcctttctcaccattttctctcatcaccaaacaaacaaacacattcaaatctcataaacacattgataagtaaaaatcctctcgagagacaagaatgagaatgacacttgttcacttgtctctctccctcttctcatgtctc

SEQ ID NO: 19812 - DNA, 839 bp, Arabidopsis thaliana landsberg
tccatcaatctcacatcttttaatactctccctagttatatcaccatagttaccaaaaaagggcatatatgactttaacctcggggaacagtcataacctcgcccgtatgaatctttccggtgcacaaagatctctctttttcaaacaaatctccccactcactaggcacatcacaagttatgatgcttgaccattcttgtttctcaacatcttgtagaatatacatacccatctcagtgttacagtaggggtcaaacgctacacatgctaattttccttggttatttataagtgttgaataacatgagattgcattaaagtcttctggtccttgaatgaactcaatcttctcggttctaacatcaaatctagctatttttctatacaaaactccatagtgtatagcaccatctatgcaaatcccacctttcatgtggcggtaaggatcttcttctttggttatgtcaatctttctccactctttttgttgagagcttagcgtgaaaacgaagtgttcctgttggatatcttgttgattggcgtcgtgttcatcgaacatcattacacacaacactttgtattggtcttgaaccggatcatacccaagacgtgtgtatacgtctcttccgttggattccacatctggcaatttaactatttgtctagtggtgggattacaaaccgcgatcgaatcaccacgcgtgtagcaaaacaaaccgttgacggggagagatctgatgtaggcgacatccgagatcgtcatgtcgtgtctggcgacaactgtggaggatttgtcattgatgtcgcgttcaggagctgagaagagaaacgattccgg

SEQ ID NO: 19813 - DNA, 264 bp, Arabidopsis thaliana landsberg
  unsure (1)..(264): unsure at all n locations
gagtgggtatccatcatatcattatcattattttcatcatcattatcaggattatcattaacagcattttatgacctcttcatcaacnnnnnnnnnnnnnnnnnnnnnnnnnnnnnnnnnnnnnnnnnnnnnnnnnnnnnnngcttgtacagcaaacaaaactttcttcttttgcttggttttttcttcttctatatggctcgaactttgaacaatgtattccgatgtgtgccagctgaccaatttatcctaagttggttctta

SEQ ID NO: 19814 - DNA, 1677 bp, Arabidopsis thaliana landsberg
actctcatttcaaagtttacctcttccttgtactctgaggtgtgttttgtgccaatcaattgttcaagattcagcatgaaactgtcacaaccaaacagattgttgatgaatcagctcattattcagtggctagtctttcacactgtcatgccttcagttctcagtaatcagctcaacgtgtaacaggcagctggaattttcctttgaagattgctcaaagaatcaggagtgtgctgcttttatttccacacttcctcagatttacatacaacagggttctcctttttttttaaactttgaatccctgttgatctatcagtttcatatcagcagcatcacttgacttctcaactgctgatatcagtgcatgatggtcacttgacaccaacttaggctttagatacccttagtttggtttgcacaataagttgatctcctcagctctttgacctcctgttagacgacaacgttttacggctgactacagaatcagcatgacaggcagctattttccacacatctttattcacatagtgttgatcttctattcatccttggatttccatggcctgttcttgcattttttgttcctgtcttagatcaacacatctcacgaaacagattagatctcacgcacaccaattaactttctcagatcattgaggctaataaactccaagattttggtacacaaatcagatagttgatattcagtacttagatgatcaactactatcagtttcgcctcaacaagttcacgaatgaaatggtgtaatatatcaatatgcttagtgcgtgaatgttgaacaagattatttcttatgtctaatgcactctgattatcacaatacattagcacagaaccagagatcataccataggcagctgccatttgtttcatccacatgatcagagtgtaacaactccctagagcaaagtactctattttaacaatggacagagacacaatatactactccttactctacctcgagaccatgttgctacccatgaaaaagcatcaaccacttgtacttcaacattcttacatggatccagtccagtcagcatcttgcactgcatcaaactcttgtaatggtatctatgcattgcaactcccctgatatgtacaaagactcatcaactttgactctggatatgtacagacatatgtacaaacaccatcagattcagttccagattcatccgccacaagcaggcttggtaactttctcccccccgaatccttcgcatagcatcatgtgggatatgattcgaacacttaccagactgctgcaccttgctactagtggcaaagtcctggctatgtagacacttcaaattcagaaaacctctctgaacaaactactttgaatgtggattggatggattccacatgtaacaacagttactaattcacacacttttgagggtcgtacgtccttgtttatcagcagcatgatggcaaacatcaggtttcttcatccaatcttgagtagatatacaaatatatctgtgatatttgttttgcttcagcaattcagttactcgattgtaacacaagttacagctagctgtaatctctccttggtcactatagaaacatttcctcgttcttctgctcaactgtttgacactcgactgactaattcatgcttctgatcttgtccttgcctt

SEQ ID NO: 19815 - DNA, 858 bp, Arabidopsis thaliana landsberg
  unsure (1)..(858): unsure at all n locations
acttgctaactcctctactagtggcatacctacactacacataaattccttttaagtcttgacaatttagaaatacaagaagaacaatgagccaaaaagatgatatagagaacagagaattaagacgaacccgattccactggctgcaccggttacaagagcagtcataccttgtagactccatctcttatccattttgcttgagactaaatgaccagaaatgccataagattatatacaatgaatgtggatcagataagtgtgaattattgagtttgttttttatgtgtggtggaaacattatgtagtagcagtaggacttataacagagaacatgactaaaatatctaagttggtggttcctcaagaaaataacttgttgttgtcaaaatctttgaccaatactttcttatttttctttttcaataacttcactcacaaaagaaaactgaaattataagttagaatggtgaacaaaatttggtacacttgctaatttagataacaaaaggacatttttattgattggtcttgttctcatgatggacttcggagtggtccattgaacttagaggacgcattcttgtgagtatgattctatgactaacgctatttagtgttatctttgattccatctagtacttatgacattaatccatatatagacacataagttgcaataattagagaaggatagtttaaccaaacaaataaaatagtactagtttaattgatccttcatatagataagtccctcatttctcttacaagactaaagagcaacaatttgacatagtgtggttttgtacaagggacatanactcatagcgtgatgagagattttatagggagagaaca

SEQ ID NO: 19816 - DNA, 570 bp, Arabidopsis thaliana landsberg
agatcacgcctgttacgtccacattcgtgatattttgtttacgtttatatacgtttttttcgttttgtttagttagagattaccttgtgctccagtctctatttgtctggactcgactcttcttggcgttgggacggagctttatcttgttctattatcaaatgacgatggagatcagattgttctgagtacatccgtgatgtcacccattgttccatccttcacatatccgaacttgcctgattcgccactcacctcactatggagagattatgattgtatgcgacgaggggatgctatagagacggacatgggagtgcttgcgactcttgcgctcgtactttgggaaccatattgtaacacatgtggggaactgggacactgcccaaggatgtgtcgtttttatcgcccatatggagatctgatgatttggttccgtttgtgtgacgggactggaaactatgctagtgtgtgtctgatagtcatagcaggaccacctgagggctcgtctcgtatgtttccttccactatgactgatgcatccacctcggaatctatggaggattactg

SEQ ID NO: 19817 - DNA, 989 bp, Arabidopsis thaliana landsberg
ctaagatcatgtgatttgaaagttgagagaggaacagatctggtgttactcacagtccgagagcaacaacgggtgctggtacattcagcaagaacattttgaagtaatcaatggcaagatcactataaacctgcataatcaaggaggtccacaagtctataacatctctagagtttgtcccaaacaatgaatctaatgttatgttctgtaatgtccaaagaatatatgagctatccgaacaattaagagtttttacctttttactacgaagactgcatcttggaccctcacacacaatctcactgccgtccatctacagaaaccaaagaaacaatcataacgtttgtccaaattacacatgtaacaagatggatgaaactaagaaatagtatttgtaagtataaatagattaagaacctttagtttcattttgagcttatcatactcttcatcactcaagattggatttccagagacataagccattgaagcttcaaggaatctttgttcatcagaacctacaatacatagataaaattagatcaagaatcaagaacctaggcgaatggattattgacaaaactataaatcataagtgttcattacttagcatgacaacactgcttccttcccacatcaactcttctttaaggttatcaaactcttcattagacataatcgctttgccttcgtaataaaacgactgcaaaagaaaagaaacagaaacaatcctcagactttgaaaacttcgattatatagagataaacccatactaatgataaaaacactttatttgatgtgttacttgcatcgcttggaggaactcttgttccatttcaccgatagttctcttctcattcttgttgatgctacaataaggtaaaatcttgctatcaacttcttccccacccacctgacctgaagacaagtcataaaaatgaatttaaggaagtaaggaaaactctcaagggagcaaatcttttagtgg

SEQ ID NO: 19818 - DNA, 800 bp, Arabidopsis thaliana landsberg
tgcctgcaggtcgactctagaggatcccctgagtctctctctctacttacatttatattttttttctttcacttttcccaaaatatgtcttttatttcatcattttatatgaatagtatagagatatatctgacgatccaatagattccattgtgaaattgatttttatttattttattttgtgtcacaggcgagacagtttcatcacacatagagctttctgtgacgcgttggctcaagagagtgcgagacacccaacttcattgacttctttgccaagtcatcacttcccgtacggacaaaacaccaacaactccaacaacaacacttcaagcatgatccttggtctgtcccacatggggcccccacagaatcttgatcaccagtccggtgacgttctccgtcttggaagcggaggaggaggaggaggagccgcttcacgctcttcttctgatctcattgctgcgaatgcttcaggctacttcatgcaagagcaaaaccctagctttcatgatcaacaagatcatcatcatcatcatcatcatcatcaacaagggtttttggctgggaacaataacatcaagcaatcaccaatgagttttcaacagaatctgatgcagttctcacatgataaccataattctgctccctccaatgtcttcaatctcagcttcctctccggaaacaacggagttacttctgccacaagtaaccctaatgctgccgccgctgctgctgtttcttctggtaatcttatgatatcaaaccattatgatggcgaaaatgctgttggaggagga

SEQ ID NO: 19819 - DNA, 2215 bp, Arabidopsis thaliana landsberg
tggtttgtttgttttttaacaggtcaagacagcaattatgaggaattcaagatgggtttatgaatatccgagttcattacgatgaaatgaaacagaattatgaatatccgcattctcattattacatgtaaaatttgctaaaaccgaaagacacagagatactttttagggttgttgagagatttctagatgaggtatgttcatgaggagatgactagatgtgagattgttgtggcaaaagaacagaaggcttaagcatcattattttaatgtgatttgtgatgatcagtgctctcaaatcacttttgcatttctccatttacatgagctagctcctacttgtggctttatgtaaatcctggtctacacaagctagagattccattgacgagtaccatggtgatgccttttttcaaagcaggtgttcctgaatgctccttcgttagttccatgcctcatacacgaatggtattcagtgcaggatccaattggacttgattccttgacagactttagcttttctttaaaccaaaaaaagaagaatatctctgctagcttctcatagtctgctcattattgggatgcactatcttcgtagagggaatgtagagttgtacatataaagtggttgacttgggacgaaatacccacattactgtaaaattttaaaaatcgtgctcgaatatcaaatttggtggtcatctcaaaacatcccacaagacaatataaggagtgaaaaaaaatggaacctgtcagaccgccgtgcaaccaccccggcaaggtagaaccgagccgagtaacgatcctctacagcaccagatgcgtcctaagacgatcgtagccgtcaatcacgctctgatcgcacggtcatggttcatcaaccagggttaagggcctgtctccttagaaatcaaggaaacagaggtacgagcctatagaacagatcctgttcaagtaaggtcgtgaccaacaatgcttcctcacactttatatacaatcaagtgttttttgtcatattagtgatgtgggataatgtttaggaacttataagaaaagcgtacatgggtagttgggtactgggtagcagtgataaatgggcaaaagcccacttaattatatcaatagcccaattatcttattgctccatttaagctctctaccacacggtatgggatggcaatatggcatggctttctggttcttacagtttcgtaaacccaatttgagcatgttatcaggaactcaatattaaaagatctacatttgtcagtgaattgggtctctgagcattttcttaaccagaaatcttgcgatgaagtgatgatagacgctagtggaagcaggtgaaaacattttgagcagcagcaagtgaccaataaaagaggacctgtatgtgagattgttgtggcacactaccaatttaaacattgattccttttgtacttctctctcacaggctgtgacacatctgatgcaccaccaccattttactaaatatttgaggcccccaatctaattacagctagcttgatagatgggttgatttcgtgtaagaatcatgcaagttaccattttcaggaaatcttacttggtgtccttgatggaaacaccgagaaacgtgatgaggccttttcctaagcaatatacgcctgaggcctaaacctggttcccggatgctcttccatagatctatactttccaacacaaacggcatccattcatgtatctatgtcaaaccactgcacttgattactttagagacttcagagatctcaccttgtcatactctgctaaatggggatgcaaaattcttcttaggtggatgataatgtagtagtgttgtataaactgattaaagacagtaatatctgtatacagaatcttgttttattgaacagaagaatgtaaatagaatcagcaaaagatcactgagcatgtgaaaaagctttaaagcttagagatgggagaatggtaaaaagtagcacgagataggtaagtgactttcatggtctccttgatcttgaactcaacagtcaccaccgacagattcctcccagtcctcaccaccgttccctccaccaacaattcactctgcaaaaatctcacacaatataagcttctctgctttgaagatcagagagagtcttaagagagacgagaatgaatgttaggtggcttaccgaaataggagcagaagagagataagacatactca

SEQ ID NO: 19820 - DNA, 645 bp, Arabidopsis thaliana landsberg
cactttacctgcagtcacgttcatcctcgccttaatattcattctcgtaagcgtgaagtttcaaagtatcaggagtgcagctaaggtggttggaacagtaactacagttggaggaatcatggtcatgacacttgtaaaaggtccagctcttgacctcttctggactaaaggaccctctgcacagaacacagttgggaccgatattcatagctccatcaaaggtgcagttttagtcacaattggttgcttcagctatgcatgtttcatgatactacaagtaaggatattttcaaaaaatataaaaaaaaatacacttgtcgatcgatttggacgatgaatcaaatgcttttttcaggcaatcacattgaagacttaccctgcagagctctctctcgcaacatggatatgcctaataggtacaatagagggagtagttgtagcattagtgatggagaaaggaaatcctagcgtgtgggccattggttgggacactaaacttcttacaatcacctatagtgtaagatttagacttacaataaagtagtgcttttgagagtagcttgtaggttatttattataaaagtcaaaatgttttgaacataaaactcatgcaggggatagtgtgctcagcgcttggtgactaca

SEQ ID NO: 19821 - DNA, 1360 bp, Arabidopsis thaliana landsberg
caggcatgctgcagctgccagggccacgggcgacggccgcctttccctccgatcactgagtgaaggagcgggctgccgcccacgcgggggccgacctgaactcggcactctcccctccccagccttggtgatgaaaatccttgaggctgaggaaggggcagaggtcgcagcccggctcgctttcccccaccatcaagctggaggtcgccatctcgggtgaccgccggtgaaggggtgcgaccgggctgcgtgatgaaaatccttgaagccgaacgatggctgagaggtaccaactgccatggagtcgtgttcctccaacgaggaggcggaaggactgcgggtatcccccatccaggggctcggaaggtggaaagacacgatgcataagggagcgcgaagacatggtcgcctttaaagggggtcaccctccttttaaaggcgactctccctacttgcgtccccagccgtcgtgggctgagtcttctccaacacgctccaaggtcctccccctacggcgcgggggctgggtcccacgcgtcatgcaagctggcccaaagcagaagaagccaaaccgccgcgcgcggtagcatgcaaccgcccagcggttacaagcgctcctccactttcgcccagaccagcggctgaaagggcgggcagcatgcaggcggcatgcaaccgcgccaagtgggcgtgcccctccgacttccaacgtacccagcatggggccccacgcccacgcgtcatgcaaccggcatgtcggtcgctacgtgcaagcaactgcaccgccactcgcaccactaccgtgcctcctcgactgcggaaccagtaccgtgactcgaggaaccctgcgtacgacccaaaagtgccaaccaggcacatcggtcacgggccaatcagccgcgggagaaggcgcgacggtcgatacgaccataaatgggccggcagtaatggcagtggcaggcgggcggaagcagcggtcaagtcgtcagccgagctcacgtcccctcctgggacagcgagagaatcccctcccacggcgtgaagacgacgtgcccatgtttcgttcctcgaacggctcgtgcacgcgcaatggctgccccgtgaaccactcgtcccatcgcataaactttgcggcacgacgggcggcacctttggcgggcgaagcaggcgacgcttcacctccgccataatgaccgcgtccaaaaaaggtgcgccacgtcattcgatttcgtatccttttcctcttcctctttctctctcttacgacagggaccgggaaaggggataccccgaaagggatccttctccgcgaaggaaagtaggccccgagcccccctactgattagaggttcgaaggctg

SEQ ID NO: 19822 - DNA, 453 bp, Arabidopsis thaliana landsberg
acagaaccacccatattattccctgatccttgagctaatggcgactcccgtttttgtgaattaacttatttggatgcagagctaatgcaataaactatttcaagatcaatgacgattctgatcacaatgctgagaaaaaactagagtcagttttaacaagcattttgcaggagaagggaacttacaagaatgttgagcttgccactgaacgtggaagacacttactgaatcaacttctccctctgatctgtaaccaaaccagacaccactgaaccattggatttccaatcatttaagcatgcttttagctcttgctgtccggtgatgtaggaggctgcaggaaggcaaagaaaagtaacctacaaatcagaacctgcataaaaatcaacatgttaagaaggatggcgaaatagactgaaccaaaaacatcattagtacatacctcgcgatctt

SEQ ID NO: 19823 - DNA, 613 bp, Arabidopsis thaliana landsberg
cctttcccccgatctgctggtttttgcttctggttacgcttccggctcacgacgtgtttagttaccttttatttctaagccaccgaactccatagatttgatcacttccattagttgtactaatgtttttcgctttatctgttcccttttattgcttaactctctatgcggcattaaaatcagatgctgagtttagatttaattatataaactgttgtttggtttgaacagttacgatggttaaaaaagcctagtcttacccaaatctgaggtaaacccgccaccaaaaatcggaaaaaaacttttatctatttttttataaaaggaacaaagtaacaaaaagtagataataaattaaaaatatatatatatatatatatatatatatcgggttgaaatagttttaactccttatagaacccgatagatagatatattattttcggtttacataaaaacaaacacattctaacactgacaaaaatcatgacgaggacgaagcaaagtctatgaaggaagaggtggagatggagaacgactccgactcgtgttacccaactccgaatgagctctccccactgagatatatgatggttacgaaaacgacgacgtc

SEQ ID NO: 19824 - DNA, 1170 bp, Arabidopsis thaliana landsberg
  unsure (1)..(1170): unsure at all n locations
gcattcatttttcttatgccttatgcgatagattgaccgaatgaaaagttacctgaacaaagacgatttattgtntatgctatgagactgatgataagtttccgttatatcccatatctgagaagtttttttctaactttgtctaccaattcgacatttggcactatactgtgatgacacgtgtacttatcattaattgtaatttgactaaaataatttattgatagatatatcatatatttagaaaagtagtcattaaaccatgaaattactacatattaaactataattttgaaatgatttttttttagcataattgtaactcccttaactaattacaaaatcaaatctttaaaattttgacatgatatttttcacagtaatagttcactgctataaataattctccaattttacaagatttttttccatctttagttttttataccataattaattactataattttgtttcaatgttatatgattaaaaaatttaaaaatctgttaaaatttgatatcttacatttgctcatattttaacagtttttatttttctatgttatttatgcatgtctatataaataaacatatcatatcttatttttacaaaataaatgtatgataaagtaaattacaaaataatttgttgatataaactcataaataatagttcctattcattttattttgtaagtgacaaactaaatttgttttcttataaaatcatatgaattttaatatgaagttctttttattaaaaccccaaggacaacttctatcgtttaaatttattgtgttttacccatataaaaacataagatatatatacatgaaaatagtggaaactgatgagagaatgattatttataagatggcaatgaaaaattgataatccagatgtatttaaacaaaaaaagtaacaatgtaaggtacataatctaaaattaaaatttagaattaagcttttacaatgatatttttgaaactcataacaacaacaacaaaaaacttaaaactaaacaaaacaatatttgagatacttatctattctattaagtttagctatataattcaccgttatttatttttattaaatttaattatatgattctatacacaaaatatatatgagagtcacattttccctacattaatcaagaaaaaaac

SEQ ID NO: 19825 - DNA, 983 bp, Arabidopsis thaliana landsberg
ccttgtgaattgcatatggattttgtttttagtttaatgtcccacaatcaattaattatctcatcaagacaaactgcattaatgcatcttttccaaatggtagagacagaaccatgttctctgttctagtctgtccaacacttcaagaccacaagtttcaatgattttttcagagaggtttcaactcattagtagttgatctttctatatatacactcataaacccattctttcaatcatcaacaaacaacaagcaatccaataacttgaatcttttcatacatcttcagaagattttaaagaatttaatattcgaaacaaaaacaatagatatggcttttgtgagaagtctattgggagcaaagaagattctaagccgctccaccacagcagcctcggcggcaccaaaagggtttcttgcagtgtacgtaggtgagagccagaagaagcagagatacttagtgccagtcttatacttgagccagccattgtttcaagatctcctcagtaaatccaaggaagagttcggatttgatcatccgatggggggcttgacgatcccttgtcctgaagataccttcctcactgtaacttctcggatccaaggatgattatcatctgaagaaaaacttaacacttttctttctttatttttttgacagcaacactttaattactgtagatagatgagatttttttcattttttcttgaattatttgatcaagaagatagaaattccaatgtaaatgccagttttgtcatttgtcatttatggaatcaaacaaaagatccagacagacttctaagttctgtttatatgaatgtgtttatcaacagttatatactataaagtataaaatcggaacgatttgtcatgtttctacaaaaccagagaaccataatcaaaataaagatttaaccatgctataatttacacaacaaatactatactcatatcaatgggagagataaactactttag

SEQ ID NO: 19826 - DNA, 1311 bp, Arabidopsis thaliana landsberg
atgaaatttttgtttaatgtagagatggcaagtgaggtttaaccattttgtaggttatctttctgcatttgttcttgtggttcttttaacttgtttataagttttaaaatttctcgattaagctttggtttcgtacttagaaaggatcgtcatagcggattcgatatatcggtttatctgttatggtaacaaactaatgagaatctgaagcattttcaagcgaaattagctcgtcttgaggagtagattcatactgaataaagcttatttcagctcaaatggcttgaagttaatatgactttatgactgatatttgctttcagttgtattagatagtacatatccacatttggtggtatcagatatatttagctgtaaggattaagtattattgagcctctaatacttatctacttggtaaattatctggttgactcttgtgtatggttgaaaatgcagcgccggagatagttgagaagcctggtgatatttcattgtcaaagcttaaaaatttgtacattcaagcaaaagagctttcagaaagtgaagtaacgtaagccatatttcttcatcatttcctttcagttgttacatcagttttgaatggtttagagagtgataatacaactaaatgacattttgtgagccaaaaataaataactaaagctttgtgtttaatgcagcgtttcaaatattctgcttactcagttggattctctgcttccatctggaccaactgggcaacaacgcagaaaattaggtatacttccattactgtttagactcttctttgaatatttcaggctagtcatgtaatgtatatactctttgggcgttatttgtttttgtgagaaagataagacttgatactctcttttgtgtctcaaacctctccaatgatttgatatatatataagagggattaagctttttacgatgcttgtaatgatatcacataagtggcagaaggcaacgaacagaagagaaagagaatgaaagtagatacagatgtaacaagagtttctccttccatgagaaatcaaatcgaggcatatgctagtctaaagggtgaacaggtacaacaacagctacttctttctttgaattgaatcatttgtttcctccaaaaatggtaaatttttaaaacatctgttttatgtaggttgctgcaagagtcacagccgaggatgccgagaaggatgaatggtttgtggtgaaagttattcacttccacagacaaacaaaagagtaagctcgaaccctttaattgaaatccccacattggttaggagagggcacaatcatcattat

SEQ ID NO: 19827 - DNA, 3909 bp, Arabidopsis thaliana landsberg
  unsure (1)..(3909): unsure at all n locations
atgtcatcatgtgtctctcatgcgcctaggatgcatccaatagcccaactatgctttatcgcacttatgatgcttcatttttgctaatgtgcacaaatgataaagtagttgtagaaatttgggcctaagtgcaagagagcaaaacttgcatctgggtccaaattcttatgtgactaaccttgtagacctaacaagagttggtacctaaaacccaagcttgaatcatcttgcaggtttatgcatccggaagcacaagctggatcattgatagcggatgcacaaaccacatgacgggggagaagaagatgttcacttcctacatcaagaacaaggtttcccacgacacgattatatttggagatgggaatcaaggcaaggtcaaaggtttgggtaaaatagccatcactaccgagcattcaatttctaatgtgttcttagtagaatcacttggttacaatttactttctataagtcaattatgtcatatgagctataattttatttacaaatattgatgtatctgtctttagaagaagtgatggttcattagcttttaagggtgtattagacgacaaactttatttagttgattttgcaaaagaggaggccggtctagatgcatgcttaattgctaagactagcatgggctggctgtggcatcgccgcttagcacatgtggggatgaagaaccttcacaagcttctaaagggagaacacgtgataggtttgactaacgtgcacttcgaaaaagatagaccttgtgcagcttgtcaagcagggaaacaagtgggaggctctcatcacaccaaaaatgtgatgaccacttcaagacctctggagctgctgcatatggacctcttcggacccgtcgcctatctgagcataggaggaagtaagtatggtctagttattgttgatgacttttcccgcttcacttgggtgttctttttgcaggataagtctgaaacccaagggaccctcaagcgcttcctaaggagagctcaaaatgagtttgagctcaaggtgaagaagataaggagcgacaacgggtccgagttcaagaaccttctagtggaagagttccttgaggaggaagggatcaagcacgagttctccgctccctacacaccacaacaaaatggtgtggtagagaggaagaacaggacgctcatcgatatggcgaggacgatgcttggagagttcaagacccccgagtgcttttggtcggaagccgtgaacacggcttgccacgccatcaacatggtctaccttcatcgcctcctcaagaagacgtcgtatgagctgctaaccggtaacaaacccaatgtatcatactttcgtgtatttgggagtaaatgctacattctagtgaagaagggtaggaattcaaatttgctccaaagctgtagaagggtttttattaggttatgattcaaatacaaagaagtatagggtcttcaacaaatcatcaggtttggttgaagtctcnnnnnnnnnnnnnnnnnnnnnnnnnnatggctctccaagagagcaagttgttgatcttgatgatgtagatgaagaagacgttccaacggccgcgatacgcaccatggcgattggagatgtacggcctcaggaacatttggagcaagatcaaccgtcttcctcaactatgatgtatcccccaacccaagatgacgaacaggtacttcaagtggaggcgcatgatcaagggggagcacaggaggatcaagttgaagaggaagaagcacctcaggcacctccaacccaagttcgagcgacgatccaaagggatcatcccgtcgaccagatattgggtgatattagcaagggagtaactactcgctcgagattagttaatttttgtgagaattactcctttgtctcttctattgagcctttcagggtagaagaggccttgctagatccggactgggtgttggccatgcaagaggagctcaacaacttcaagcgcaatgaagtttggacactggtgcctcgtcccaagaaaaacgttgtgggaaccaagtgggtgtttcgcaacaaacaggacgagcacggggtggtgacgaggaacaaggctcgacttgtggcaaaaggttatgcccaagtcgcaggtttggactttgaggagacttttgctcctgtggctaggctagagtccattcgtattttgctagcatatgccgctcaccattctttcaggttgttccaaatggatgtgaagagcgctttcctcaacgggccaatcaaggaggaggtgtacgtggagcaacccctggcttcgaggatgaacggtaccccgacatgtgtgtaactctctaaggcgctctatggacttaagcaagccccaagagcatggtatgaatgccttagagatttctaatagctaatgctttcaaggttgggaagccgatccaactctttttacaaagacatgtgatgcagggtgatgacgcagaaattcgagatgtcgatgatgggcgagttgaactacttccttgggttccaagtgaagcaactcaaggacggcaccttcatctcccaaacgaagtacacgcaagatctgctcaagcggtttgggatgaaggacgccaagcccgcaaagactccgatggggaccgacggacacaccgacctcaacaaaggaggtaagtccgttgatcaaaaagcataccggtcaataataggttctttgctttacttatgtgctagtagaccggatattatgcttagcgtatgcatgtgtgctagatttcaatccgatcctaaggaatgtcacttagtggcggtgaagcgaattcttagatatttgattgctacgccttgcttcgggctctggtatccaaaggggtctacctttgacttagttggatactcagactccgactatgctggatgtaaggtcgataggaagagtacatcggggacgtgccaattcttaggaaggtccctggtgtcatggaattctaagaaacaaacctccgttgccctatccaccgctgaggccgagtacgttgccgcagacagtgttgcgcacaactactttggatgaggcaaaccctccgggactttggctacaatctgagcaaagtcccactcctatgtgacaatgagagtgctatccgcatggcgagaaatcctgttgagcacagccgcacaaagcacatagacatccggcatcactttttgagagaccaccagcaaaagggagatatcgaagtgtttcatgttagcaccgagaaccagctagccgatatctttaccaagcctctagatgagaagaccttttgcaggttgcgtagtgagctgaatgtcttagattcgcggaacttggattgaattgtagcatacatgtgtttatgacttatgatcatgttccttctgcattttattgctttttgtggtgctcaagttgtacaaacactccctggacctcacaagtccgttgcaaagtgatgcacatgtttagggggagatgtgttacaacttgaccctttgagactaaccatatgcttgagtttgatgatttagtctcgaaggaggattaaaagggaaaaggtggacttggaccatgaaagacttccactgcactccgatgagagggtaacttattccaagttcatctcatgaactcttattgccatttgctcttaattgaagattttggtgaggcaatggggttaaagggccaaagttgatcccgttttggtgcttgatgccaanagggggagaaaataaaggccaaagtgaaaaatggatcagctaccacttgagagattttgaaaatagtagaatagagcttttggtttattcaaaactcttgcattgtctctttcgtcaaaagttggcttcttgtggggagaagttttgactatgggaaatagggggagtttttgaaaccac

SEQ ID NO: 19828 - DNA, 823 bp, Arabidopsis thaliana landsberg
ttgtcttattctacttgggcatggttaactttgtcctttgagttaacgttaatgaacaagttctacgatgtttagaaggtttgggtaaggtacacaccatctattcaatgattctatttccttgaaacttatgagttctaaccttaatagtactataacggttcaacctaatcttctaatgttttttttttttttgaaactcaggctacttaggatttctaattcttaacatctaatggatgaggtttttctatgtcgattccattgtttgcgttatacagatacatacactaaataaatgtaacttaaatataaacaaatcatcacaaaacataggcaatcacaacatgatattaaacatcaagtttatacattactatcttataatgttacgttatacataccgcattttctaatcatataattacatttatcctaaagattttacaagtaaaaactatcctaaggttacataactaggcgaaggacttcattagtcacactaagccactattctacaataaaaggattagtaccctacataccttcgccttagacttgctataagtcaacctaaccgtaaatatttctacacataatacatggacatatacaactaggccaataaccctttatggttgctgaatcagttgcagtaaaaggaaacatatgagacaaactctccaacggtcccgccatgactacaagatatgcactagcatagagccctttctcgtcgcatgcatggcacctaaactgggtcctcatatggctggtaatagcgacatatcctcggatagtgtcataattcctcacatgttat

SEQ ID NO: 19829 - DNA, 1089 bp, Arabidopsis thaliana landsberg
tgtgatcagacaataagtaatcatgcatgcatgtgcatcagcttgcaatgacaggcattccatacataaatcatgccttagtttttcggacgaatttcgacacatttgacaaagagccctctcttccaacagcaagatttggtctcatacatggagaaactgatctctccagcattatctggtgatgtcacgaactcaccggctgatatatctatccaccgtttccctatatgctctttcaagcacatgcttcgctcttgtggccttttcttaccgtcgggcaaggtcaacttcagattcactggtatgttccatccagaagctgtatcttctaacttcacgacatacacaacctcataggttgtctctagtgtcagttctctcgtgtcaaattttccatttacatctagccaacaaactgcttctagcacagcagcatcaacgagtttttcgcttgaaaataaaacacaatagaaaatttaatgttaggaacagcagtcgcagaagcttaatgctcatactaaataatatctagaagtatagttaaattacaactttccctcaaatattactttcggtttactcgcttttcattctgttttattttaatctaaaataaatatacttattttgctcaaaattaaaaataaatatatttattttacgcaataaatatatttattttgcgcaaataaatatacttgttttgctcaaattaaaagtaaatcaagatcgactttccaataaatcgactttccaataaatcaagattttagttgatgtattttcctttccatttaattcagaaatttctatacagtttcgtttcaatcggttaaagaagattggacactcacaccacttgtcccattatgaagtttttatagaagatataaatcaaacttataagaactctataccttgatatatcataccggagaggcagccatgaccaatactcgtctttgtccgaccatgcaatgctaagatcccttgcgtagatcatgtgtttctgtccatagaattatcacgtgtatattgcatgatacatatatgtaggaggcataattgatcacagggatttgatac

SEQ ID NO: 19830 - DNA, 1737 bp, Arabidopsis thaliana landsberg
acattctcggtcatggtggatttggttcagttacaaggcgagaaacgttttatcctctttgctctttttcttttctgtcattttttgagatgacatttgcaaattgtttcagggaaaactgcaagatggaagggaaattgcggtaaaacgcctttctagcagctctgagcagggcaaacaggagttcatgaatgaaatagtactgatatcaaaactccaacacagaaacttagtccgggttttgggatgctgcgtcgaaggaacagagaagctattgatttatgagtttatgaaaaacaaaagccttgatacttttgtctttggtgggtcacaacttgcctctttcttgtagcattcctctctctatatgtcgaactgcttatttgatagtttttacatggtatttttgcttaggttcaaaaaaaaggctcgagcttgattggccaaagagatttgatatcattcaaggtattgtgcgtggacttctctatctccaccgtgactcacgcctcagagtaattcacagagacctgaaggttagcaacattcttctggacgagaaaatgaacccgaaaatatcagattttgggttggctcggttgtttcagggaagccaatatcaggacaaaactctcagggttgtgggaactctgtaagagccattcttcgataacatgatgaactagattcccttgtcatgatagtcatatgtgaaactatgtgatgtttgcacagaggatatatgtctccagagtatgcatggactggagtattctctgagaaatctgacatctacagcttcggagttctaatgttagaaatcatcagtggagagaagatctcaagattcagctatggcgtagaaggaaaaacccttattgcatatgtaagtaagatttataggcattgacacagtaagatcttgtatttgattctcattaagtgcgcagatctcgctgactgtttgaaaacatgtattgctcttatattcgcttggtctgaaatcacaacaggcgtgggaatcttggtctgaatacagaggaattgatcttttggaccaagatcttgctgattcatgtcacccattagaagttgggagatgtattcaaatcggcttgctctgtgtacaacaccaacctgcagacagacccaacacacttgagttgctggctatgctcaccacaacatcagatcttccatcaccaaaacaacccacatttgcatttcacacgagagatgacgaatcactgtctaacgatttgatcaccgtcaatgggatgacacaatctgtgatccttgggcgttaagaaaccatttgtgatggaaattgtggaattgaagtgtgttaatgacttcaccattgtttaaaataaaaacttcaacattgtttaatccaaataaaaaggtttttaacttaaacatctcacgaacttggaagagattgaaggcaacccagaagagtcgatggatccttcgacctatatgttggctcattcagtggttctcgacccatctcctattctggggtttcttcggttccaatgtgtgtcgtctcacaacttctgctctcgccggtgacaccaatgttaaatttgggggagaatcacttaagcccagattttgggagttggaatcagccatacttccatgtgtagtttcggtctcgatttggggaactagagttcaacgacattaaagattatgcactctaagtgttcggtgaaatgcttagcgaga

SEQ ID NO: 19831 - DNA, 725 bp, Arabidopsis thaliana landsberg
gggaatatatatgttgcaaccctcctataaatcttcaggtcattgatattcacttgttatattatgtatatttttcgaatacttaaatttgtttttgccaaaacagggttatgtgcttggaaacccgataacacatattgaatttgaacaaaactttcgtattccatatgctcatggaatgtcgttaatctctgatgaactctacgaggtatgaaatcatctatgccatgcttaatttgcttctttttttttttaagaatcgacttatattttatccttcactaaccagatctaaccataccatttttcaaagcctcaaataatataaaaatgttcaaaactctgtttttcagtcattgaagagaatctgcaagggaaattatttcagtgtggatccaagtaacaaaaaatgtttgaagcttgttgaagaataccataaggtacacattaaaaatttgtcaatgttttttttttttttgcttggtaattaatataatcactaattcagattttggtttttttttggttttttatttatttacaagtgtactgacaacataaatagccatcatacattaatagcaaattgcgatgactcaaatacacaacacatatctcctgattgctatgtaaggaattcctttttcctatctgattacgctcctatttgcattaacttatagaaagcttacaaagattatcaaaatttaaaacaaacatccgtt

SEQ ID NO: 19832 - DNA, 1266 bp, Arabidopsis thaliana landsberg
accgctaggactttcatggataatgttatggtgactatttagagcagaatcggaagaaagaaatccaagatgatcctcgttttctttcatggcttagaacatagcaaactgatctaaagcaatagtttggatccacaggtctagtgtcagaggttgcaatatagcagcaaacacgtacgtgagctcttcagcagttagcaccgcagacagtcctttaaaatggaaaagcgcaataagattaaccataccatgagctctaaccactgaaaacgcagccaaaagattaatggaaacagtgacaaaaacagccaaaacacctaacaacaatctgaccccaagttagagctctttgagtcaatcctcttcctttcgaattttcaattaaccagtttcgatcccattgaaatccttagcaaccaaaccccaaaaacaacttagcttttctactgcccgccagcaaataatcatattacggggaaaatgtcatcaaaagtatcaacttacgaaaaacattagttaacttcatgagcccatccatatgcttttggatgcttacattatttttccgattacacgagtgttattggttactaatttacaaagagtttcgatgacttcattaaaatcgtacaaagtaaataaatgaaagattataaactattgttagagagttttttataatcttgttgattagttttttataatcttataaagtttttcaaacaatctctatattttgataatatttttcatgactctctatgatttgattttgtgaaaaagtgtggaaagttatgaaccaataacaaaataatttaaatcattaacaatcatagatttttttgctttaattgaataacacaaaacttttacgactttataaaaatatgaatccaataaccccaaattttaagattttagattacttttaagttaacaaatcttaaatgaataatacaaaactttaacatacttctatattatacttcactaaaattctttgaaatcataaaccaataacaccctctaagaagaaagttaatataaatttatatgatttaaaggcccaatatcacctctaatatcatcatcatccgtccgatcaccaaaatacgacggaaaacatgaagaattcgatccctattgatctcatcatcgagatagtctcgagatcgacagcaaaatcagtagcaaggtgtcattgtgtgtcgaagcaatggagagccatctttcgccgtaaatatttcatcgaattgtttctaacaa

SEQ ID NO: 19833 - DNA, 1125 bp, Arabidopsis thaliana landsberg
cgttcggtcttccacataaccgaataaacagcatccagacaaacatcaaaaaactgaaaaccaagaggtaaagaaaatgcatagttcgctaacctatccgctaaacgattagcttccctatacttgtgagaaatccgaactatccagtcccttgagataaagctatagcacatgcgtattaggaaggacagcgggtgagattcacttatacatgtccgaagaaaaccaacaacaacctccgagtccacctctaactctaatcgggatactttacactcccaggccatgtataacccgtagtatacaccccataactcagcaagaggtgctgagcatatcccgatattaattgcaaaccctcttcgccattccccattgctctcccgtaagacccctcctgccgccgctaatccgggattacctcttgacgctccgtctgtattcaacttgcaccaaccttcacttggtctactccatgagattcgtctctcttctctgcccactaatctccgagacactcctaccaccgcatgtgctttagtaacttcccgagctagatcctttatgaagctgactctgtccctgcaccttcccgtcgctccaaacacatatccacatctccatttccaaccccaccaaaccgccatcaaaaaaactgtcgaccatggactctcccatacccctttatgatccctcaaattatcataaacccactctagcaacgacatggtaaagaatgtagtccttctcctcctaggaataatcctcaaccataatccatacatcgccgggcaattgcgaagaacatgtaaaattgtctcctcacctcctttgcaaacctgacatatgccactatcactcaaatgacgcctttgcctctccatgttggtcatgatcacttgattcacacccaaccacaaaaaaattttaacccgctccggtgccaccactttccacacactatcgaacagttttctcaaatcttgcttaggagaatcatcggtagtgaggactcgataagctgatcttacagagaactgcccatcaagactcccattccatgagaatctgtctcgtgctcctgtaacctcatcaaccaccacagcagcaagtcgcaaacgcacc

SEQ ID NO: 19834 - DNA, 908 bp, Arabidopsis thaliana landsberg
agggaatgtcggcacgcagtgtatgaataggcactgggaccacaatcagaggcatcctttaaatagacgaagtagaatatattgatatgccaagtcttatgatcaagcaaaatgaattaaaactataatcatacaacaaaacagatgaagaaaacagactatctactaaccgaaccaacatagaactatattggattgaaaaaactaaatcagactcactttcttataaacccaacccgatagataactcagattaagaataatgactaaccataacctcgctggtataaatcccaatcgatacatgattcagtgtaatggtaaaattgtaagccctaaaccctcagccttaaaccatagatacaaattgacatctagtctggataagtgtaaaatctaaaccctaatatttattggatcaaacgcaaatcaacatacaattacccttaaaatatacatattttgtttctttaacttgttttatatataagagaaatctgtgttggcgagctcaagtggagtgatgatgaggatttaagatagaatgaaagaaatgtcgataatgattttttgttttaagtgagtttttgtgtggtgatataaagatgtggttttaattttatttttttgagtagtaataaatggggaaagagagaaatgagacaaggattttgggtctatatgaaaaaaacagatgccactttctagagaagaaaaagagttttgatgtgatttgatgtggttgactggttgtgatttggtttcttgaagtaaaaatactctgcgatattgttgtacatatgttatttagtctgcatgttaacactcttcccataattgttgaggatgaccaaacatatgtagaaataaaaaccatgtaaaatactttatatatatagtctgttcgt

SEQ ID NO: 19835 - DNA, 550 bp, Arabidopsis thaliana landsberg
aggttaacgccaaaaagttaaatcggaagattaatacggttaagatcgaaagaattataccggaaaattggaagcacggtactgccattaccacaaccaatttccaaaagttttgagttctctccacaagaaactaattcaggaaattccttcaacagataccttctttcctacacgaaaaccagccagccaagacgaagaaatgtaggaccccgaaatccagatttaaaaacactcaatttctcattcaaaataacttcaatttttacatctaataaggctcattacgaaggaatccaaagactccatgatccggtcattccggtgatgaacttcaccggaaaaccggaaagttggccggagccacttgtttaaaatgttccaacaataacatcattcttacccaaatcctaagattaatcaatctctctacatctcaaaaaattcagaagcaaatttttactactaattcaaacttttcttcgattgtaaatgataagagctgattacaagatatggagtagtgatgtgtgtgtagtaccttgaagaa

SEQ ID NO: 19836 - DNA, 457 bp, Arabidopsis thaliana landsberg
tgtcatcgtctttcttatatattaacataagatgtcataattgtattgtaacgctggcaatgttttaaactttcaatcatgagttgcatataaaaataagagaaagtacgtaaatatgtactttattcattatctcttttatgtatattccgtaaatcatttcgatctaagtaattaacaatttcttttttgaaattatagaatgtgaatattgaatatattgttcaaaatggttgacggcaccactatttcatataccgtcagtgttgacgaatctttaagggatgcatgtgggcattcaattattataatcgcaaaattatactctactctaggagcacagccagtacaatttcaacgatgatatttgggagcaacaagcaattcaaaattcttttgattcatggaatctcataccaagacatgctactcaagattcaattaattttttgcaact

SEQ ID NO: 19837 - DNA, 707 bp, Arabidopsis thaliana landsberg
  unsure (1)..(707): unsure at all n locations
gcctgttaaatctatcgtctagggtatttgactttcgcatgttagccacctgatgaaccctagagttgcccttataaatgaatccatccttaggacttctattagatttattagtatccatgttgattgcacttgcatttacctgttatttgtatcccatgttgattgtattttagttacttaaattcgtcacatgttggttctacgtgacncaatgatcgagtagggctcttaagttttcatttttacttgtttgaatcctgacctaggattgttactagaaacccaccatcattataatctggcttgacttagttgcttctgtacacgtcttgattgctagcaataatagtggacttacttgacaccccctatagctgcatcaacatgttagtgtttaaggggaattgaactgaacctcacattcagcataaataagtaggcctaaaaaacctacttatcaatttggcgcattgttacattcaagatatcagaaaaagttaagatcaagttcttttacatttatcaagttactaactcatcatttcgtctgcttgttattgtggtataggtactaatctttgtgcatgcaaactcgatccaaaggttctgcacacctactaccattcagagacagaattgacaaaatagctcgttagttagaagaaaccaaagtaaaggcagcctgtgatcaggaaagaccagct

SEQ ID NO: 19838 - DNA, 1275 bp, Arabidopsis thaliana landsberg
  unsure (1)..(1275): unsure at all n locations
ggatggtttagtagttgactcgctgtggatctctccgtcgcttcttttttcaaacactttcctaaaaaatcctttgcttgttccgtaagcgagcaaggcagctctggtaactcacctaaatatccgacccggtaaagaaccgaaaccgggtcggtaaaatccgccccaatccacggctgagacccggtaaccatctctatcaccgtacaacccaccgcccatatatcactctctttcccttgtctctctccacgcgccgcttctggagccatgaacgccggcgttcctctaaccggttcggttatttccggttcaacccatttcgcacacccgaaatcagcgatcttggcttctccgttctctccgaccaacacgttgcttcccttaatgtcgcaatgcgcaattccctttgagttatgaatgtactccaacccaagaagtatctggcgcgtgtacttcacgacccgagcctcgtcaatgaagccgccgttcttggtcgctacgtcggtcaacgttccgtacggcgcgtactccataagaagactgtaagtcgtagcttctccgttgttgtggaagggctctctcgtaatttcgcatcctctgtatccgatgacgtacggagagtttaatgaggagagaatcttggcttctctttgcaagaactccgaccggtgaaactcggcggattttacggcgagtgtttcgccggattcgtgacaagtggcggcggaaacggtggccgttgagccacggcctaaagtttttcctctagtccaattcatttggagaatgatactaaaaaagatttgagtaagaaaaaaaaaatggttttttttttttttttgaatgtttgctttcactctgttattgcaaagaaagtatatatatatatagaagggtttcagattaattttggttcggtaattagatagtgtatacttnnnnnnnnnnnnnnnnnnnnnnnnnnnnnnnnnnnnnnnnnnnnnnnnnnnnnnnnnntccatacacgtggagactttggaaaaaaaagttgattaccaaatgtgatccaatttggaatcttcgatgtgattaccaacaaaatatgtgtagagagaagaagaagtattagtacaaaaataggaaacgtgaccaaaaaagaggagtgacgcggcagtgaacgtatttaaggaaaggtttgataggaagtgacgtgacacttcgtacgaaatggtagagtctcattggcctttgtactcttttgagtctagaaggtgatgacgtgtcgaatttcag

SEQ ID NO: 19839 - DNA, 1049 bp, Arabidopsis thaliana landsberg
tctgactctagactcagtaaggatgtcttgatgcagttgatttatgctcggagaaagatcgttgaagagaggaagaagagatcatcagaggaagaagaagagaacaaagagtatgtgcaatcatatgttgatactctgctcgatgtggagcttccagatgagaagaggaagctgaacgaagatgagattgtgagtttgtgctctgagtttctaattgctgggagtgatacaacggccactgtgctgcaatggatcatggcgaacctcgtgaagaatcaagaaatccaggagagattatacgaggagatcacaaacgtagtaggggaagaagcaaaggtagtggaggaaaaagacacgcagaagatgccatatctaaaggcagtagtgatggaggctctccgacgacaccctccgggtaaacactgtgctcccgcacagtgtcacggaggacactgtcttgggagggtacaaagtaccgaagaaggggtcgattaacttcttagtggcagagatagggagggatccaaaggtgtgggaggaaccaatggcgtttaagccagagaggtttatgggagaagaagaagcggtggacataaccggaagcagagggataaagatgatgccgttcggagcgggtagaaggatatgtcccgggattgggctagcgatgctgcacctcgagtattatgtggcgaatatggtgagggaattccaatggaaagaggtcgaaggtcatgaagttgacttgactgagaaggtcgagtttaccgtaatcatgaaacatccgcttaaggctattgctgttcctaggagaagtcactagttacttcttttcttcggtttaatattcaaaatgcgtgcacttggtttggtggagacgtggtgtcaactacggaactagctaatttttagttatgtacattctttttttgtgccaaagttatgtacattctatacgttggaattaatgataaagaaattgttgaccgtatgtattcaagtgtatgttggccatagccacgttaagattcaaaaccttttgggaatct

SEQ ID NO: 19840 - DNA, 598 bp, Arabidopsis thaliana landsberg
agtccatgacatctctgtaataaattttttacttcttgttatttttcatttgttttcgttgtgtttatggttctcaggaacaaagaaacaacgtggagatggagtaaaaattcaaaacttttactctacagaaggcctggagatcgagtgtatagcccagtggagtgcaaaatttttaaaactttctgttgcacctggagaccatgaattcgagtatatcagtcaagtatatgtgaggtttaaaacccatattttttaaatcatcattatactcgaccaacaagagctacagagacttgtagggagtttatcaaatttacagaagatttcctaaagttttcccagtcaacagggaacaaagtccaaagacaagtcaacagagtgtggaccacgcgttttgttcctgaagaaaagatggagagagaatcacataatcaatctccaccacaccttttgaactcgaccacacattccctaaaagtaaaacctactcgacccatctctcttcgtctctccaccgacactccaatttctctactccaccacgaatcgccatccctcaccaaagagtcagtcgactcaacttcactcgagttcg

SEQ ID NO: 19841 - DNA, 416 bp, Arabidopsis thaliana landsberg
  unsure (1)..(416): unsure at all n locations
gatcctatagaatctgaccgagttgggtcatttttcagaaggggttctgagataaatacaaacagatttatttttgatcaaaaaaaaaaaaannnnnnnnnnnnnnnnnnnnnnnnnnnnnnnnnnnnnnnnnnnnnnnnnnnnnnnnnnnnnnnnnnnnnnnnnnnnnnnnnnnnnnnnnnnnnnnnnnnnnnnnnnnnnnnnnnnnnnnnnnnnnnnnnnnnnnnnnnnnnnnnnnnnnnnnnnnnnnnnnnnnnnnnnnnnnnnnnnnnnnnnnnnnnnnnnnnnnnnnnnnnnnnnnnnnnnnnnnnnnnnnnnnnnnnnnnnnnnnnnnnnnnnnnnnnnnnnnnnnnnnnnnnnnnnnnnnnnnnnnnnnnnnnnnnnnnnnnnnnnnnnnnnnnnnnnnnnnnnnnnnn

SEQ ID NO: 19842 - DNA, 866 bp, Arabidopsis thaliana landsberg
accaatttattttccatttcaatagacatttcacaaacattatcgtttattcctgaattcaatttcaacgattgggattagggtccatatgcgttatcgaatggccataatccaagaaaaacaattgtttccgaggtaccttatatggcctcaaatcttcttcttctttggaaacattgcgatgcttgttgccttagatgctaagaacaagcttcgattttgttgacggaaccttaataagaccttctaaatctgatcctagctttagagtttggtcacgatgcaatagtatggtcaagttttggttattgaattctgttactaaggagatttacaagagtattctgcgttttaatgatggtgctgaaacttggaaagatttgacctcaagatttcatatcacctatcttccaagttcttaccaatggacacaacaaatttggaacttacaacaaggagtattatattgccttgaagactttatgggatgatttggatgaagctatgatgcttgttttatttcgcctcaggcttttacctaaaagaccacacgactactgcaagtgcacagtatatcggagtagtatttgaggatctaatccacagggagtgtagctacaaggaagaattcaagttaggtaacctggatcaagacaaacgaaagagtggaggttgttgtatgcagtgagaataagtaaagaatgcagagaaagtaagaaaaaagcgataaaacgaaactaaagaaaaggcaatgaaagtagaaggcgataaagagagcggtgtaaaacaagtaaaacgaaatgctaggtcattgggagttttctccaggcatcatggttcaatgtaagggtatagaatgagagcgc

SEQ ID NO: 19843 - DNA, 1862 bp, Arabidopsis thaliana landsberg
acactttatgaaagtctaagttccaataataaacgcaagggtcgtgccattagaatacctgtggagttataagtctgcgaagaagaagctcttcatgacgccgagcgcaaaactcccaagaaagtatctagatagaagcaaagtcaagattaactaagcattagcatactggtgcctattttttcatcgctttacacaatttggaaccagagaattgttctagataccttcaaatcttgagaaaatatgatgcgaagatggccctcacggacaacacgaaactgctcgtgtacagtttcctgaactgcttttctatattctaacatcatcagtccattgggaaatctgttttctcgagggtgatccagatataacagctcatcaataataccacttgcaaatttgatttcaattagtctggcaagcacatcaaacgttgcctctgcggattaacacgagaagtgacagttagctactattttgacttaatagttataaacaataaaaagagaccaattagcatgtgtaagttgcttcattgtgctcaagtgaaggcacagatatataagtacacacaagaatgaaatttgcaactaacttaccaaatccctttccagacttggtgccgcaaagatcacactgccacatatcctgcaaacacaatgagaagatgatggacttatcaattgagaaatcaatgaagtgaaattcataaatagtacaggtggagaaaccgtgtgtatggctaaagatacagggatgcagaacactgatatcataaaaaatcaaaacacccagagctaaaaataaactgaccggagctgcctgtgggaacatgccaagcgcatggtgcccagcactttcgtactgtgacaagcacaatctctgctttgcacgaggtgaaaagtattctgccacaaatttcctccaataggtaatgcaattttcctagaaaagaggtatcagcgatgggtgcatagatgtgatgaaataactggaagtccataggttaggattagcttacagcaggccgttgctgcagatgatacaagtacatcatcaatttccgagcacagacgccaacttcataaggacgtacattaggaggaatctgttgggttccttgttgctgtaactgctgtctcagctgctgctgttgctgaagttggagtctctgagagggtgacatggattgaagcatctgctgatgttgcctcagtctctgctgctgaagcaaagcttgcatctgcggattcctccccgtggggtcctgacgctggatcaactgctgtaaaatctgctgctgcaacatatcttcttgcttcacttctaatctgggtttcttatccacatgggaataattgttctccctcattggaacagaaccttgtcctgtttgctgttgtagtagttgctgctgctgctgctgaggtaagtgttgcattgaagcagcagagccatcaagaaccaatgaacccggtatgttaacgctattcgaggagaaagacatcggtgatgttgggatacgcatattattattgatgccactgctcctctgcatatttagagcttccgtgccaacagcatcagtcaatgagaaactcgattcaacagctcccgagaccaccgttctgttcatgccccacccacgagagcagataacagatcaagccgtccaaatacaaggactgattcagcggaatgaaaagcttgaaactttaaacccctcctttcagaatctgagcaaataacaaagccaaacggatcctaagcagctatggtatactttcaccaatcaaactaagatggttaatcattcatgatccaagaattacaaatatttagctgaatgaaatgtaaac

SEQ ID NO: 19844 - DNA, 1286 bp, Arabidopsis thaliana landsberg
aagggagagatccctgagctcaaggaagagcttaattcccagtataaggttttttttatcttcttaatcttactcttgtctcattccatgtggatctgtgatccgccattattacattcacgatctctcggtcgatgatccttctctccttgtaatttagttatccttatacaaattttggtagatctgtgtagttctggattttgaattttgaattgaaattggtttcgtgattttgtgggaagtgcgatgattccgttcatttttcagtaactgattgggatataggttagaattggagaggaattggtaggtttttgagaatggctaatgtggagatgtgtgtgcaatctcgtagtaactttagtgaagcttaggttggtgaatcagaacttgttcgatctggatcagtggatttggatgaagagtttatgttaatgatttaagaaggaatggttcttttctgctttggctacagttttgttaacccttgttgtttatttactgttgcataggataagagaaaagatgcagttaagaaggttattgcggcgatgactgttggaaaggatgtttcatcacttttcactgatgtagtcaattgtatgcaaacggaaaatttggagttgaagaagcttgtttacttgtatctcataaattatgcgaaaagccagccagatcttgctattcttgcagtaaatacctttgtaaaggtaacactcaagcaactcaaacaaaaccacgtggcattcctttgttctgttctgaacctgaaggggaaaggaactgataaactgatcattacaaaatcattggtttgtattctgcaggattcacaggatccaaatccgctgattcgtgctttggctgtgcggacaatgggctgcattcgtgttgataaaatcacagaatatctatgtgatcctcttcaaaagtgcctaaaggtttgagtttctaatgttacatcttcattggaatctgatatcaaacatctttattgcccttaagaacctgtttcatcttgactagtccatcttttcactatcctgtgtatatttttgtgtttaggatgatgacccatatgtcaggaagactgcggctatttgcgtcgctaagcttttcgacataaatgctgaattagttgaggacagaggtttccttgaagccttgaaggatttgatattagataacaatgcaagggttgatgccaatgctgtagcaacccttgcggagagtgaagagaacagtagtagccccatctttgagatcaatagtaccactcttac

SEQ ID NO: 19845 - DNA, 519 bp, Arabidopsis thaliana landsberg
ccattgcattttcatagaaattgtttacttcgctatcttgatgtttctccaagtcttgagggaacctgcttttacttgtttcagccaagaagtagcttcctgataagtgtgcattttacatgttttaagcatccatttgtcatcactttagcatcatatcaccactgttttataccatttctcatcatttgtcatcactttgcatgtttaggatagttttgcatgcatattgcatatttgtgttgttttcaggtgatttggagatgttggtgagataattggaagaagtggacatgatcaaaccaatatactcaacctgatcaaaccaatatacttgaccttgaggtcgagcaccgtcatcctggacttcctgaagtactcggccacaaccaggcgtttcaccaacatccgtcactcgaccccctggtcgagtagctgccttcaccatatctcaataccactcaaccctctggtcgagtatgtgccctcaccatctcgatccaccactcgacatcatac

SEQ ID NO: 19846 - DNA, 1528 bp, Arabidopsis thaliana landsberg
aaactcagaaaaataaaaacgctgaatgacgataaaaatagggacgcttttgttcgaattagcgtgcacattatgtcacgaacgtagattcaagtcttggccataaaacaggattccttatagcatccaccaaaacacgagaaatcattctcaaaaacagtctctccaaatccgaactaaacaactcatagcccatataataaggtctgtagtgggatgcgtttttggcttttagaacataccaattggagaacacgctttcttacacatggaaacaaattacgaacgcttccaccaaatatgggctgagataagcccattaacataagacccagtaataaatatataatatgagcccatattaaatgaaccctaatccatttttagtttctatcatataaatagcttcttgtgtttttcacgcccttcttctttgtatttccgcctcccccgagaaaacgaaaaccctagtttcagaggcatctccagacaccgaaaatggcggaaggactcgttttgaagggcaccatgcgtgcacacactgacatggtgacggcaatcgccaccccaatcgataacgcagacatcatcgtctcagcttcccgcgacaaatccatcattttgtggaaactcaccaaggacgacaaagcctacggtgtagctcagaggcgtctcactggtcactctcacttcgttgaggatgttgttctctcctccgatggacaattcgcgctttccggcagctgggacggcgagctccgtctttgggatcttgctgctggtgtctccactcgtagattcgttggacacaccaaggacgtgctctccgtcgccttctcactcgacaaccgtcagatcgtctctgcatctcgtgaccgtacgatcaagctgtggaacactcttggtgagtgcaagtacaccatttcagaaggtggtgagggaaccgtgattgggttagttgtgttaggtttagtcataatactcttgtgccaactattgtatctgcttcttgggataaaactgtcaaggtctggaatcttcagaattgtaagcttaggaacactcttgctggtcactctggttacttgaacactgtggctgtgtcacctgatggttcgttgtgtgccagtggtggcaaagatggtgtgatcttgctttgggatttggctgaagggaagaagttgtattctcttgaagctggctctattattcattcactttgcttcagtcccaataggtactggttgtgtgcagcaacagagaatagcattaggatttgggatctcgagagtaagtctgttgttgaggatttgaaggttgatcttaaggctgaggctgaaaagactgatggttctactggaatcggaaacaagaccaaggtatctatttctcctcactctatcttatggttaattgtctagttctaagttctgtgaattagttagccgttgccataaaagatgagattttcataaaggaaggtctgaatactctcatgtgaagttagttcacaagatatgattggtac

SEQ ID NO: 19847 - DNA, 927 bp, Arabidopsis thaliana landsberg
aattcattaaaaaaaaaaacctcatctaaacaatcgaacttgattaattcataagccaacaaatttggaaaaaaatattttagtttattttaagtgttataaaaaatttgataattattttagttattatatttgaaaataggtaaaataggttcttaatatgtaacatgtacatttttgcatatttctaattcggtgtcacccatacaaaaaacaaatggcaaaaatcagaatggatagagaattaatccgctaaaatgtaaatgttaggcccaaattcggcccattacacaaaaatctcagagggttaaatacatcaccttctcgacgctaattcctccactacgtctctctctcttgctctccctcttcaagtcggctcctttattgctacaggtttgttgcttcttcgattcaattcttctttcgcctccaattagggtttgtttcgacctcaaattatgcaactttgggattatgtgattagaatttaaatttcggtgtttgtgaatctaaatctagttgattagcattcttaattctaattgttgttcatacgttttaacccaatggttcgtcttttagatcttctgttgtcatgatctggttttatgaaatagaaagtttcgttttttatgaatcgttggtgggtttttccttacttgatctgatctgatctgatctctctgctttatatcagtgaaaaagtttcgagctttagaaacaatggcggctttccccaacctcaactctggctctggattgaagaagctcgatgagcatcttctcactcgcagttacatcactgggttagaatctgttttctaagggctgtctcaattatctatctttttttaaaacaatagtagtaaccattactttcttctgtctctctatgtatgtatgtttataggtaccaagcgtcat

SEQ ID NO: 19848 - DNA, 485 bp, Arabidopsis thaliana landsberg
aaacagaatttttgtcccgtgggtttctttttcaagagtatacctgtggtctaaagcttgttgtattgtgatcctttgacgtgggtcgtagatgaacatttttgctagaagatccaaagcgtcatcacttgccatagggaaaatggtacgtaatggtggagcgggtgtataggagaattccatgtagcctgggaaatcaatcatgttagaccaatgcgaaggtactgtattccctagcgcgggatataactgtccaagacgctcaatctgagtgccaccatgaaaacagaattgatcatgttcccagcaattcccaatgcattggcccgacagactatgagccacaagatgaaaaagaacagtcgtcctagaccgaagtcattgggaaaaaacagactcttgagtcagaagttattttgaaccaacaggctgcggaacccgaaattactgctctcgcgatttctaaaaaaacccaaaagcttatg

SEQ ID NO: 19849 - DNA, 633 bp, Arabidopsis thaliana landsberg
  unsure (1)..(633): unsure at all n locations
gatatccttatatacggtcgaaatggagtaagataaatgttattatccttagttccatgtcattgtttaatctacctaacatcgtcacgattaaagcgaatcaccctaatgccttgcagatttatactttcaagtaaaggaggatgaggannnnnnnnnnnnnnnnnnnnnnnnnnnnnattatgtggtatgttgcacaagacattgatatcctatttacattattatatgttccaagtgcttcaaatccaagctttgtctatgagagatctgttattttttctgttgcagttgctaaagcatgtatcttctgacggtttattttaaattgaaacgcacatccatacatcaatatgagccttctagcttcaatatgtttctcttgattataactgactatactgatctgtgtagtttttatcctctatcttattctgtactaacctttaagatgttatggatgcattgcagcaagttatagttggttttgatacgatggagatgatcaaggaaatggagctgatgggactttctgatagtgactttgaaactccagatgatgaaagtggagatgatgacagtgaggaaacaggagaagacgaagatgaggaggtttaacaaattttgtttctt

SEQ ID NO: 19850 - DNA, 820 bp, Arabidopsis thaliana landsberg
ttcttctcccagatgtgtgctttgtcgcccaaggaaaatggaaacaaacggagcttgaatccatcttcattgacaccattgatttttgttaggttgtagagcctatcgaattcattaaggtggtcgagtggatcctccgttggcagaccagggaatttgttcccctgaatcatcgagatgagaccactcttaatctcgaagttattgttctggatagcaggtggtgcaattcctttcctctgaccatggtcccttggtgcatctccagtaccaatgttgggagggccattttgttgattttgtttggcagccatttcgactggttgttgtggtattaggttggctgtgtttctcctttctctgatgttgcgagctatgcggtcgatgttgtcgttgaaaaggaagttctggttgcctgttgatctagtttgcatacagtagaggtgtacttggatcaagaagacaacaagaaaaacacacagttggcaaccgaattgaatattgaaaaagaacatgatctaagcaagtctgaaatgtcaaatttaacaaacaaacacccaattggcaacgtcgccaaattgaaaataggtttttagtcaattatcctaaaacaccaatcatatcattgtagtattttaggttgtcattccaaatgggtgtgatgctaataatcaagatgtgatcagaagtcactaagtcaagccatgcaataacaggttttggtgtgttctagcagtcctgggtgaacatgcataaaacagaaaattaagcagaaagagtaaaacactcgaccaacacagctcattgcagagcagtgggt

SEQ ID NO: 19851 - DNA, 530 bp, Arabidopsis thaliana landsberg
gcaatggagatccgtgatattttccatataaacgcgacaacctgcagggatttcaattcgtggtaggcctccgcttcgacccacttagtaaagtaatcagttagcaccagcaagtatttctttgaacgtgaagggggcaatggtccaacgatgtccatggcccattgcataaaaaggtacaacgctgtcacatcactaaacattttgggcgacatatatttcatctaaccatgccgctgacatggttcgcaatttatctcatatgcttcacagtcggctagcatagttggccaataatgacattctttcttaatcttgagtgccaaagcacgtccaccagaatgatttccaacatctctgtcatgtgtttccttcatgataactatagcttcctttgtgttcaccctcatgaaggatgtagttcgcgacttttgtccttagatgtcaagcctcccaccgatctactggtacttctccatcagctatataaagtttgattggatccatccaatcggctggttgtggatcca

SEQ ID NO: 19852 - DNA, 1099 bp, Arabidopsis thaliana landsberg
gcaatttagttacatatttggcggtggcggacaacgcattaattttaaaacttgttgggctctatgggccgtagcgaatttgcaagactttataaaagcccaatagtttaatatactaaaagatacaaaacttcttctttttgtttttctttaagaaaacaacagatgatatacatacactcacactcacactcacattcacacacaaaagagacccccaaaaatcgagccttaatctcgtcaactaccactacttaactcacatgaccaatctgttctcacatctctaaatagatggatctccatcgagatcatagaccactactggaacatatgattagtattgatggacctctggctttcagtttcttgatccagaaatgttctgatctgttgtctcaaccagtggttgatccacttgactactgcttggaagttcagctgtcctattgcttctcctccatttcgaaaactcgactatacctgttgtaccgctcatggtgagtccaaacccaacgatagtggctaagagaatggccacaaccggctgcatgcgaacctgcacaagtataaccgacatagactgagagttagaatacgaaacagagtgtcttgttctgttcttaacagataaaaaaactctcaccaatgtgaagaaagtgtgagagaaaaaaacaacaagaccgaactgagttgtagcgtaaatccagacatatctcttcggcactgcacatcgatgaccacataatcaattaatctgatagcttgtgtactcagaactattgggaggcaaaactttttgagggtgaactgtttactgtaatcatttcttacccattgttgttgccgtcatcgaagcaaaaagaccaagaacgcacgagaatggtaaagaaactgcaatggcgccagattgcatttttgtaagctgtaaaaagtattaagaacaagacgatgttacaaaagctttatactaacaagtgtaagagtaaacaattcactaaatcttaccagaagctgctcgagaaaacagaagtatgcaagcatgcttacaatcacaagaattggaacatcctgccataaactgagaggacgagaaccg

SEQ ID NO: 19853 - DNA, 1267 bp, Arabidopsis thaliana landsberg
gacatatcctgcgagtttccaacaactacctccgagagccgtcaacgaaaactcttcctctcttgcgccgttgataattccgatgacgtgatcagaaatctcataacgcatcttgagtcatcttcttcgatcgaggaacagaagcaagctgctatggagattagactcttatcaaagaacaaaccagagaatcgtatcaaactcgctaaagccggtgctattaaaccgttggtttctttaatctcgtcttcggatcttcagcttcaagagtatggagtcactgcggtgttgaatctatctctctgcgatgagaacaaagagatgattgtttcttccggtgcggttaaaccgctcgttaatgcgttgagattaggaacaccgacgacgaaagagaacgctgcttgtgctctgctccggttatctcaagtggaggaaaacaaaatcacgattgggagatcaggagcgattcctttactagtgaaccttctagaaaatggcggattcagagcgaagaaagacgcgtcgacggctttatactcgttgtgttcgacgaacgagaacaaaaccagagctgttgaatctgggattatgaagccgttagtggagttaatgattgattttgaatcggatatggttgataaatcagcgtttgttatgaatttgttaatgtcggcgccggaatcgaagccggcggttgtggaagaaggaggagttccggtgttggttgagattgttgaagcgggaacacagagacagaaggagataagtgtgtcgatattgttgcagctttgtgaggagagtgttgtgtatcgaaccatggtggctcgtgaaggagcggttcctccgctcgtggctttatcgcagggtagtgcgagtcgtggtgctaaggtaaaggctgaggcgttgatagagcttcttaggcaacccagacaacaacaacaacaacaacaacactttgaatctaacgacaacgagagataacactttagtttgggctttttattaatgggcctttgtagaatacatatcttgttaattatttggacggcccaagctgaacacatatcttgttaattattggtcgatgtgttttgcatcaaagttgcattacttgcgtagaatgatctatacaagagtagcatcgaaacaaaacaaatacacgtactgtctatttaggagataatgttgtgaacgatttagagaacaaaatccctatagaactaacaagacaaaaaataaaaaagagcaatagattctttcacaaaca

SEQ ID NO: 19854 - DNA, 575 bp, Arabidopsis thaliana landsberg
gatgttttaaagcctcggcttcgatccttctccgataaagatagttgcaaggatgtcaatatcttgccaaaagttgacgttgttcctttacatcttggactcaacaacaattatgtttgtgaaagtagtattacatgtaacaaagatgagcaaaaagataagcttattaatattaatctattggatggagataatatgtggtgggaaagtttactgtaggcagatgtgttgggtccagaagctacggaaacagcaaagggtgtgaccttaccgcttgactttgagcaaatttgggctcggtttgatgaagagactttagaactgaattagtgttgctccccatttttgtttgcacgtgtgtatttatgtttctgtggatgttttttatattgcaatttttaaaaattgtattattaaattcatatcaaaggtggcagcatttgttacaatataacttaacacgaattcaaacccgagaagataacgtctaatgcctcatccccagataaaatgagagtcgtttctaaatataaagtgttgtatgaggtgatgcgatgagagtgaagaaagggatg

SEQ ID NO: 19855 - DNA, 661 bp, Arabidopsis thaliana landsberg
agttttctcgtgtaattatttttaaaataaaaacataaaattgaaatttgtattatcagccttgtgggaaattcctcggctgtaaaaatagacgaatgtatatcattgtagtatgtacgttctgttttttttttttgtgtgtgtcaaaatatgtacgtacgttctgttttacaataaaattttaaattgtattcataatttacctcattatcagaaaaattactgatctggctaaaaaaaatctatagtaaaaactctataaattaataatgttgggaccataaaattttattaatttatattgatattaatttattttataaatgaataaatattaatttatataataaactaataaatattaatttatagaaatatttacgtaaaatacaatactaaattattttaaaaatttttttttatttagtttttcttatgttttgttgtttgtatattcaattatgttaagttcttatttattttttaatttatttttctgcaaagatattgtgaccgtatatctacgacgttaacgtgaggcttaatcaaatttttctttacacaaattttagcaatgatttttcacatataaaaaatgttacaaaaccaaatatgacggatgaaagcaaagagttatgtgagtacaaaagagatcatacaa

SEQ ID NO: 19856 - DNA, 867 bp, Arabidopsis thaliana landsberg
gagtaaaaatttcattctacagtattcgaaaaaatacaaaatggcgaaaatctaccggaagttgacaggctacggtggtgaaggagggcgtgaatgggacgatgatgtatatgagggtgtaagaaaagtgtatgtaggacaagatatcaatcgtatcacttacgtcaaattcgagtatgtgaaggaagacggccaagtagtaacaactgaatatgggaaaatcattcaacaacccaaagaggttcttcacttcatttaccctctcatcacattccaaattttctacatcaaatatctaaaactcacactacaacactataacaaactattatactacaagctccgatcaattataagttcttttcgtgaattttagtttcttgatttttttggttagaaattttaatttcttgattgaagaaatgatatttaattcataaacagtttgtacttcaatatccggacgaacatatcatagcggtggaaggaaactatcgcggagtggctctatgtgccacagaggtgatcacaaacctcgtcttcaagacctcaaagggtagaaagtcaccactgtttggtccaaacttgcttggaattacgaccggtacaaagttcgttattgaggatggaggaaagaagatcgtagggtttcatggacggtcgggtaatgctctcgacgcgcttggagtttactttgtacatggctctctaacaacgtctccgcctgtttacaagctggatgcccaaggtggtacagacgggcgtgtttgggatgatggttcttacgacggcgttcaatcgccgcgtattggtcaagataattctagtattacaaatttagagttcgagtacgagaaaggcggtaag

SEQ ID NO: 19857 - DNA, 746 bp, Arabidopsis thaliana landsberg
agatatgatttatagtttttgagaaactagttgataatttgatgaattataaatatgttacttgtctgaaaatacaatctttcaccaaaagatttagtttcaattgtagtaagtgcgtagtgcttagttattgaaaacctatgggcgaatacatagtggtaaatatcatcaatttgctaacacacatttttccgccaactggtaactacccatgtacgcatataaatatagaagcatgagttagttccaaacaacaaaactaaaacaagagaaaaatgctttcaaagatgaagctggtggttctcatgtcgttcttgcttctgcttccattgtgttcatcgggtaaatcaatttgcatatttgtatatagattatattttcaaacatctaattaagtaaaggaatggttacagttgcatgattaaaggtgtgaaaaaactgtttattttatattcaatcgtgttacatttttaacatatatccaatatctctctagtcagctagttatggatttcaatcaaataatatggttgtttattgcatttacttgttttttgtaggatttggagagggccatggagttactcacaccaaccaatattccttaaacaatgtaagaaatctcattaaataaaatgcttattttcatacagttttagtttctctcatatttattgactaataagaaatttagtccataagtactttcagtcttttgaaaacaaaatcagcatatgctaaatatt

SEQ ID NO: 19858 - DNA, 1011 bp, Arabidopsis thaliana landsberg
atcaggcaaatccaagcagttctcatatgaatgctgtgaaacgtattctcaaatatgttaaaggtacacccgatgctggtctgttttattctaacaaactaatcaaaatcttgttggattctgtgatgctgattgggcaggaaacctggatgatcgaagaagcacaacaggagggtgtttctttttgggaaacaacttagtttcatggcacagcaagaaacaaagctgtgtatccttatccactgcagaagctgagtacatttcactagggagctgctgtactcacttgctatggatgaaacagatgcttctggaatgcggtatgccctctaacaccctgcttgtatactatgataatatgagtgcaattaacatatcaaagaatcttgtgcaacattctcgaacaaagcatattgacatcagacaccatttcattagtgagcttgttgaaaacaagattgttgaaaacaagattgttgagatctctcatgtttcctctgaaaaacagttagctgatatatttactaaaccataggattgggacagtttcttgaatctgaaaaaatctattagtctgagtgaatactaatgtgtcttggtgttaaagctattgcaacacgttccgttgcccagagttgcagcagctttgtattttcatatgtatatatatatatatatatatatatatatatgtattgtgtctgtctttctggcacttcatttcaggaaaatagctgctcttcatgctcttcctcaatgaaatttccaaaaaggatgagtgtggtgtgtaataattttaaaaaaaaaaaggcaaaaagaaaagcccaaaagaatgaacacatgaaagttcaaaagaaaaaaaaaaggggaacatgtgtgttggcaggaaagggattggtattctttcttatctttggagtatatgtgtatctatgagtaccccctcaaatcatccttcttcattacaggctctaccaatccccctcgtcgttttgaccacacacatcatga

SEQ ID NO: 19859 - DNA, 767 bp, Arabidopsis thaliana landsberg
  unsure (1)..(767): unsure at all n locations
tctaattgcttttggtttcttttaattgaatagatagcaaaaatattatctgagtcaaatttaattttaatcgttattccaattttttatttttctttttatatgtttttatgtcatatatgtttatgatttaagaatttttaataattattatgctttatcaaatcgaaatacttataatttttcattttaaaactaactttttttttttaaagaaacccagttaagaatttcaccattggacaataaatataataaaaactcaacaaaatctctaaacttcaaaataatcaaaatttattcttaaaaaaattaaaggattccacattaggactccaccaatgggggtgcttttactgtcgctaattctaacatgtttgcattcaaaaccgcttattaattgacattgttactatatagagcataaaacggtgctttattggatgactattgactaatataccaaatgtgactatgtgagtttatgatttagttacataaatatacagatatgtttatctatttatttatagaaagtctttcaagaaagctacaaaaattaaagaaataaagagagtatgcctatctgtacgtcggtggctgtatattgtgaaaacaattaatgtcgtatattattgcangtacttanggatcagggctgacactacgancagatacgtatcaatgcacacgtccaaatntttattttttttgtgtacaaatggtcatggtctccagaccgtgacattttaaaaaacattatttga

SEQ ID NO: 19860 - DNA, 1362 bp, Arabidopsis thaliana landsberg
gccccagataagatatctcactgttgccaaaagaacatttctttacattggcataaaactgatgcttcttcattatatccaggactttcttgagatgctcgaggtgggtttccatgtctttactatatatcagaatatcgttgaagaaaacaaggacaaaccgcctcaagtagggtctgaaggcatcgttcatgacagactgaaaggtggatggcacgttggtaaggccaaaaggcataaccaggaactcgtaatgcccttgatgtgttttaaaagccgtcttctccacatctgtagcccttacacggatttggtgatagcctgatcttaagtccagcttggagaacacagttgctcccttcaattcgtccaacagctcatccaccaatggaattggataccggtctggaatagttacattattcagcgttctgtagtccacgccgaatctccaacccccatctttctttcttaccaacaaaacaggactagagaagggactaatactcggccttattatccgagcatccaacatttcctgaaccatcttctctatctcatttttctgcaaataagagtacctgtaaggcctgcaattgactggtggtgtgcttgctgaagggtgatggcatgtccctgtttcgagcaggcggaagtcctgttggagttgagaagacttcctggaattgtgagagaatgccctgaatctcagctgactcctccttcttctcttgcggttctgctgcctcaaagagagtagttagctccaatagatacacttcttgtttcttcttgaccactctactcatcgcattcagtgatataggtacttggcacagactaggatctcccataatggtgacccacgagtttctgatcttccaactcaaggtaagcagcccccagttagtccttgtatccccgagtttagctagccacggaaaccccaaaacaacatcagttccacccagctcaaacagtaagaaatcctccatcatctccactccttgtacttccaacatcacacctgaacacttttccttgccatggaatatatgaccattagccacccttactgcaaaactctgagtattggtgctagttaaacccaactccggtgctagcttgtgagataagaagtttgaggtggctccggagtcaatgagtatcaccacttctctacccccaattctacccttcatcatcatagatttctcggatgaaattccacccattgaatgcatggtctccacttcagtctcaaaggcattctgttgctgaacctcttgtttcatttgttcaggttccagcccttcatcctcctcaacgttctccctcacgtccatactcctgaccctttgc

SEQ ID NO: 19861 - DNA, 1914 bp, Arabidopsis thaliana landsberg
agtcgttgataaggacagtgtagtcatcttcagggtcagcgtaaggaaccgggatcaatagtcggctgttcacacgaaggccaccaaagccaccagcggcacgatgcatggctgtggtcgggtagtagaagtagctaccgatttgatcctttggctggaaatggtatgtaaagttctgacccggagggatcggacacattgttccagctgttccatcttgccagcagttcttcctgtgctggattccggccctatttataaattttccaaataaaaccccaattagaaaatattggtaccgttggacataatttcatatcaaaccatatatggttgctcgtataaaattttaagaatggtcgtggaatatattagatatgcgtaccaggtgatgaggaaaggctcgtcgaggttgttgaagacattaacgatgacgttgttgttagaagtcgagttgatgttaggaccagggaattgaccgttgatgaggatgacttgttgtggaacgccgagaggagatgcggttccgtacgtcacgttccacacgtggtggaagtaagggtcctccgcttggaccatcatgacggtcgccgtggccacgcaaaggcacacggccaaaagtttaacccctcccttcattaatagtaaactttattattagtaaagtttatgatttttcttttcaagtgttggaaagaatgggttttttttctttttgttttattatgtttttttttttgtttgaatttcgatttttttcttcaaatgttaaatgacattttatagtttaatcgaataaacagtttcctgatttttctcgtttcttcaggtccctttcatcacgctcttcctgtcgtccatattaggaatattcaatttgacctctcgctatttttggtgaaactttttttctaaaaaaaaaaattctaagtttttttgagaattttgctaattttggagaatagttgttgagtctagtcatatattatacatgattcataatactaactcgaacgactaaactttatttttttcttatataaaccaatttggttatgatttgatctcatatcaaataattgacttgtacatcaaatgacttatagtagcactatagtcaaatgatagaatataaataaaatgaagtcatagaaacataaaaagatgggcttggaagattaatgacgtttcagtttttctataaatatttctgattcgtccattataacaacttcttttgcaaacatgaaaacatgagatatgtggaatactaataagaaataacagataaaaacgtttaaagtgataccattgcgtatacaataaagtttaagcgtttaaagataatgcaattttcaattatatgctctcgaaaatagttatacaattgagtgactaattaaatttgacatgagaaagtgcggaaattttagactaaaaactactacaaagaaaccaagctatcgagacaaagaataatctcagaattagaatactccatcgcaaaatataattatcacaactatttctatattgggttagcatgtcaaagctaattcttatgacgtgagaaattcatttatcgagtttagagatactttttatttggtcatagttttgtcatgacatttattttcgggaaacattcttttgacgtagaaaccacttattaacatctttagtgacatttccaatattagaatacgatgtgagttgtattcattcaaagttctggaatcttaaaaccataaagagaaacaggtagaaatctatttgttgtcactatttttcttatatagaaaatgaattagagatgaagcgtaaaaattggtgacgttaccttatagaagaagttatgttttaccctaaataaatacttcaaatcacaaagttaccaaaggattcattaagagc

SEQ ID NO: 19862 - DNA, 1861 bp, Arabidopsis thaliana landsberg
  unsure (1)..(1861): unsure at all n locations
acacaaaatatatggtatttgtggattttcagatttggtcatatttccttcttattataaatatgcttaattggagacattgaatatagaaaaaaataatatttggattctcacatctttatctagtatcattgatttttcttatctaagactacaagttcagaccctcttccacattacaaaaaaacatatgaaatctaagtgaaaatgattagtaacggccatggcatgaggaaggtgaagttttcttagatctggaacaacacgcggaaaatttagttttcccgccttgttgtcacagatccaagcaagcttaacctttcttcttgccatgaccttcactgagtatctaaatcttgtaccattataatattttttcatgtagacgtcaacctattagttggctatgtcatgagaaaactgaggaaggtttggatcgggaaacataaacccgaaagtcagttttctgtatttttagttttcgatccaagcaaacttcaaacttcatttttccataatcatcattaagtatctaaatattgaatactttgttgacataaaagttcatttgttagtttaattgaacttttactaatcttaggatcatcttgggtacatctggcatatgtgataagtaataatttttgtgtaataaaaaaacaatttgtgttattagtttatcttcatagtgtatgtgattataaatatattaatatactattttaaatatttattatatactcttttatatttaaaatgttcatatatcttttattaatatgcgcaaatcctatacaaaaatctaatatccacaaagtaaaatataaattcaaaaaaactgaattgaaaaacatcatccattcatggcctacttcttcatagaatccaaaaaccaagttttgtgggttttcttttaacaatttaagtgaatttttttttttttttttttattaatttaaatatgacattttcaccatttaccaatgcatccaaaactaaaaccctattctatgggtaaaatccaaaactaaaaattaaaatagataacagattttttttaaaaatataaatattatgtagaaaaactaaaaactaaacaataaccattcaagattttgcaaaaactaaaatctacaacaaaatcaaaaactcaaaaattaaaaatgataaaccaaaatccaaaaaccaaaaactataaatcaattaaaaaaaactacaaaacattcagagccaaactataaagtttgtatttctaaatcgttcggagaatctgtttactatatactacgttacttaatcactttgactaatttatttgatttttacacttttgttcactgaataatttatttgatttttacacttttgttcactgaatagatcactgaggattgatcattttcatcgcctatttatattttataccttctttcgcaatttttccatctttaagaatcatttatgggatgttgatgtggtgtcaaattagacctaagctattctctcaaataagagatcaattgtaatactttagggtcgatttcacaaagttcttttgttaacacaataagaagtagtctcgaaattaagctaaatcaatagtagggaatttaaaagaaacaagtaagcaaagcagattggttttaaattcagatgattaagacgtcagatttaggaaaattctcagaaaatagacaaacagtgaatctagctatgattaggatcgttatcaaaccattctagaactcanatcacttacctatggccaaccaaccctccccgttgattaactatgctaagcaataggaattataactctcatatgtaaatccctaatcctaaacatccattattatcatgt

SEQ ID NO: 19863 - DNA, 696 bp, Arabidopsis thaliana landsberg
catatttgcactaataatgctaagtgaatatgctattgcagtatgtgatcgtagtaactattctacgggagatgagttgctagtgtccttgcgtcttattcctacctttcagattggagacgcgattccaattggagaagagtatcagatggaagaagcggttcgagcctcgttggaggagaccaataatattagtttgaggcccgcaagcaagctcgtggtcaagtctttagccaggaagatatacaagatgaccactagttctactggtgaaatgtgcataatttgtttggaagagtttagtgaaggaagaagagttgttactttaccttgtggacatgactttgacgatgagtgtgtcctaaagtggtttgagaccaatcacagttgccccctctgtcgtttcaagttgccatatcaatgaactagtttgatgccgtcgcatgagtctttttccgttttgtatccgtgtattttccgatgtaacctcgttcctaacgctctttgttaacaatatcgggtcaaaccttctttgtaatgcttttttaaagttaattaatataattaattaaattttagaaaaaataaattagtttagcaacaaaatctgtagattggatttaggtcaattattctaattttcggataaaaaaaactattacttatccttttttcttaaattttggaaaactacaa

SEQ ID NO: 19864 - DNA, 666 bp, Arabidopsis thaliana landsberg
ggataacgtttggaagcctactcaaaaatttgtgagcaagtgaaattttagagagagggaagaaagggaaacaaatcaagtgtaggtcaacacaaatgaacacggtgatttatttacggaggttcggttccaaagaacctagtccccgttgaggaggccataaaggcaggtccattccaaccctttccctctctcagtcggtcacttagaccagtcgaggttcttcttagtcacttgggtcactaaaaccccgcaaggatcaccacacacttaggtgtctcttgctagctttacaaagcacttagagaataagaatgagaaggagaaagcaatccaagcaacaagagcaacaaaagaacacaaaacaccctctctcaagtcactaagcaattgagttgattttgaggcttagaggggatttgatctttgaaatgtgtcttggagtgaatgttattgctcttgtattgaatgtgaagttcagaaaacttggatggcttgaatggagggggttgggggtatttatagcccaaccactattctagccgttgtcgatggcgcacccggacatgtcactatcactgtctggtacgtgacttggaggcttaaaggggatttgacctttgaaatgtgtcttggagtgaatgctaatgtccgtatatgaatgtg

SEQ ID NO: 19865 - DNA, 585 bp, Arabidopsis thaliana landsberg
  unsure (1)..(585): unsure at all n locations
atatagtttgagttaaactaatgatagggaatttagaaaatacttactatttagaacattttcatcataactctgggggttaaccccttcaaaatatgctagatccagaaaaacactatccgannnnnnnnnnnnnnnnnnnnnnnnnnnnnnnnnnnnaaagcccattcgatagctcaaactcgatatcttgtacttgccatacgaaggactcaaagtgaaggtatcaatgatcatccaatcaccaacctttagtgacatgttaaacttgccaatataatgctttctaatggtaatctgcatcttagatccctatatcaaaaccaaataaacaaaaacacatacgaacatgttaaatgtttcaaacagaaatagatatagattcatatatttaatcaatagcattctctcatacattttcatcacatataatgacatctaacgtcaatttgtttgcctccatagatgaaggatcttgacacggacacgccaattcgttttgaaaggcttgacatcactaagatacgttaaacctgaaggtaaactcattgattatgtgtatagatgagaaagaaaagtgatgct

SEQ ID NO: 19866 - DNA, 1214 bp, Arabidopsis thaliana landsberg
agctcattcacagtgtcatccatcatcaaacagaatagacactcaagaagacacctttcttctctagaatctgtttaaacaaggcaacgcagaacaaaaacgcaaatagtcattaggtgtgtctgacagaaaaatcacgcagaaaaagttaagaaaggtctaatttttgaagcatttcaaatcaaaataagtaatgagaactccattcctaaatcaacctccctaacgtaaacggataaaccttagattcagagtttcagatatacaactaataacagtcgactaaccagttgtgatcaacaaagagcaacaaaaagcaaatcgcaatcttcggcggcggtggtggagacttctgccggagaagaagagaatagaaattatttttattttctactgtctctaatgtaaattagtaaatatcgatttaaccttgtaaccattttcgcggtaaatgttaaattggcaatatattttggcgggaaacaaatgtataattattaatcaaacaaagtgacaaatgtaattttataaccgaatttggaaaaagatataaggttgaatctatagtctgcagagagattgattgcttgagtctaaaaaagcaaaacagcaaaaaccacatcacattacaagaacatatgcaagaattagtagattaattttaactttttttttttttgtcaatgattaattttcacttaaactacacaaaaagtgagaaaaattacaacataccaagctacaaaatatttgttgtttcatatcacatataagaacatcatgatcataagagaaagtcataagattcataatcaaaagatgtaccaaaagctaaccagaaattaatacttggcacttctcgtcttctcttctttcagttcatctgttcaacagtgtataacgtttataggtgttgccctaaactcaacttttgaattgtcttccaactctccgtacatctctttcgttacacgcgttgcaggaaccttattcgagaatctgatcctttccgcctttgggatcgtaaatattggttccgacccatcatcctcgttagaagtatactccgtacatgccctaaacaacctatgttccatatcattacgatcatcagaaacaggttgttgcgtcagcagttggaccttatagtccagagtgtcatcaagaatttcaacaatgtcataaagaccgaattccaagcgatcgacatcaat

SEQ ID NO: 19867 - DNA, 637 bp, Arabidopsis thaliana landsberg
  unsure (1)..(637): unsure at all n locations
aaacgtatgggcgtaacttacatccgaaatatagttcgaaaatagaaatttgtcacacatttacaaggagcacattgctcaaatataataaagaggaagggacattctccaaagaatttcatgaaaccattctcagatgttttcaagataacacgtgtcttttttattttattttataacatggcatacctacactagataaaaacgaagttagatggcgtttctagtctcctgaggctggtatacatattcccaactactgcaagatgcactatctattcttctctctctctctccctctttcaaattatgaattaagaaatctaaaagaaataaaaaagagaattgaagatagtgttgtaacctgcttagaccatctccaatagtatttcatttttcactttttccttcattttgaaataaaaaatgaaaaaatcttctccaatagtacttcatttttatcttcaaaatgaagatttgaatagtgtatctccatatttgaaggtatactattcacatcttcaaaatttgaagatgaacttttctatttacaaaatgatccttaaaattctaacaaaattttattttgcaccaaacacattatttatttntatttaatcccatcaaactaaaatgc

SEQ ID NO: 19868 - DNA, 537 bp, Arabidopsis thaliana landsberg
  unsure (1)..(537): unsure at all n locations
aattctagtatacatttcaattttttttttttttttggtgaagcttgatactacatttatgaaagatgcaacattggcaccaaagaatgctagtttcgactacataatcatcggaggaggaaccgcaggttgtgcattagccgcaacgctctnnnnnnnnnnnnnnnnnnnnnnnnntgaacgcggcgggtcgccatatgagaaccccacggccactgatatgggcaactccgtcaacacactcttaaacaacacaccaaactcatggtcgcagcttttcatctcnnnnnnnnnnnnnnnnnnnnnnnnnnnnnnnnnnnncggtggagggtcggtgataaacggaggattctactcgcgtgcgggcaatgattacgtggaggaagctgagtgggagatggaagaagtggaagctgcttacgagtgggtcgagaagaaacttgtgttcgagccacaagtaatagaatggcaaaaggcgtttaaagatgggcttctggaggctggagagtcttcggacaacggtttcacgtacgatca

SEQ ID NO: 19869 - DNA, 498 bp, Arabidopsis thaliana landsberg
atatgtgaagtgctcgacgatgatacaacagtaagttttgccattgtttctccccctgttaattgagtttatttgataacacatcatcattactaatatttgttttggctcatgtttcaggataatagacgttttatagggataaatttggatttatataagaatgaggaagaagtgaatataagtgagaaagcacttgaaagaatccatgattttcaattcgttaaaatcaacctgagacagaaactgcttcacttcaagattatacatcaacctgagagagtgcagttagcactagaagatctgatatatcactctccacgaattagatcattgaaatggtttggttaccattaatccggagtgcagaatatatgtttgccttcaacttttaatccggagtttctcgtcgaactagatatgagttccagcaaagctatgggaaggaactaaagtaagtgattttgatgaaaacttttttttttttttttaaatcta

SEQ ID NO: 19870 - DNA, 793 bp, Arabidopsis thaliana landsberg
  unsure (1)..(793): unsure at all n locations
agaatattatctaacttaaaatatttccgaatattttatgttatatgatctttgaaaattcntgctatctctacaattatgcatcaaacaatcttgaatcctaatatcccgaaacaataattctctcaatgacatcaatataatctcaaaaaattgcggtttaaccaactaaggttaaaatccgttacaaacattatgtttccctcctaatacatcaaaggatctaatattcgtattttccaatttttcagtagagattctcatacttgcaggttacagaaaatctcaacaattactgtcattaacataattagctcatgaatctataatttttaaacgcaataagattttattccatttcagttaataagtagaatattttcttatcattcctcactaattcgtaaacctaatgtgtaccagtatgtatataggtattgtgacctactcattcaccatcattcacctcctctaatggttttttagctgccacatttacataccttactgatgtccaaccttacaagatgtcctcgagagtgtaggtaaagactcttcatgtttggcgtcaatacacaagcaacataggtgaaacacttgaagttctgttctctgatgaaaatgtaagaaacaattacaataggtatatgttggtttctaatcatgatacatagatagcacgtctacaatattaatattctgtttctttaatggatggcaaaaagattcattgtaccctgaaaaaagatttggtgagttagtacgctcacatgctaaccattggaaattgggt

SEQ ID NO: 19871 - DNA, 518 bp, Arabidopsis thaliana landsberg
cgatcatggatcatttcctcctttctcataatcttgaagatctagatcattccaacaccgtaactaacacatcaattgtgaccaacgatcatggatcccaattcatccaattcgtcaagatctggcttaccagttcagatcccaaacgatgacgttatggatgggcacctcccaacggatctccctcccgagcccaggttgatgctatccataacactgacacagagaacgtctcccaaaactctaattcttctggatctgaccaaatcactccccttccgcaaacaaggggcgaagaacgaaacgtcacgatacagcctccaaacggagataacctggccaacctgtctaatgaggtccctccgcgacctgccagcgaattagccgagctccgcgcaatgatcatgaacttgatcaatttaaccaaaaaccaagaaattgcgcatcgcaacctcgccgcgattgtgggtcagcagagacgcgatctcactcgcatgacacatgaggtagagcgcgat

SEQ ID NO: 19872 - DNA, 537 bp, Arabidopsis thaliana landsberg
  unsure (1)..(537): unsure at all n locations
aataagtcacgagcagatccacgaagctgctacacggtgaagcgagtcttggtatcatcagggcagtctcccgtgaggaggggaaacttagactcaacgacacggagccacacgtcggcgtccagtggatcctctgccttggtgaacaagggcggctgcatactcaggaactcctggtaggttgccgttgccggaggtcgctgctgctggcctccaccatactgctgagggtggggctggcgctgcaagagctgtcgtagaatctcattctgttgggccataagctcctgcactgtgggaactagaggaggtggcgggggaacttgcttgttttgcccgcgacattgcctagctgccatctgaaaacagagatggttgccattgttatcacaattcacaagttcgaacgacatgctattatctcatatggaaagaagattgccataatcataacattaagttcgaatgaagataacatggttacaacatccgnacagattcaaaagttctcaagggttacatcaattaggggaaagt

SEQ ID NO: 19873 - DNA, 5024 bp, Arabidopsis thaliana landsberg
gaagaagatcatctgaacagtgctttaaccaaaagtagtgagatgggtttctgcatttggaaacattgggataccagaagctgttagactcccataaagcaatggaagaatcagaaccctttgaggatttgaatggaccagcaacggaggtaatggtaatgagcgaagaagggtcaacacgagttcaacctgcacactcgagcaaatactcgatcttgtctgccaacgaatttggggagccgatcatcccaacttcagatgactggtctgaactgaaggcgccaaaggttgatctaaaaccacttcctaaaggtctaaggtacgcattccttggtccaaactctacttaccatgtgatcattaatcctgagttaaatgatgatgaagtgaacctgctattatttgagtttagaaagtataggagagcaattggttattcattatccgacattaagggaatttcacctagtttatgcaacgataggatccaccttgaaaacgaatcctattctagcattgaaccacagaggaggttaaatcccaatttgaaagaagtagtgaaaaaagaaattttgaaacttcttgatgctggtgtcatctaccctatctctgatagtacttgggtttctccagtgcattgcgtccctaaaaagggtggaatgactgttatcaaaaatgaaaaggatgaactgatccctactagaactataacttatcatagaatgtgcattgattataggaagttaaatgctacatctaggaaagatcattttcctttaccattcattgaccaaatgcttgaacgcttagctaatcatccatactattgttttcttgatggatatagtggtttctttcaaataccaattcaccctaatgatcaagagaaaaccactttcacatgtccttatagaacctttgcttataagagaatgccctttggtttatgcaatgctcctgcaacatttcagaggtgtatgacctctatatttttagatttaatcgaggagatggtggaggttttcatggatgatttttcggtctatggcccctctttctcctcatgtttgttgaatcttggcagggtattgaccaggtgcgaagagacgaatcttgttctcaattgggaaaagtgtcatttcatggtgaaggaaggcatagtgttgggtcacaagatatcagagaagggtatagaggttgacaaaggaaaagttgaagtgatgatgcagttgcagccaccaaaaacggtgaaggacatcagaagtttccttggtcatgctgggttctacagaatatttattaaagacttctccaagatagccaggccgttaaccagactattgtgcaaggaaaccgaatttaaattcgatgaggactgcctcaaatcctttcaaaccatcaaggatgctttggtatctgctccggttgttcgagcgcctaattgggactatccatttgagatcatgtgtgatgcatcagattacgccgtaggagctgttttaggccagaaaatagacaagaagcttcatgtcatatattacgccagccgaacgttggatgaagctcaaggaagatatgcaacaactgagaaggagctttagctgttgtattcgcatttgaatagtttagaagctagttggttggatttaaagtcactgtctatacagaccatgctgctttgaggcatctgtgtgccaagaaggatactaaaccaagactgttgagatggatacttctgttgcaagagtttgacatggaaatagtagacaagaagggcactgaaaatggttcggctgaccatctgtcaaggatgagaattgaagaacccattccgataccggactcaatgccagaagaacaactcatggttgtagaattcttcggtgagagttacagcgggaaagagttccaccaactgaatgctgttgagggaagatctccatggtatgctaatcacgtcaattatttggcatgcggagtagatccccccaacttgaccagttatgaaaggaagaagtttttcagggacatacaccattactactaggatgagctttacctttacactctttgtaaagataagatctacaggagatgcgtctcaaaagatgaagtagaaggtattctgctgcattgccaccgctctgcatatggtggtcacttcgcgacgttcaagacagtgtcaaaaattcttcaagcaggcttttggtggccaacaatgtttgaggacgctcaagagtttgtttcaaaatgtgattcatgccagaggaaaggcaacatcagtagaagaaatgagatgcctcagaatccaatcttggaagtcgagatctttgatgtatggagaattgattttatgggtccattcccatcttcatacggtaacaagtatacactggtcgccgtagactacgtatcaaagtgtgtcgaagctattgctagtcctaccaacaatgcaatagttgtgttaaagcttcaagaccataatcttcccgagatttggagttcccagagtagtaatcagtgatggtgggaagcatttcatcaacaaggtttttgagaacctcctgaagaagcatggagtaaagcacaaggtcgccaccctttatcatccacagacgagcgggcaggttgagatctctaatagggagatataaacaattctggaaaagactgttgggattacaaggaaagactggtctccaaagcttgatgacgcactatgggcttacaagaagctttcaagacacccattggtacaactcctttcaaccttctctatggaaaatcatgtcacctacctgttgagctcgagtacaaagcaatgtaaggggtaaaacttctgaactttgacataaaaactgatgaggggaagcgattgatccaactcagtgatcttgacgagatccgtttagaagcttatgagagctctaaaatctacaaggagagaactaatcttttccatgacaaaaatatcatcaccaaggattttcagggttggtgatcaggtgctgctattcaactctcgtttgaaactctttccaggaaagcttaaatccagatgatctggccccttctatatcactgaggtccgtccttatggagcagtcactctagctggtaagagtggagacttcacagtaaatggtcaaggctcaagaaatacttagcagatcaaatccttccaaaggtgacgtcggttcatctccaggaacttcttgatgattaaaggagtaaaggagtcaaggtaatgactttaaacaagctcacttgggaggaagtcccatgactatctctgtaaataaatttttcttttcttgttattttttatttgtcttagttgcgtttgtggttcttaggagcaaaggaacaatgtggagatagagtaaaaattcaaaacttttactctacagaagacctggagatcgagtgtttagcctgttggagtacaaaattttgaaaatcttctgttgcatctggagaccttgcactcgagtacattggtcgagtatgtgtgatgtttaaaacctaaaatcttttaaatcatcattttactcgaccaacagaagctacagagacttgcagggatttcctgcagtttacagtaggtcttctgcaaattttctcagtcaacagagtgtaggccacgcgctgaggataagctggagagagaatctaaaactcaacctcaaccactctttttgaaacttcactcgacttaaccgtatccactcgacctacctcttttcatctcaccaccgacactccaatttctctacaccacgaatcgccgtccaaagagctactcgatccagaatacatcactcgacctccgggaatcactcaacctcaccgccgctgtcaccatttcattccctccgtcactcgaccagaccacttcaatcgattcctttgctatactcgaccaattcatccacatcaacggccgtctctttcaaaagaagttactcgacctcgtttcccagtctcgtagccgcactcgaccgacgccgcctctgccgattgcaacgattcactcgaccaccaaaaagcactcgacccctgcaacagcaacttgacttcttgttcttgaattcaacagagcctttcaactttagagaggttactcgacctctaggcttcacggctgaactcgacctccactattcactcgacctccgggagcagtaccactcaaatttagagaagtcactcgatccaatttgtctaagggaaactcaggaacagctcagtctactcgagtacagaattgtactcgatcaatttggtctatttcattgccttttgataacaattttggtttcattgctatctttgagacaaacctattgacatttgagctttgagttctaaatttctacaagggaatcatgagtaattacagtggcagttcttctgttgacccggactacaacatggatgagacagagtcgtcatcttcaaggccagagagagaaaagagagaatatgatagcttcagaagaaaagctgagataacccgagggaagagagcgatgacagagaggtatgagctgatagatgaggatctggaagacgagtacatgcctaagcatactcgcagagccaccaaacttctgcacaaacccgatgtattgcctgctgaggaatatattaggctcttcaagctgaacgagttctgtagcacgaggtatccttgctcgaccacagttgcacaactcggattgttggaggatgtttagctcctgtaccagagttgtcatctggacactctgatggcttatccgtatgtagcatatgaagatgagacaattcaattccaatccacgctgcaagtggagctctaccaaggtatgacctctgatgagttggattgtgaaggattgggattcttgagattctctgtgtatgatcatgagtataggttatcaatcaagcgcttggaaggattgtttggttttcccagtggaacgggaactaagcccaagtatgacagagaagagttgaaagacttgtggatcaccatt

SEQ ID NO: 19874 - DNA, 732 bp, Arabidopsis thaliana landsberg
cccattgaaagacttcggcagacttcagcacttcgaagaatggtaagtttctctctgccgatctagatatgaatctattgagagatgccaatcttcctattaatctttgagcccccttctttgtagttggtggctccatccgaagtatagcttcaattttacttggattagcttcaattccctttgttgaaaccaagcatccaagaaatttccccttcttcactccgaagacgcatttttctggatttaactttaagccagcttgcctgaaactggcgaaggtctcctgcagatcagcaatatgattctcctgcttcgtgcttttgacaatgatgtcatcaacataagttagcacatttctgcctatttgagattggagaaccttcgcagtcattcggctgaaacttcctccagcgtttttgagcccctcaggcatccgaagatagcaatatgtgccacttggagttatgaagctagtcttcggctcatcttccttcttcatccaaatttggtgatagcctgaataacagtctaacagactcatgagctctgaagaagctgctgcatcaactaaagaatctatccttggtagtgggaattcatccttcgggcaagctttgttaagatctgtaaaatcgatgcacattcgccacttgccattggccttttttaccataacagtgttagctagccattctgggtacttcacttctctgataactcctgcactaa

SEQ ID NO: 19875 - DNA, 1618 bp, Arabidopsis thaliana landsberg
tttttcacacttttctacttctagagcataagcattcttaaccttaacatgcttcttattttccttaattaggaagtcctcttgagaatccaagaggtcattcttctcatgaatagcactaattaattcattcaatttttccttttgttgcatgttgaggttggcaaaaagagtacacaaattatcctcctcatcactagcattatcttcatcactagaggtttcatatttagtggaggattttgattttaccttcttccttttgccgtcttttgccatgaggcacttgtggccgacgttggggaagaggagtccctttgtgacggcgatgttggcggcgtcctcgtcggaggagtcggaggagctctcctcggagtcccactcgcggcacacatgggcatcgcgccccttttcttgtggtacctcttcttttctctcctctttcccttcttgtcatcgcccctatcactgtcactagatagtggacattttgcaataaaatgactaggcttaccacacttgtagcaaactttcttggagcggggcttgtaatccttccccctcctttgcttgaggatttggcggaactctcgatgatgagcgcaatttcctcgttgtcaagcttggaggcatcgatgggtggtctacttgatgtagattcctctttcttctcctccatcgccttaaatgcgaccggttgtgcttcggacgtggagggaccgtcaagctcgttgatcttccttgagcctttgatcataaactcaaagctcacaaaattcccgattacttcctcgggagtcattagtgtatatctaggattaccacgaattaattgcacttgagtagggttaaggaaaataagtgatcttagaataaccttaaccacctcgtggtcatcccatttcttgctcccgaggttgcgcacttgattcaccaaggttttgagccggttgtacatgtcttgtggctcctcccttggcgaagacggaagcgaccgagctcgccctcgatcgtttcccgcttggtgatcttggtgagttcatcaccctcgtgcgcggttttgagcacgtcccaaatctccttcgcactcttcaacccttgcaccttgttatattcctctctacttagagaggcaaggagtatagttgtggcttgggagttgaagtgttcgatttggccacctcatcctcatcatagtattcatcccctacggatggtacctgtgcaccaaactcaacaacatcccatatacttttgtggagtgaggttagatgaaatcgcattaaatcactccacctagcgtaatcttcaccatcaaatgttggtggtttgcctaatgggacggaaagtaaaggtgtatgtttagaaatgcgagggtagcgtaggggaatcttactatacttcttgcgctcttggcgcttagaagtgacggacgccgcgtcggatccggaggtggatgttgatgaagaatcggtctcgtagtagaccactttcctcatcctccttttcttgtccccactccgatgcggcttgtgggaagaggatttctccttcttctctttgtgtgaagaagatttcttctccttccctttggtgcgggactcttctgatgaagtct

SEQ ID NO: 19876 - DNA, 784 bp, Arabidopsis thaliana landsberg
accgaaaataaaatcgaagagaaaaaaagaacctaatctaagatttggtgtatttggtgacggctttggtaccctcagaaacagcgtgcttcgctaattcaccaggcaacacgagccttacggcggtttggatttcccgggacgtgatcgtcggtttcttgttatacctagccaatcgcgacgattccagagcaattttctcgaaggtgtcgttgatgaaactgttcatgattcccatggcttttccagagatcccgatatcaggatgaacttgtttcaacaccttgaataggtagatcttgtacgtctctgtgctcttcttagtcttcttcttcctctcgcttcctccttctttcgtgatcttcttatctgcctttggtgctttctccgacggtttcttctctgccttcggtgccattgctttggataaaattcggatttcgcgactagttgtaaattgacgattaatgatcgctctccgagtgataccgagatatatatagaggtgctgatacgaacatgattggtttttgatcaatctcacggatcgtctacgtggcgttatcacgtgcgttgatacaagataatctacggttgaattcacgagaggaaccgaattaatcgtgggctcatctaatgggccttggccttttacaagacggcatcctttttaaaaaatttcgtcgatttccaacttatttgctctgctcttctttaatctgctctgttcttctctttccatttcagcgttgacttagttattggatttgagattttctcagaa

SEQ ID NO: 19877 - DNA, 2523 bp, Arabidopsis thaliana landsberg
atttatggtctgcttggtatatccaaacccggcccaaagataaacactatgatacgtaacatgacaaaaaatgccgtttcgtaacatttatctcaagagagaatttagtttacaaactaacagttatcctctctttttttttgtagcttttgattgtggccaaaatttaaaggacaattaacaaataacaaaaaaaaactaaaaatatatatttttcttggtaagaaactaaaagatatctttgatattaagaaaatacactatgcttagtatataatgttacttaatatatatttagagtttagggttgatgccaacaaacctaaatttaagtatgtctcggctataattttttttttgcattactcccaaagttttattatatatttcttttttaacaccaaaagaattagaagcaaatctttatttgtaaggcaatctacctaatttccatctcaaattgagtcatctacctatttcacccaaaacatttattcaaaaatagtaatatatcaagatgagttcaatcaggttatatttgatgatataaaattatttcctagctagtaagtgaagcttgaacagaacatagacgagaaacgaacaactacttggtggtctactttttttaccgttatgactcttatcgatcaaagctgctctttacaaagtttttcattcaagatttatattttggactagtttctccaatgcttctacgaacttattaacataaccactcattagtccatgacgaagcagagactccttccactttacgtggttcctcctcgcccaattcccgagctcgctatctctgtccatcacagacctgaccgcaccgctcaagctctccttcgaaaaccatcccgtttcctctcttttcacctctaccgagaccttgagttcctcgctcatcagtcttgtgttcaatatttgctcacccaaatgtggaataaacactatttggcagtcattcactagagcctcccacattgacccgaaaccacaatggctcacaaagcagcctattgatggatgagctaatatcaatggttgctgcacccatcctccccaaaccactccacgtgctttaaccctctcttcaaacccttttggtaaggcttcttggattgtcgatgaaccttttggtggctttaccgctacaagaaatggtaaacctgtcagctccattcctaaacagagttcttggaattgatccttttcaagaatgatttggctgcccaatgcacaatatattactgatcccggatcgaacttgataagccactgacgccattgatcttctagcggtttgctattgtcaggctcaggaagcattggacctgtcaagagaacttttctttgaaattggttttcgatgaaatcgcagaactttccttccatttcttggcatgtccttatcgaaatgacatcgcagttcttaagtcctatcatgatccgttcgtaaaaactagttccatctccaaacggataggagaggaacgacaaactgttggtttcgtgtccccgaagcaacaccttggaggaagggtatcccggtggagtactacccaagtcatcttgactacgaccagggacgaacgaaatagctacacatgctgcagaaatcgttatgaaattgacactcttgactccatactctctagctatttccggaatccagtgagcaaaatcgaagaaaatcagatccggtttaccaacagaaactgcttctttgacctgattacatgtccgatccatagccgaggcgagaaaactgcctaacgagatagggatatccgaggttgtctcagcaccatcagggaggccatctacagatgggatggtaagagtgtgaaagacaatgcagtctgggaagagattgagaggttcaagttgcttcagtgctttcttggggagcaagaaagttagtttatgccctttctcagctagtttgttagccaaaatgcaaaaatgcagtcatgtgaccaaaaccaaaccaaaccatgggaacataaaagcatggaactttgaccccatctctgcttaggttcctctgttttttttttccttctaatcttggtcgtaaggttcttgtgtttctgtttatgagcattcagtttcagatgacctaaagtttaggagagtactgctatgaactgaatgattcaagtctgttacgaatatgccaaatctttagttttgattaataaactgtactttccttttgttttttaattcccggaaattactccctaatctttaatatgagaaaatactattattatctagcttccggaagctattcccaacagcacaaattatggggaaattgcaaagatcatgacataggtcaagtctacaattaacaattgcaaataataaattcttgtaatttcccattttcttcttaatataacataccatgagagagaaaattaaacttgaaaaatactaattcttaacaatatagacagagaatgtaaaacatgaatttgaataattatatgtaattagtcc

SEQ ID NO: 19878 - DNA, 2037 bp, Arabidopsis thaliana landsberg
gcggataaatgtctctgtaacttaattggcctaacgtacggtaatcttcttgattttaagagcgatcgaatgattttgtcatttcattgcttccaaaaccttctaactcctgatttgtttgattggggttgacaagatcactagcgtctagcgatcgcgaaactgggggatcaagagaattatgatttgtgccgagaacaagactctttaaaggaaacgacagtggatgagaccgtgttggtggtgggtggccgccgtgaggtggattacgcaggcggtgacggaggtttgtggttttcagtcgaatttattatgatttaattccaccgtctcaaatttcttgtgttcgtttatctctgcgaacccaataagtttgattttgaattttcgcgatctcatccgatcatttttgatctaatttgttgtgtctttggttgatagaagcttttagaaatcattttggttgtggaaaatcatattgttttcttatgtcattgccattcgtaattttaaaggtttgttgttttgattcatatgcatagttatactgaaacttgctaatagttttccaaatggggataaaactttagaagacacttgcacattatttgtgttctcttcataagattcgtctaggtcgtaattcagataagtgaaagcatctttagtgttgacttactcatctattttaatctctgatatcttatgctttcttttctcaaaactttggtgtaggaagcaattggcgactctatctcctttggaaggagtttgatgttgtgccacttttcttctgcaacaacaaattggagagccacatttcttatgggttgttcgcaatcactcaaccaaatgcatacacatacatacatgcagtcattcatactcacatacatgcatacacacatacatgcatacacacatacatgcatacatacatacatgcatacatacattaatgcatacatacatacataaatgcatacatacatacataatgcatacataatctacattgcacacatacatacatacatctacgcttatgtgtaatatgtatactttcttacttttacacatttataattccttctctgcttctttgagtcgttgtttacttacttgattccttaattctttgtctgattctttgcttacttattttttttttgtcaacccaagtatgctttactaattttagttcttcattccttgttatgtgaccaactttagaggtttgttgcttacttccttcagtccttgtgagtttgcttgcttccttaattctttgtcatattctttgctttattcattccttgtttaattacccgcttcagtcgtttgtcgtttacttccttgattcattgtttacttagttctttgtttccttgtttcctcattagcttcttgcttaattgtgtgtacttgatttcttgcttacatggttaacttgattccttgcctacgtgcttaatttcttacatactttcttttccttaactacatgaatttgtttaatttgtttttctcattttctatccttaacttgctcattaactgtctctgtttatcaaatatttgttttgctttagatagttctaggactattcaaagtccttcagagcaaccaatcagctaagttataaatgtcttaatttgacagaccaaatgaactaagctacacaaagtttatttgattatttcttatcattcaatttatagaacctataagcagtgctagaattttctggaagaacttcatcttagagttaaacaatacattccgccaacaatgaactgtcacttgtaagttgtctaactcttaagactcaatgaactttttttttttgttcttctgaaaactacaacaatcttttttgaaaacaggcaaattttatgtttgttgttggtgttggtggctgagacaaactcaagaatcattagaaaatgtactcatcgatctttataaggtaaataaactctaactgagaccatcctctcgtttctctcagtttttgttattagattgtagaattg

SEQ ID NO: 19879 - DNA, 379 bp, Arabidopsis thaliana landsberg
catagcacaaaataatgttataatcttcgacttttttctaacaaatattaaccaatcatgtcactaagaaattaaaaatactagtatatagtaatctagtccattttatatattgtaaacatggacttcacttacgaacattgggtcttttaaaaaggttctttatactgaaaccattgttttggtttttatgataattgagttagttccgtggcttttccgttcaactaaaagcctcattatgtcaactgctattaaaccgccacatagcatgctttatgaaatttacgtccattggacttcaacttctcaattattaaaaataaaataaaattgattgttgtatgccttggcgaaaaaaaaaagccgcttgctttat

SEQ ID NO: 19880 - DNA, 618 bp, Arabidopsis thaliana landsberg
  unsure (1)..(618): unsure at all n locations
atttgaaacaggtacaaactgtgaaaagtagaacttttattcatgccaaagtgaaaactcttatagataaatgaaagtgggagtatggatatacggacccactcccccttttttaatttgggggtggggggtagctgaactcgttcgaagacgagctgcctaagtacccttcttagggatcaaaccacctcgtagttcaagtttatgcttctcacacttagttatagtatttcctgaggtgcatggcattccaggatcttggaatgactttgctgcttaaatcggcgagttcgtaaatgtctggtcagacgactttcgagattaagtatggtccttcccagtgtgccctgagttttccagcgtttagcnnnnnnnnnnnnnnnnnnnnnnnnnnnnnnnnncaatctccttcgtgaattctccgctatcggacatttgaattgtagtaccgagccgtttcgttctgattattctgtactcgcaccagcaccgaatctcttcgttcctcgatcagatctaactcgttaggcatttgataagtgtgtattttgcatgttttgagcatccatttgtcatcactttagcatcatatcatcactgttttatagcatttctaat

SEQ ID NO: 19881 - DNA, 945 bp, Arabidopsis thaliana landsberg
tgtttattataattcattaatactaaccaataaatgcggtgggaaaatttttaaaaaacaatattttagaaacaattttttttaagaaactcaatcattttaaattgctcaataaatagttaaaaaccaaagttgtgcatgtgcaaaaatagcattattttttttatgggtaaaaaaaaatagagcattatctcttatagacgtaccaaaagtggcggagttgaaagtggtccaaccgtcgacgacattccggttaccggtaaccaccgtacggtttattccgtcaccaatcatcattagatatcttttgtttttggcaatcactacgttttcctcataaacacctgacgtcacgtagataacgaaataaccggcggtaccgtcagttttattcggcgccgaattaacagcttccgttatggtcgtgaaattccccgttccgttttggttcaccgttacgatgtcgcttacaagcaccgtgtttacgttattatcgtcgtcagcgagtttcctcctgcttaaagactcgtaaacggcgcgtgtgtgttccgtcatctttaacggtaaagctccgttacggaaatgacggaatggttttgtgtgactgtgagtgttctttggatgggcccaagagtaactggctacttgtttcttcttctttggaacccaacctttggtgaataatgcgagcgagacactaaagagcttcgtgtcgttgattagaggcaatgcgacaccgtttcgtatagtccatgaagaggaagcggcggtgttgattccatcaagacatgtttgctcgttagtcaaagccgcggagagaagtgtttggatttcgtcggctttggaaaacgacaacgttttggatgatgtagtgatattgaccgtctcgaacgatgttatgagatagtcttgtgtgaggcttgctaagtaacggcagtcttggag

SEQ ID NO: 19882 - DNA, 496 bp, Arabidopsis thaliana landsberg
  unsure (1)..(496): unsure at all n locations
catgcttgtgtttaactatgtattttcaatgcgtaggggatgttcattttgaaagacgattgccataaggctgctggctttcagtagctgggttgcgtgtggaggtcttctacgtctaagctcacaacgaaagtgcgtgcagtgaagaacaaaacggatttgctatcgctaaaaccaagtaacatacaatatgtgacggcttggaatgcatgggtgaagaacaggaagacctctgtgccttcaaggctgtataactatttttaaatcgacatttggatattttagnnnnnnnnnnnnnnnnnnnnnnnnnnnnnnnnnnnnnnnnnnnnnnnnnnnnnnnnnnntcgaggaaggcacagattccacacaccaccagtcgtaaaggaatgattcgcctagcccatgagatggtatatgtctactctttaatcaatttagcttgtgtaaattggttaccatcaactaatcactatgatacttgtagaaaaaaaagagt

SEQ ID NO: 19883 - DNA, 431 bp, Arabidopsis thaliana landsberg
tgcaccttaaatcacacaaaaacatgcaatatgatcctaaatgcctaagtgtgcaaaataagctaattgtgatgcaaaatgatatgaaacaatgagtgatcactaagctaaatgatgataaacacatgccttaaatgagtaaaatacagtgttatcaactcgccaaacttatctcttgcttgccctcaagcaaaccaaaatattctaaatttgaaggagaggtttgaaggtggggattcaaaaccgaagcatgcatatagagcgagttagatcaatgtccataaaaaaaccatatgtgctctaggaaaccaaacatatcctcaagagttttgatggccaaaatatagtcttttccatagactttgaaggtgatataccccaacccttcttctctcgactcatggctaggtagcccccgaaaccactcttgt

SEQ ID NO: 19884 - DNA, 644 bp, Arabidopsis thaliana landsberg
tgtataacatccttagccattacgttagtttacattttgaatttctaataattttcaatatttttttattcatgaaaagaaaagaagcaatatttaaagaaaaaattgtaaactttttaaaaaaataacatgtggaaaaacaaaaagtgtaaaattttgttagtagaaaatataaaataatatcattaaaaattaagatatttctaaaatagaaataaatatggaaaatataacataagaaagaacatatgtaaaaacaaaagtgtaaaattttggtattagaacatattaaaaataatatcattattagtttgaccaaatttgctaattttctctcttaatcataattaggggttggaattatgctttagtttcgtgtcaaatttgatttggttagatgaggaaaaatactactaaataacaaagtggaaaatattcaactaacaacgcaaagacaaaaacaaattcatgaaggtctaagaaacttttagttttaaataaaaggttaaaaattctatttagcaggaaaaagaaaaatgtaaaggttttatattccaaagtagtgttttatgtataattagtctttaaatataataatagaaaagagatacttgacatatcataatgtttagctattggaatat

SEQ ID NO: 19885 - DNA, 687 bp, Arabidopsis thaliana landsberg
  unsure (1)..(687): unsure at all n locations
accgatgctcgataggagtcgtatgagatttatgaaaggagaaaagatgtgaacctccggttaaacggcttgcaatgtcggataactagaacacctcagaagataaaggcgccattttgcatagatccaagttgcagcaagaagaagagtcgtccacaccactcatataacatagaagtgagcaaagaacttatgtggaacaggaaacttctgcaaatagagagaattacacatatgagttactaaaacaaagttaaaacccttttccacgttcaaccatcaaaaacagaacagttataaccctgaaaccggagattcaaactaaaagtgatatgctttctcgtttccaatatggatttacaacaaaaaagattatttaaaacacgattcaatttgacttctttttttctcaaacctaaatagtaaatactctaatatggattttaactagcgttattcacatagttatatttataagatacattaaaaaatatttagtaggtaaaatgttttcctaaggatacatcattggttaatattttaaataatcaacacaatttttatatgaaaatcatccattntttgtttcgatatctcaaacttattctattaattatattatctttctttttattggtgcttatactatattatatttatgttttgcttagttttttcttatttttt

SEQ ID NO: 19886 - DNA, 1796 bp, Arabidopsis thaliana landsberg
ttaaacacagcctttgatttgagatattctggtatttgtttgattgacaaagtttacccgcgagatttcatgcaagtagggagagtgagggtgcaattgaaaagagaagatggtactttactcaatccagccattacttcaagtaagacctctcatctgtactcctgattatatctccgatcgctgtagaacatttttgtcttttgtgttttcttttaatgttatcctagtgtgatcaatcagattaagctagaaaatggaatctgctttatttactttacttactcttgttgtgttgttaagatctctccttgttacccatgtttggacttcttcaatcttccgacaaatgttgcctgatactagcctgcttgttatcaaatctctggtcgctaatcttaactttctgctttgttttatcacatacaaccctgaatcaaactttttcattgataatttagtcatcatcaccaatttcaatctttgatctggaggctttatgagctgttccagggatccatacatttttcatttatggtcagtatcattattctcatgtggggaaacaagctgttatacattatgtatatttcaatcctatgcacatggaacttaccgcagcaattatctgagtctttagatatttatgtttgttatgatagtgttaccgaaatatcaccttatgctaagtttatctgattttcttcttcacaaattctttttcaattcattgtgctatatcttgaatttttttggttgttattgtcgcatatggtcacagcagactcagatacagaaataacctatatagaacttgtttatttcaagcattttttgacaaattgcaagacttcagatgcgtttgtgtttgtgtttgtgtttgtgtatgcgtacgcatttgatactgttgataaaaccattttccacattgctggttttttagacgtttgtgcttactttgaccttatatccttatcatgcccaggaaagtgtaattatatgaatatacttttggcttgctgctttgcatgctttgaacgaaaagagtccacctgtgagaacactgcaagttgtttcctacagacatatgatgatgtgctcttgtgttgatatatattttgcagggaagcatctgatgcagaaaattgcagagttggtaccaagacatccagagagagtaaagaagcaggaagctcagaaagcgaagaagcaggaacctcaggccacaacttcaacctctggaacttcttcaaagtcaggcaaaggtggcaagaagaagagataaaacaagccaagccctccctctctctcatcagattttatggcttttaatctctttaactttctgagaagaacacaaaggtgtttgcaggtgtaacaatgtttcaaatagaacatcgtctctttcaaccctaagctactttgttttcaccattctacttcttctttttggcatcatccattgacattagacaagaaagaatgcctaaaaagggaacataaagatattgtaattcaccacaattagactcactaaccacagccataaccaaaatcgaaattacagaatcaaaaagagttggagataaaacagatactatagatagttacacacatcaacataaatggtaattacctaatgaactaactaaaaccgtaactaactatgagatcatgcttaatcaagatgtgtgaactaactaaaacatgggccattccattgcttcttcgcttaagtattcactgatatcaatcataaactcgtcttcttggttggatgaggaatgatcttgaaa

SEQ ID NO: 19887 - DNA, 417 bp, Arabidopsis thaliana landsberg
ctgaggatcttctgcaggcaatgtgaccattttgacagcgggtgagggcttctctggttctgcaactatgtgaagagagttcttagtgtctattgtctgtccccatggctgatctgttgactgccaagcgtaaggtgagtggttggccgaggatgaagacatcgatggacctgacaaactccatgaagcggaagagactacaagggaggatgcatctaccagaaccggagcaaatgtgccaatccccaaagtgtatggtgagcaatctggcagaggtaggtttttgtttaggtacaggaccacttgttccattgtgggtctggattctggcactatatttgagcagagcagacccagtctcataaccatctcgacgtcctcagctacgaattcacctcccaatctcgggtcagtagc

SEQ ID NO: 19888 - DNA, 857 bp, Arabidopsis thaliana landsberg
atattacattgtttactttttttttcagttcatgacatgtgttatgttgaatacaataagagggacatgtccaatgagataacacaacagttgaatcatcttattcaatgtccttagacatcaacaaacattcatactataaccaaaattgaataatttataacatcaacaataatggtttatgatgaagatggttgtgagaagtcaccagtataaacaacaatggggcttctcacattatgagttccatcagaccaaattagatttgcagacgaaggcagttctgaatggagctcactgcccgaaacagtcacagtgaaagactgcttctcgttcatcgacttcatagatagaacactaggtgagaccttgacgttgagcttagatccgtgatttaagacaacttttgatttgtatgtagagtttggggtaccaacgttggtgacggttctgttgaaagtgacgatgaaggagatattagatccggataatttagccgacattgatggatagttgaggtttctaggtgagattttttcactgcaagtgacggcttcaccagagatgagtttcacggtagtcttattatagttcatgccacagaggaaggcaaagtagtctgttttggttatctcatagacgagtccaggattagtagcagctattgggtctacatgaccagctccataagcaaactcggttgatgcatagccagattgagaagcattcatcgaccaagctgtgagatcgacaaagaacagagcatgaacaaaagtccatggctttcttgcgagacaagaaagtatgtataaataatgaagatataatttttctttacctgttgtcataatggcagt

SEQ ID NO: 19889 - DNA, 1656 bp, Arabidopsis thaliana landsberg
gtttgtctagaaatatacgtacccaaatttttccaccacgtcgtacattttttgtcattgcgcgtcgccctgcttctatttgtctagatgtgatccaagcgggttcataggtatttgtagttagatctattatttgatgaccctagtttataggtgtgtaataagaatcggcctatctactaagatgaacaattgaactcgtttagaatgcatgtttaggttaaagatctctcggcttctccggttaatcttagctatagatatagggaatttcgcggaacaccaccggttattccataattagagtttgagtttaagaatagttcgataacaacctagctattattagatctactaaccaatagtttcctgaggataccctaagcctgacgtttttactttcttgtcttacaacttcacaatttgctatcactttcattagtatcttacttagcttaattcaaaaccttggtctattgtgtgatccgagagctttgtagaattcgacccttaagtgctacaatcgatctcttatttgagagagtggtcttaaggcaatttgacctatatcaacagttacccccaaaacgtaggcaaatcgtaaccatcttgctaaagaagtctgatatagctttagcaatggctattgtcagcgaggctaagaaacaaaaggatggtgctatagcagaagtcacagagaagtcacatgaacctggtatgtggctggctttataccaacctagtgatgatgttgaactgtttttatcatcagtattcgaggcattatatttttgccattaacacaaaccttaagtgtcttggagtttacatctagttaactactgtggtctgtacactgttttaacacatgctgccttttaagtatagatcaaaatgctcgtggatcaaatgaagctggacatgtaaacgcagagaaatgtgatggccctaactatatgttttgacaattttctttccgatagatgtcaaggtgacaattctcttggcatatatatgactcccttattcatatatgcctgcgggccggcttgtctaaccgctgggctttgcggggcgggttagggctcgtttttcaagaccgcggtcgtcggccggcaggtccgtcgcgaatcagaagaggaatcaggcacattgcggatggcccgtttggcgcaggcggcccgtctgacatctggtggaagaagcaaaagagatggatttcttatcttttggtgggatgcatggggaacattaagttttggtggtgaaccccacgtctgttttcttgtctttaaacacggttccctgttgactagaaaagtctcagaacattccgcaatcccctgtaaacttgattaagcctctgtaagtctctatagattttgttggtcgagtataatgttgaatttttggatcaaaacaacatcatactcaaattcatcctctagtcaccatatagcttctgttggtcaagtatagtgatgatttttaaaaacattaggtccaaaatcatcacatatactcgaccacatttcctcattagcatgtggcttcgggtgataaagtgacatgttgaaacttcaaaatcttgagagtgaacccactttatactcgattacatagatacacttgctccttgcaagatgtggtcgagtg

SEQ ID NO: 19890 - DNA, 676 bp, Arabidopsis thaliana landsberg
gcgtttttaaatatggtctcatgggagaacacattttgaattcaagcatctgaataatgggtatatataggtccaggttgttcttctgtgggatatggggcaacacaagaaattggtccttttctcgtggacaccaacggaaacggacttaactttaatccatacgcatggaataaaggtaattatttttttgtttttatatagttttcttagcgtcacaatatttagatgtaaatgaaaatgacattaaatgatgtaaaaaggttgatttgctgatgcagaggccaacatgctgtttttagaatctcccgtcggtgttggcttttcgtattcaaacacaagtagcgattatcaaaaacttggagatgactttacaggtaggtccattatttttatttttatcttttcacaagtccattattattataatacatagatatattatctatagtctttgtcttttctatcagcaagagacgcatacacttttctttgcaactggttcgagaaattcccagagcacaaagaaaatacgttctatatcgcgggtgaaagttatgcaggtaacaaaataaataaaatcatttggatttagtattgcacgcccttttatttacttcaagtgtggtaacgcaaattcatcgattttgtcgcgaatttatttttctgtgaatgt

SEQ ID NO: 19891 - DNA, 603 bp, Arabidopsis thaliana landsberg
  unsure (1)..(603): unsure at all n locations
gctaatctctggacccaaagaataatgccggttagtgagattatggcaggggctgctcttggacttgctctccaagtccttcacgatgccatcaaaaaagcaaaagatagatctctaactacaagatgcatcttggaccgtcttgatgctacaatctttaggatcactccgttggtgactcaagtcgataagcttagcgaagaagtggaagattcaccgaggaaagtcatcgaagatcttaagcatctccttgaaaaggctgtttctcttgttgaggcttatgcggaactcagacgcagaaacttactcaagaagttcaggtttgtatacaatccatgaaatgcatgaattcttttggttcatacgaagtcttcttatttcttaaatttaatagttaaaaataaaagaaaaaattgtttgttttgtcactacttaaaagatggataccattagaatctcagattgagatactgacttacagtgattaatttcatgggtggttttaaaataagatatctttggattagctaggaaacgggtttactttcaagtttcgattcaagaatttttttcaagtggaaattcttttntttagatggagca

SEQ ID NO: 19892 - DNA, 455 bp, Arabidopsis thaliana landsberg
tagaagtaagcaagatcttacacccgccgaattcgaggatgaattcagtttaaggggggtagacttgtaacgaccgcgtcccgcgttcataaaagaggccggtttgttttaggagaaaactagatcatggtcgaggaacggaccaaaatacttagtcggaagaacgagaaagttcaagctgaaccagctaggtgagctggacaagctagatgaactagctagctaagctaggtgagctaaaccagctggaagactagctagctcagctaggtgagctgaccgacagctcgactgagctcggtgagctgatcgtgtactgacccagctgggcggtccagtcaactgacccagctgggcggtccagtcagctgacactcgagctggtggactgtggtacctcactggtgaagaggtgtctcggccaaaaagtgtaaggtcgagcgggtaccaacaaa

SEQ ID NO: 19893 - DNA, 728 bp, Arabidopsis thaliana landsberg
ctctactttgctatgagaggtagttactagttactacagctgatttctttattactttccacaaatgaaaattgagatcccaaggcagatacatacaacaaaaattcttcactaatctttggcattctcatgaaattttcagtaatagaagtgtttgaagagagtgaagggcgtaaacatggagaatgttcgctactcgatcttgccagagtcttggaaatcaaaaagcaactctgtgaggcaaacgtaagtgtgtttagttgttttatcattatttagaaatgtcactgccaggttcactgaataactgaatattgtctctcagtctgtgagcgagagccatataccagatattctcttggagagacttatcactggtactactgaattcccgccagtttgtgccattgtgggaggaatattagcacaggttctctctctctcactttcactctcttatcgcattcgaatcttctcactagaaacttgtaatttgacaagaaagattttttgatgtggcaggaggtgatcaaagcagtatcaggcaaaggagacccgttgaaaaacttcttctactatgatggtgaagatgggaaaggtgtgatggaagacatttccgactcttttacctcttaaacaaccagtgggccttgatttagtttaaactctataatctctgagattccatgtatatctcaatcggttgttttttgccttcacattatgaa

SEQ ID NO: 19894 - DNA, 858 bp, Arabidopsis thaliana landsberg
gtcttcaggacccaattcttcttcactctcttcttcctcacttccttcttcactttctccgtcgtcttcttcctcttctttctcttcatcattcacctctattttctgctcttctattttaggaagagcatccttaagccccgttatcgtttggtatagcatgtctcctgtgtcctgcccgcttgttatcttcgccacgtcggcctcagggttgttcacagcatccagagatttcggtatgtatgactgaacatcaataacaaaccagtaagattaagatgattctacagacaacttcacacaactggatacactcttaactaaccttcatgaatactgaatccgcgatttcatcctctaccgatatctctcctcgctctataacttttcgttggacctgcccattgttacataattcattaatttgaagctgcacattgattcaaaggacaatccatataaaaagttatacattacctcttccaaatagctatcaacattttcgtctgtaattgccgggtcaactatgaagtcaaatagctcccgtattgtcatgacagccacaccatgttttttgaaaaaatcctgcgtgtgattgtcgaaatattccacacatcagacacctcgttccagtcaaattaagcattgctaaaacaggacacttaccgagacatggtcacaatcttcccgtagaaagttgagtgcaagaggatggtccagatccacagattgagaaacatcaattatataaaggtgtccctgacaaagtcaagataatatcattatatatgtcttctcttgtttgttcaaatttttgtttgttcaagtgaccattgtaaaaccaaagagagccgctta

SEQ ID NO: 19895 - DNA, 217 bp, Arabidopsis thaliana landsberg
aagcaggagaacacattttttccagaagactaaagtgatataacatatatatgttaacaacatacttgaacactgaattctgtacttctaatattgttggtgcaagctcatgtcggattttacaatcagggcaatagtaattgttgcgctgataaccaaattagaacagtcattcgacaatagtctttcataccttacaaaatcaaaacataagatg

SEQ ID NO: 19896 - DNA, 385 bp, Arabidopsis thaliana landsberg
cttgggcatgtctaacctacattaaagtgatttttattataaatataatgagaatgagatttaataattttaagagacttaaatgaattttagtgaatttccttagttaaaaaaatacagaattttaaatctcatgattttaggtgaattttgagaaaattttacaataaatcataacaacttccttaaattcacccaaattctttaaaattatataaaaattcaaaataacttaaatcattcaaaatagaagattgaatacactcccggggccccaagagttttgcaaacaatcatatacatgtaaaagtttaagactataccatttatgtgatttactaatcatataaaataaattaaatacacatcgtttagttagcagtat

SEQ ID NO: 19897 - DNA, 969 bp, Arabidopsis thaliana landsberg
cgcccatgtgaactatgtagcatagccaaagcagccgcttaggttacattagatattgagagagaaaaatatgtggtagataaacaagccatcaactattaataagccaagatcttatcttttaatattagctcgagaaggcgtacgtggtgtgtttaatttgtggggtacaattagctcgttattgtaccatgcacaagtagaaaataaactcaccatcatttcattataaataaaggttgatctcttaagcttatttcttcacacaacacatacatacatacattgaaaacaaagtagtaataatcatcatggctaagtttgcttccatcatcacctttatctacgctgctcttgttctctttgcagcttttggttagtaatgctcttataatatgaattaaaatgtaatgttcatttacataactagagagatgtaacatacgcagaagtaccaacaatggtggaagcacagaagttgtgcgagaagccaagtggtacttggtcaggagtttgcggaaacagcaatgcatgcaagaatcagtgcattaaccttgaaggagcaaaacatggatcttgcaactatgtcttcccagctcacaagtgtatctgttacgtcccatgttaattcaccaattttctttggttcttcatcgatgtgtatttatatttttaaaaataagtctgtgtcattctatgagtgacttaaggcatgcatgtttatgttttaatgtttggtgtgacttttctataaaaatataaaatttaagtacgacgtaggacttttttcttgtccatatttggttacaacacgaccattatacatactattttttaaggacatagtacgtatctctcacaagaaattgacactttattaatatataatagaatccccattatttttttgttaaaattaattaatatgaaacaaaagtactctaaattcatatcatatcattttgccga

SEQ ID NO: 19898 - DNA, 294 bp, Arabidopsis thaliana landsberg
  unsure (1)..(294): unsure at all n locations
cggtgaaggaaagtcttaccttgacgttttggtcatcgcacattantcactgatcgngctcatgactatatgcaaaacagtgataatgctgtccataataacaaacctggagttgcagagataccaaacaaaaaaaaaacattttagggtgaaagcaaacaatgaaaacacaaagtacaggcaggttcaagttcgacaccatttgtcttgtactgtcatagggaagaagaagaagaaatgcgtaccacggaaactaagctatatgggctcttagggtccacaccacggtacatg

SEQ ID NO: 19899 - DNA, 457 bp, Arabidopsis thaliana landsberg
agccgaatcgacatgacacagattccggatgtttacgattcatgcaagtaagtcgtttttagtgtatctctagatttacacctagctttagggacttttttttgaataatccgtaatatgtcattctcaccaggtacgacctgttacataattcccatctcgatctaaaaggattagatgaactcttcaaagtagcacaggtgaacaaactgaaattcctccttccctttcctgaaactttaatcatagtttgcactgaaacaatgaactttcttgatacatctctaaaatgtatggctgactgtgctcgcttatagctaagttatgtgttatgtggttgcagctacttgcagatggcgtaatcccaaatgagtatggcatcaatccgcaacaaaagcttaaaatcggttcaaaggtgacaatctaagataagagtagatatttttctctctaacaa

SEQ ID NO: 19900 - DNA, 2023 bp, Arabidopsis thaliana landsberg
  unsure (1)..(2023): unsure at all n locations
gcatctaggatgatgactattaaagctgataataacttaagtggaaactgtatggattcatgggcagaattaatttaggaatatttgccaccggataatatatctgctgagagttatgatgaaatacagaagttggttttgagtcttggattaccatcagaaatgattgatgtatgcattgactactgcatgattttctggggagatgatgtaaatctgtaggaatgttggttttgcgggaagccaagataccagactactggcggaaggacgcgagtgccatataaacggatgtggtacttgccaataactgatagattaaaacgtttatatcaatcgaaaagaactgcggcgaaaatgagatggcatgctcaacatacaactgcatacggagaaataacgcacccatcagatgcaaaggtgtggaaacactttcaaacggtatatcctgactttgctaacgagtgtaggaatgtgtatcttggcttatgcacagatggatttagtccattcggtttgtctgggcgacaatattctctttggcctgttatcttgaccccatacaatcttcctccagatatgtgtatgcaaagcgaatttctgttcttaagtattttagtgcctgggccaaagcatccgaaacgagcacttgatgtcttcttgcaaccactgattcatgaactcaagaagttgtggtatgaaggtgttcatacgtttgattactcgagcaaacaaaatttcaatatgcgagcaatgctaatgtggacgattagtgacttcccggcatatggaatgttatcggggtggacaacgcatgaanaattatcttgtccctactgtatgggtcgtacaaatgcgtttcaactaaagaaaggcagaaaaccatgttggtttgattgtcactgtcggtttcttcccctgcatcatccgtatcggaggaacaaaaaactttttaggaagaataaaatggttcgtcttcctccgccatcttatgtttctggaattgatttgtttgaacagatcgattattatggtgctcaggaaacctgcaagcgtgggggtaattggcacaccacggcgaatatgcctgacgaatattgaagcactcacaattggcacaaacaaagtatcttttggcaactcccatattggaaggatctcctcttgcggcataaccttgacgtgatgcacatcgagaaaaactttttcgataatatcatgaatacgcttttgaatgtgcagggcaaaacaaaagatagtttgaaatcaaggttggacttggcggaaatatgcagcagacctgagttgcatgttacaagagatgggaaattaccggtttcaaaattccgcttgtctaatgaagcaaagaaggcgttgttcgagtgggttgttgctgaagtgaagttcccagatggatatgtgtcaaaattttcaagaatgttgagcaaggccaaaagttttcgggtatgaaaagtcatgattgccacgtattcatgcaacgattattaccatttgcttcaaagagctattaccaaaaatgttcattgaggcaattgcaggtatgtgtgataatttaattaatttagttagccatatatgtaattatactcataatttgctatgaacgcaggtattggaactttctttcgtgatctttgcacacagactcttacggaagacggaatagatcatctagataatagcattgcgatcttattgtgcaacctagagaaaaattttcctccctcatttttcaacgttatggaacatctacccatccatttaccacatgaaacagcccttggaggtccagttcaattatggtggatgtacccatttgagcgattcatgaaacatataaaaggaaaagctaaaaatcttgcaagagttgaaggctcgattgtttcagggagtttgactgaagaaacgtctcatttctcttcccactactttccgcctacagttcgaacccggaaaagggcaacaagatggtatgatgatggtggtgtgacacttgtagtat

SEQ ID NO: 19901 - DNA, 253 bp, Arabidopsis thaliana landsberg
tgaaatgatatgtataacggattctggcaaaatgcatttcgatatttgtgttaagagaagtggtaaaatttgattgtaaaatggttatattcgagggtgcatgttattgacaaatgagagttggaaatgatttgatagtaaaatttagggatagaaaattaccaaataacccctatagtgcgattggattagcacggcggcgctatcttccttcgtctggcggttgtagccggcaagtcgaacgactttagcg

SEQ ID NO: 19902 - DNA, 1005 bp, Arabidopsis thaliana landsberg
gacatcaatattgagaaaaggtgcattatgcatcctcctttccagtttggattaatggtgaggcgtacgtgccctaggtgggagaaagttgggcacatgtgcaaaaggtgtctcgcttaaggtggacctcatgaataggaagatctaagaagtttgtgtttttgttggttaataacatctaagggttttttgtttttgttatattataataagttttacgggaatgtaaaccaataaagattgtgatcgttaatttacaatgacatctaaggtccaatttttatttagtcatatgttttcattttcgttattggaaattgtttcgtttgttatccatgtaagaaaatatataaactccaaatccatggagttattcattagaatggcaattttgtatcctttgatataatgaaaattgtttagtttgttatccatataaatttataattaaatgaggaaaaaacataatagtggatatgtctagaaagtagcatcggaaggacagacgtgttgacgatgggtcccttgatgtgtagcttcacaaataatatccaacagataaatcaatgtaaagggtgtcagtagaaagtgaaaacctgacgtattaggtctaaaaagaacgaatagattatgatatctactgcaaaaagggctaaggttatagtgtttagggttatagtgtttagggttaagagattccctaatttccctcattcggaatccatggaaaactatccacattattaaatcagcattaataaaacattttgttcagcatgatatatttgatataaatttcaggtgtccatgaatacatatccacttgaacctttaataacactcaataaaattagttgtactaattctgagcaattgaaaattcagtacaacttataaatcaaaacgtatgtagataatagaatcgaaatgtttaagcaatgatggatagccgaattaggccttgataaatatactaacagaaatacaataatttcggaataaatg

SEQ ID NO: 19903 - DNA, 303 bp, Arabidopsis thaliana landsberg
tccctgaaaacactgttgaagccgagaccgaacttttggtttacgaagacgtcctcgaaccaaatgagcatgctttaccataagctcgaatattttatgaaagcgaccaaattccggcaaaagattggggggctgtttggagggagccaataaaaaattacattgttacaggagagctcccagagaataaatggcaggctcggaaaatgagaatcgttagcgcgaaattctgtctatcgaaggattctatgtataaacgaggtgtaagcgatccctatttactttgcatttttgggcctgaag

SEQ ID NO: 19904 - DNA, 505 bp, Arabidopsis thaliana landsberg
  unsure (1)..(505): unsure at all n locations
aatcaacaatattttagccaatttgtgcgatgatcatgaatttgtttttttaaattcattgattttctagaatccatcatgtacataaaaaaaaattagtggaaattgatatatttttttctcgtaaatgtgtttctatggatcgaaagtctacggcacacggtattcttacaagacaatattttaagagctaacaaaacgaatatatagcccacaaagataggcccaagattaaaccctccaaagaaagaaaagagacagcaaagcaaactatcttcatatcacaagacgcgtcagacggtaaagatgagattacgacacatgttgatttcacaaccttcaccgaaagagatccaacttccgatgaattttagatcgttaccggaaaacttagatcgagcaataagatcttatggttctcaccgtaatgacaatcgcagatcaccatannnnnnnnnnnnnnnnnnnntcttaaccaattgaatctttgattccttgacaacaa

SEQ ID NO: 19905 - DNA, 968 bp, Arabidopsis thaliana landsberg
taaaatccatttgactggaggctcaaattaatcatatccaataaaagttttgttcgaaatttatcatcttaattcagcaaagacaacaaaagttaagattaaataagaaatcactaagccgacaaaaaaaattaacaaaagtttacgatttattgagaagccaacaaaagctggttatatatttcaccgaaggcaaaattgagcattgtttcagctaaattaataagtttttataacattgttcacaaaacgaattccatatatacaaatagtaagatgttggggattagtttttgggtcaagcttttattcagctctctctttgattctatttgtaaactcttctttttttttttgtcaaatggttggttttcattaattgtgaaccgtatagagtaaataggattcaaagcagctttagctaatgcatcagctttaaagttattctctctcttaacaaaggaaaatgaaatttcatcaaagtttagggagagaactgagatgtcgaagatgatcccatggagctccaaaggaggagactcaccattcagtgctttgactagctgctgcgagtctgaaactatagcaagtttttttaggccaaggtctgaagcgtgttggatggcaaggaggagagccgtcgactctgccattaagggataattgatattagcctctgcagattgatgatgtgattcagtatgattccaatgatccacaaagatccaacccaatccagcctctagcgactcctcacgccaggaggcgtctgtgaagcacttaaccgtgtctgaatcgatctctgtgggaggaatccaagatttcacgatctgagaagacgatgcctggatatgagctcctaaccattctttggcttgagaaatcgattgggagataagatccagactcgagatgtgtttttgctcaaatatcagcttattcctgcaattccacaaattccacaaaat

SEQ ID NO: 19906 - DNA, 470 bp, Arabidopsis thaliana landsberg
  unsure (1)..(470): unsure at all n locations
tggccgacttttttgttttttggtcttacatcaggagcttctctttttaccccacagattcaatatctgaagtttgaagcatccatgcattagattttaaaagctccttttctttcctccaattttttgagtaacttaatggcttcttcatttgcacacaacgtcaattctatatgatcagtagcaacagatgcaatctcacggaaagtacgacatatatggctatatcgctttccaatcgattccttgactgtttcattaggtggctctgaatgataaaaaaatgtttttcgtgcttttgcctctntactccatcgatttagaatgtagttagatgggatttttctaacattattcttgtccagcactttcaatgcatgacgacataaaatcccgccacaactaacagttatgcgactgcaaccaatcgtcttgtttgcaacatcataattaataaaatgcttccgtgc

SEQ ID NO: 19907 - DNA, 1113 bp, Arabidopsis thaliana landsberg
cacccatcaatagtgactgatccactctgcaatgaaaggtaaggtttttaaggtaaagaacagataaaatcaaagaataagcagaatatttcatctttgttttgctaacagcgagagaacacgatatggctaactgtacctgatgatgaacattgattgagccgccaaaaagtagaatggagaaaggagaaacaatggttgtatctcgcaaatatactttgttcgtttccacctacaagatataatatttacccacgattagatgatgcctacaaattaacaccagaatctgcctagtaacatcaaattgaataagaagttaataacaagctaccatgcttttttaatatgtacaaagctaagtatgaattcggaggcttgtagatcataagtaatcagagtaaaatcaaacgcttcacatattaaaactcaggttaccttctcaaggaatacaaggaaagggttttgaaatgctttgaagttgctgtttatggaagatggatggatatgaacttcccttctgccatcgtaccatgccgagtagctctttgtttggtttccttgctttgtcaaactgttaaacgttgtctctgtaattcctttatcattggctgctatattaggatatagtcctgcgcatagtatagcctgtacatattgacaggtgggtttagttacccaccaaatagataatgacatagagcctcttatacgagtagaattagattattggcaaccacaaaaaatgtttcctacgagaaaatatctgagcagcagagcaaccagatgtccagatgcactataccttaacaacttcaggttgctgtgaatacatattgaaaggttgagttgggtcagaaaaccagacatcaagattttcctttttccttcctgaaaactatgataagaaacgaagagatttctaattagatttcattaatctgcccaagcttacaaagatgatgaaccttattgagttgtaacgtagacttaagaactatcatttcaatttttttggtaagatcaggcacataggtgctttatgcaatgcaacaaatgtttcagatggggtagataagttacctctcctgttttaggaagattgatgagccc

SEQ ID NO: 19908 - DNA, 545 bp, Arabidopsis thaliana landsberg
  unsure (1)..(545): unsure at all n locations
aaaacagggtacgactcctgccactatatttgtttttgttattgaagtagtagctctaacgaattttttacccaaaaagttatgttcaaagtgtgcctctccttattaagaccagccttcatatgtagacggaccaaaattacagtcgaccggaaatggttttttgttgcagaacatgatactgtacttacaaacactgctatgtcgtaacttggatggaatttaatgccattgagaaagagagagagagagagagagagattatttttttggtgagtgcccgggagaaactccagggtttattgaaatatacagaaactaaattacaaagggactagtcgtgagcgtaaaactccatcgtcgttttcccgcaaaatcnnnnnnnnnnnnnnnnnnnnnnnnnnnnnnnnnnnnnagcccaaaagcaaagagaatgcatggttagtcaacccatctgtaagccggtttgccttccgattcacatgagacactcggactattgagttctttttaaaaagccatgacacaagcgtacaagatggaca

SEQ ID NO: 19909 - DNA, 545 bp, Arabidopsis thaliana landsberg
  unsure (1)..(545): unsure at all n locations
tgattttaataacataaactaagtcgaaatatagtgatatgaactctttattgtctgatgaaacatatagggcaagccaagagtatgtggaaggagcaacaaattttgttattgttgcatcaaggagattgggaaatccatctgaacttttttgtccctacattgattaccgtaatgtttgccatcaagaagtagacacagtattggaccatcttgtgatcaagggtatgattaagaaatacatgagagattcttgctggagtatgcatggtgaaagaaagtgatattactgataatggtccaacattagaatttgaggcttataatttgctaaggacggcttattgtaatggtgatgatacacagccatcaaacaactttggaggagaaaatttgnatggtgaaaatacagaagactctgagtttaagcagaaactgagagatgctgaaactccattgtctccgacgtgctctaattaaccaaggnttctgcataatgggcatataccacataaagtgaagagtggaatctcagaagctagttg

SEQ ID NO: 19910 - DNA, 1440 bp, Arabidopsis thaliana landsberg
tgtttacttagacaacatgaactcgtaccacgccgtataaaagtttttgacaaaaatcttgaatagctatcaattatttggcaaaaaaacttccaagaatctctgcaactttgctaatagagaaattacttgaatacttttaatatttataattcacttaactatcacttaaaatataaacatttacaaccattttttttaatgtttctcaagcctgatgattttttttttttttggtaggaaaagggggaaaatccgcccattttattaaaaagaaaatacgaaattacattcggatagttcttgaaaacgcatgcccatttacatcctccaaaacaaaagaagcaatagaatccggaactgaattaaaaacatacaaaccatgaggtaaagaaaacgcatagttagctaacccgtccgcaagacgattgacctccctatacacgtgagaaatacggactaactagtcccttgatatgaaaccaataacacaaacgtactaggaaagatagaggatgagaatccggtatccctgtctgtaagaactcaaccacgatcttgaaatccacttccagctcaaggcgtgttattcctggctcccagactatgtgtaacccatagtagagtccccacaactctactagtggcgctgaacagattccgatattcaaagcaaaaaccccaacccagttctcgttcccatcacgcaccgcacctcccgctgctgctaacccgggattctctctcgaggctccatccatgttcaactagcctgatgaatttattaaactcatgtttccattttttttcccaccagttatgttagtttgattaatttttcagtcaattttggcataacgctttaaagtaattatatcaaaataatattttcagtttttctgcaacagattcattccaccaagaattcagccgattctacccgaattaatattaccattttcggactagatctatgaacgaaggtacaaaattaatcagttaaaaaagaaaatagagtggcaagtactacattttgtgccgtatgatatgataatataggaacctaaacgaattttatactaattcaaatttaaaagtagtttggtttgtcagaaatgcaaattacaaattatatcgacgtaacgcttactcattaaataatctaaattacttggttaaaagactaattaaatattcttaacaagtaggcttttgttttcattataaaacaaattaaaaagctatactaatataaaaatggagattggtatttccaaagcagcgaagacagaaaaactgcaggttattatctctccatcttcatcttgcggagtggttctttctgggttttctgacttgcttttcatttttttattgatacaaatgtaaaccaattattttaaattatctttgagattaatgaagagagatttgtgaaca

SEQ ID NO: 19911 - DNA, 607 bp, Arabidopsis thaliana landsberg
ttaggattccgaattttatttagattttttgctatcaattttgattcacagattagttgaacgttattgacttcacctacacgttgacaattgcatataattttattttaataatacgttatatcgggaacaagttcatatcgaatgagtgatagaattagatcggggataaattcagatcgaatgatagacaagataatatgttataacttgatatttttgttattttgcaatcgaatgaaaaaaatcaaataatctgggtcagtgaagacaataatgctcaactaatctgtggaccaaaatagatgttgaaaaatctacataaaattcgaatccttaaatgaaaaacaattggtggataagatgtgggtttcatgataattttgaaagatggtgaaatcggggacaagatctagatataacagaaaattttcaaatcggggataagatttggagacaaaaacaaaagttatttgtttagtctcaagaaatataatgtttattggttaaaggggatagagattaatagaaagataaaataaatagagaggaaagagaaatagagaggaaagagacatagagaggagagatatatagggagattaat

SEQ ID NO: 19912 - DNA, 1265 bp, Arabidopsis thaliana landsberg
taaaagtaagttttctcatgttttgaaaacatacagttgatagtggtcttgaataagaatttgagatataaatgttgaatgtcccttagaaactctctggatacactatataattatgatttcgttttgcagtagcagatgatattacaacttcaggttcacttcagttcgagtttaaagcaattgaagctgccacatgtaattttcataatgttaacaagcttggtcatggtggttttggtgaagttcacaaggtataatgtttgtctctagtactttttttgtgttagagagaaaaaacagaacatgttctgataattatgtgaagatcatatgacttggcagggaacatttccgaatggaacagaagttgctgtgaagaggttgtctaaaacgtcaggacaaggtgaagaagagttcaagaacgaggtgtttcttgtagcaaagcttcaacatagaaatcttgttaagcttctcgggtatgctgtcaaaggagacgaaaagatattagtctacgagtttttgcctaacaaaagtctcgaccacttcctctttggtaagaaaagaaacagatgatagggttatattctctgaaaccttagttcttgatctcatagtctaattgcttaatacatgggatttttgcagacccggtaaagaagggtcaactagattggacaagaagatacaacattattaatggaattactcgagggattgtgtatcttcatcaagattcacggcttacaatcatacaccgtgacctcaaagcgggtaacattctcttagatgccgagatgaatccaaaaatagctgattttggtctggctaggaatttcagagttaatcaaaccgaagcaaatacaggaagagtagttggcacattgtaagtaattggcatttagatataatatgaaacttgatggccctttgagagtaggtgataaaactaaaattgatatgcggtgtattttgcagcggttacatgccacctgagtatgtggcaaatggacagttctcaacgaaatctgatgtgtatagctttggagtattaattctggagattattggtggcaagaagaatagtagcttccatcagatagatggttcagtaagcaacttggtcacacatgtaagttttaaaacgccaatgcaatcacaaatattttttactccttttaactgtgatcatgactttgaacattagtttcttgacaaatgaataaataggtttggaggcttaggaataatggatcgttgtggaa

SEQ ID NO: 19913 - DNA, 552 bp, Arabidopsis thaliana landsberg
atctaaaacatagttaaaataggaaaaatagggatatatcactatgtctctctctttctctgaaaggacaacttcttgacccctatgcaatggtctgccttcaacaacacttccatcagcctcaacatcgtcattacggcttacagcctcttgcactggtataaaattttggaggaactctaagcagaaggcaatgcactctccaactaagtatccttcagccatacacgcttctggtctagcatagtttgttacatatcccttaagtgttttcatgtacctgcaactcatacaatttgtagtcattatgtctgaaagtaacttctgtcaaagaacataatgtaaagatagaaataagaccatacctctcgaatagatacatccaacaaaagtgctttggacctcctaaccgtgcttctcttgctagatgaattgggaggtcgaacatgatatcaaacagagaaggaggaaagtacctctcaagttgacacattgtctctacaatttcagactcttaggaaattagattctcagggtcaatggtatgttggc

SEQ ID NO: 19914 - DNA, 686 bp, Arabidopsis thaliana landsberg
tcgctgataaccgctggtcagatagacagaacaggcacggacacccttcgcttgaccggcaccagacgaagaccggcgacgaatcatcccacggtgcggcctcgtccagctcagaggcccacgtgcgttccggcccattataacgggccctgcgtggccgccgccggttacgggcctaacctgtgaaggcacccctgtaattacagtctgtaaccccgctttatgggaatattctagggataacctaggtagttgagggcacatgcgtccttagctcaaggcgctgggcgatcaggtacctataaatacccctgtacagtgcccgtgggaggccgaatgaacagagctattgccctctagcacgtaaccctgttgtcaccaccgttcacccttgttggcctccttgcaattgagtgcaagtgccaacatttggcgcccaccgttcgtgctacgaacaaacaacccgcgatggcacccaagagagctagttcgaaggcagccccatccatcgacgaagcagtgaaggaagcgctcctagctgagaaaaaaatgcaaggcccttgcggacaacaccccatagaagcctccaaagacgaagccctcagcaagagacagtgtcaagaacaccccactcccgaaggcaccctacgcacctgtagctccgaaggactaccacaagcaccacc

SEQ ID NO: 19915 - DNA, 371 bp, Arabidopsis thaliana landsberg
  unsure (1)..(371): unsure at all n locations
cattgaactgggttttagtgtgtttcatttcggatgcttcctatccgattcactntcagcgtttagaaacgagctggagtaccgccgtttatagtgtagtcgcgtttctgaagataaatattttttgatcagaggttatctgacagattttatctcgttatttgtatagcgcgctgttgccgagcagtcgtaagagatactatgagcagtcgctcatcgtattatccaaaacgtttagaaattgcgaatcaatttttattttcaccgaagttaaaaacttacaaaataataaatgggagtatggatatacggacccacttccccccctttttgaatggggggggggtagctgaactcgtctaaagacgagc

SEQ ID NO: 19916 - DNA, 1113 bp, Arabidopsis thaliana landsberg
ttcccccgatgggcgcagaacttccttaaagttacgcagaggatttcgaacatctttgtagcacttgaaccctaatatagtcttgtgcttgagatttttccaaatctagttccacagtcatcactttcccaacacaacctacgatttctttgatagtatcttctgtgtagtagtttatcgggatatttctgagtcgaatccaaactggaagaaacaagagtgaatcaacagaaggtttttccacccaacgctccatcaagacacatcactcatcctgagtccatactccagtttttaagatttcaattaaatcatcttctgatttgaaaaagaattgaaatctctcttggataaagcaacacctcttacccttgaatacaatctccaaattctaggcatgtctaatatccaattagacatcctttggtgagacggattcaaaaacctgcccactatactgcagttatttctttcaatggagcaaaactgtgcttgattagacaatatcagagggctatcatcgttaattgacatttcttttatcgcttgatctaaatccatggtcatctccactactagaagaagaaagtactttcctgatacaaaaacttgatgaaacagctatgccgacagaaaacggggatatcttcggttcttggctcctctcaattatcaaaggagtgatgttgagggagaagttcttatgcccaaagcaaacgggacggcttaattaacggcaagggagaagttcttcaatagagctactatgaaagagaagagagaaaacctcttattttttaccgagggaaatctaaaccagtcaaaatttgaataagactaagtattaattgcttctgtcccacttaattctcccacatcttcacacgtactaatatattatacatatatatcaactaaataaaaatatcacaaataaagaactaaaacaaataaaaacgaactttaataaaatcccatatcttgtttctctctctctctcaaagttagtatctcagtacctttacgctttgtttgtctctatcttcttcctgatattcagagaatggtttcatcagatgattggacgaagtgtgcgatgagagatggagcagt

SEQ ID NO: 19917 - DNA, 715 bp, Arabidopsis thaliana landsberg
gtaattagtcgacttcttacgcttaaggatcgctcttgggatcgtttctggtcccctaccgcgggtcctgttccttattggtttctccttgaagactttttccttctgcggtttctcctcctgcaccggagcttcaatctcctcctcagaagcttctggaacttcctcagtctcggtttctgtgttgcctccggttttcttcttggccttcttctcttgctcctgcaacacacaaaaaaagatggcgagaactgttagaatggagagagaagaatgcaaagagcattgaggtacaacaaaaaagaaaaggtaatttccttcttttctttcttctcagcttccttttgagctcttatagcagctttagcagcagctttctctgccagcttcttcttcctttccatggcttgcttggctttagcaatctcctcttgctttctcatttccttcgccgtagctgcatcaaccggcttttcttccttctgcggctttccaagaccatatacttcatcatcatcatcatcagcaacattctttacttttactgcatctttagctttctcagtattctgagcaacagtagcatctggtttaggtgcagaaactggttcctcctttggctgcggctttgccttagctttagggacaacctcggtttcagaaggcgttgcctttgatggtgctgcctctggagcaatcagaggcttctcatcgg

SEQ ID NO: 19918 - DNA, 348 bp, Arabidopsis thaliana landsberg
ttcattttatcttatataaaatactatttcttattgaatcttaattttccctaaaatttacacaatcaatctcaaataattataggattaatttatacatgcacatagaatggaaagtatttttaaaatttatgcacataggcaatatatttaaatttctatatttcataaatttcatttttatatcatttaagaaagactaacttaaattcaatgcattaatatacaagaaatctttatatacatggaataaatatttttggtgtattaaatatttgtacaatattagttgttaatatattttagtttggttatttttaattaattgtgtatttatatgttatatat

SEQ ID NO: 19919 - DNA, 610 bp, Arabidopsis thaliana landsberg
ttgagaggttataacaaaagccatactcccattttaagttaattataaatgtttgtttaccaacccttatatgttgtttttgtctttatagtatgttcgaagatattctttctattaaatatccaggattgaatgaaaaagaactcttcttgaaaagaggcgaggaatatcatgtgtgggtgaaagattatgtatgtctaaatagtttatctatatattatttgcatttatttattgttattcttatctatcatgatgtttatttcaaaatttgcatacatgttacatattggaactctagtaatccatttccaacttgggttcaagagatagtcgatggacctttacacaaagtcaaaacatggccaatgtattttacaagaggctatttgtttcatacgcaaagtcatggagctggacgtaagacttgtaactatggtgtatgtgtgaaaggtgaaaattatacggatgcatctgacgctgcagatttttatggaaacttaactgatatcatagaacttgagtatgaggggtggtcagtttgaaaatcagacttattaatgttcatggtatgaccctaaagctcgagaggtactcggaggagcaatag

SEQ ID NO: 19920 - DNA, 925 bp, Arabidopsis thaliana landsberg
ggacatttgccgtcaaacaatagatcatcaagtggtgggaaaaaaagaaataaacatccacgtatagcgtaatatatagcaatgttcatatggaagtattttaaggttctgacgcagtctagatcttggtaacatataccaaggatatgaaaagtgaaggtaacatcgttgtcttatctcattaatgaagataaattaaaaagaataataaatattttataatattttacttatggaatacctattgacatatccacattgacatatccatgtgcccaaaatatttataattaaataaatgaattataaatgtaagcgggaaattagccatcaacccgaaagtaggttaaagataagatattggtttagtgaagcctatatattatataaaccgtaacataaccttagattacctaaaaaaacttatttttttaatggaagactcacaagagagccttactatgtgtggtgtagaagaaagttataaagaaagcgagggttcaaatgttgttatagaggtattttaaattttttttaggaataaatctattgatagaatgattgtttaaaaatttttgttttttctgaaggtgatttcgatgacagaatttcacataaactcagaaatctcgtcactgaatcgacagccgatggaaaccacaaaaagtctaagctgggccgagcaattaaagatcgaggaggctcgggagtcaacaaagcctgttatcgaccccgtaatctccgtttgtctcgacaacgaaaaccccaagcagtgcgtagaaattggcagagatttgggcgaagaactgacagccgagctaacttctttcctaagggataacgtcaacacattcgcctggtcgccaaaagacattcctggagtaagcgttcaaatcgtagtgcatgagctcaacgatgacccaat

SEQ ID NO: 19921 - DNA, 1077 bp, Arabidopsis thaliana landsberg
gaaaataatatttggaatttgaggttttaacatcgaaacccccacgcccacgatctggcattgcggcaaaaagagattagatattctggaatttaattttaggatatttttgatgttctggacgcaaaatttacaatagttggtattcaaatttaaatctgattccgtaagaaaatattataattaagtacattgattcaagaattagaaaaataaaaataactgttaatgaaagattgatataagaattcggaaaattagttctattattttattaaaatatcaattaactgttatattcatttatatactatgttttaggtgtttttccgtttatgtggatcaaaacaagcaacatatttcgaaacttggttggacaccatgatacttaaaaaacaaactgaaaacgtgataacatgcggcgtcattaattagctgtttaaagtatgatcttttaatgtagtatactatgcatagtaatcgaaactctctcggacacgattattgagacaactcaaaagctaaagtttcccaaatgtttgaagaagatcggcattatgatcccgtctccaaggagcggtagttaccaaaacttctcaaacattttgtctaagcctcttctgattaccaagctctctcaagtgcacattctcagtttcaggggtaattaccaagcatctacaagcttgaagaagatcggcattataaccatacctccaaggagtgatggttaccgaagcttcttcaatatttcttatctcgcagcctcctccgtagagcattgtaccaaaagctcgtatgcgttattagcgcgagctgtttatgaccaccagttggtcgaggatttcgcggagttcatctccatggtcgaatccgctatagtttcaaaagacttttcaaacattgcaagcttctctaggttgagcatctctttggaaaactcatagagcctttatcgttatctttattgccattgtattatttcagttttagtttgtatgaactttcttcttatgaggctttaagtgaatacaaatttgtttgacaaaaaaaaaaaaaacatgatcttttagattt

SEQ ID NO: 19922 - DNA, 718 bp, Arabidopsis thaliana landsberg
tgctttacttgaaagggggttcatattttagtcaaaataaatagattatcgatatgaaatatatatggcaacaaagaacattgttggattgatccactcggagagacaatggaatacaagatttagtcttatttaggtgatacatttaattttgtactcaaaagaagaaattagtactttaagtgatcatcaatgacctaaatacttgacaggaacaagtagaagctcactttttttgcccacagcgagtccaggagattcttccatgtcaatatcttcgaccaccataccatctggtacttcccaatcaaactgatacaacatattcgctagaccaaactccaccattgttgtccccatgtacattccaggacagattctccggccacttccaaacggtaacagctcaaagttctgtcctttagcatcaatgttattatccataaacctttctggataaaacatatctgcatctttccaggaatcaggatcacgccctatagcccaaacattcacgtaaagcaatgtcttgggttgtatcttgtagccattgatctcaaattcagacataacctctcttggaagtagaagaggtactggaggatgtagcctccatgtttctttgatcaccatcttcaagtaaggtagatgatctatatcatctaaggtgatcactgatttgtttctcatttggtttctgatttcggattgtactttc

SEQ ID NO: 19923 - DNA, 1458 bp, Arabidopsis thaliana landsberg
tattcttattgaccccgctttagcttcttctagggttatagcttcatcaccaaataataacttgaacggcgtaaaacctgttgatcttgatatggttgtattgtggctccacaccactttaatcaactcatctgaccactttcctctgggctgattgaagattagcttcattattcccatcattataatgtcatttgctctttcgacaagtctgtttgactccggatgcctgacttatgcaaaatgaatcttcgtgccaatttgatcacagaattccttgaaagtttcggcatcaaattgtgttccattgtccacagttatagccttcggacgccgaagcgacaaacaatgttttgccagatgaatttctggactgtgaccgaagttattgtggccaaagcgttcgcttcaatccacttagaaaaatattctactgccaccacaacataccttaaattgccttgtgatggtggaagtgggcctagcaaatcgaggccccatctttgcaatggccaagtgggttgtattaactgagtgagagatgaaggttgcttctggtcccttgcacatttttgacaaccttcacatttttggactagctctactgcatccgaagctgctttcagccagtaaaatccttgtcgaaaaacttttcccagcaagggcctagacccaatgtgagatccacacagacctgcgtgtatctctttcattaattcaataccttcaactcttgataaacacttgaggagtgggaacaaactccatgtttatacaattccccttctattatcacatatggtcttgtccttgcctccattctcttgttataagcttcgtcacttgaaagacaattgccttggaggaaagatattatttcagttctccagtcttcactgtgtactagagaaatagtaagcactgctctctccatgagctcaatcgaaggtgcttttattgtttcaaaaaatacttctgagggtagagggagcccctgagccgctgatttagctagcaaatctacatgttcattttcacctcttggaatattcttgacagaaaaaccttcgaaggaagcttccaaccttcgaactacatccaaatatctttcaagcttcggatctcatgccttgttactcttgtccacgtggccagcaataacttgagaatcagtctttaggatggcccttcttattcccattgcccttagtttccgaagccccaatagaagtgctttgtactcagcaatattatttgtacaactgaaatccagtttgactgcataacatgttttgacttttgaaggtgctactaggaccgcagctactcctgcaccgaagctccccaagaaccatcgcaaaatactgtccaagcttcggcatctttgcttgtcaatcttcgtgagccctggcgtctaacatcgatgaaactgctagcgttgggatgaatgaagattgt

SEQ ID NO: 19924 - DNA, 1010 bp, Arabidopsis thaliana landsberg
cggctaacaaacaacaaagtttaaagaaaaacagttagatggatcatccagcttaaccaacaattatagaaacgaacatcgctcagatgaattagtcagatggataatttgaatggaccatttagatgcatatccctaaggagcaaacaaacacgacgttaggtctatttaaataacctctcgaaaccaacattggtaacagagaaatcaatttccaacattgctatttgtatatcaatacatgggacagccacacacgcaaacatttctgatcacgagagcatttatagcatcaaagtgattttgaggagaatcatcaaaatcatcaaaacttaagaaacttaagaggactcacatataccatttgacactcaaactaacaaaagcaccaatcgctcatttccaaattaaaagaattgaacatctaaaacaagtatagaatcacaagtcaatgaaatgcctaaattgaataagcaaagagaccaaaactcaattaatctaaacttgaaagcaataatttgttaccttaatatcacaaaacctgcttcttgtccaatctttgaatcttgcatttgcaacttctcaggaagcaaccatgtcaatccctgcaacataagaaatataattggcgaattatcagctgtaaaaggcaaagagacaacccctaaaacagatgataaatagggctaatcatttcttcctaaagttcactagaaaccaatctattgaatcaaaatcaaagctatcccaaaaacagagaacacaaaagctaaaaagaaaactgattcactttaacaaatttcaaaactttctgtaaagcacacaaatatggatggatttatgaatcaatgagaaggcaagctccatgatacttagagattcaacgaaaaaaaatcaccaaattgagagtagctacacaagctaagagaacacaaatcaaaatttccaaaagatttcaatagctgtgaataacgaaattaccttgctttgctttgtgtatggagattctc

SEQ ID NO: 19925 - DNA, 753 bp, Arabidopsis thaliana landsberg
cctgaaattgaaaccataaacaacaaatgattcagctacttcacaatatttttcttttatgttaactaaaccctaaaattttatgaatttctcactttttcagtttagtgtcgacaagcggcgacctgaacgagaaattaccttcttcttcttattctccttcttcttccattgttagttttcttctcctttgttcgtcagtccttgcttatatttttcttacgtcttcttcttcttcttcttgttcttcgttcttcttcttctgcaactgttgaagatccaaattcaacccttactaaatagaatatgagaattcatatgccattgaggaagagaagaagctgtaaataatagaagctgtaaataattggatttttcatcttcttcgccccccaagcttcaaacattctctacttatccccccatataagaataatacttttatttatttattttaatacagataattggtaaaagacaaataaatctgagggtatttgatatatttacgacccaaccacactttggatctaaattcatatgagtttggatcttttattcccaaatccaaaaataaaagaaaaaacctaaattcttaatttttttctttctttttccaggtagcttcacgctatctctctcattgaatggatcccatcgcttaacacactgatcatccattctttcaacctgaaatttaaaatccatattcacaatcagattctcaattccccttgttctcttcaccattta

SEQ ID NO: 19926 - DNA, 1221 bp, Arabidopsis thaliana landsberg
  unsure (1)..(1221): unsure at all n locations
tgctcgtctgcccaccgtgctcttgttcgccggagatctggctcgagtgaagcagaccgcccgccgccgccgacggtacgtagcgatgtcgacctcctcttcttccgctgtcgctacgccgccggccgacgcctcgtctgaggagacgctgagtagtttggtggcggaggagttgcgcaccgacgattctgtggattttggcgtgtcgcggatgtcgtcggtccgcgtgcaagatatgcagaggctgggttactttggcggcggagttgctcgtgtcccggggacggaggaagtccccgagccggaacgangntatggttgtgttcgaggcgttcttcgccgctggtctctgcctgcctgcgcaccgatttgttggcgaagtcctgcgcaggtttaatgttcagatacatcagctgactccgaatgccgtggtggctctgtcgaagtatgtctgggcgacgacttcgtatggcggacggccatcagtcgaagtctttgcgaagtactattgcctgcactggcagaagaggatgattggagatgaagttgcccagtttgggtcctgcacgtttacgccgaagaccggcaagaccacgatgcaggtagttgacttggttccttgcgcccgcaacaagtggggaaactggaatgagttttggttttatgtcgctgagggtaccgtcgaagaccatggaggggctccccggtgtccgagatgtgttcgtcatttgtactcagcatacccgcccttcgaggtggcggaggaggatgcggacgaaggggcccttcggtgcgccgccggtcagagcagtgggcgcgatttggttgaagagttcgtggcgtacggggtctggcccttggcgcacggctgggcgctgggcgaagtgtgccctcgccagatgccctttcacggagggagggtggtgcgaagtcctgccttcgcactgaatttgcgaaaccgtgacccggccgcctttgtgcgtgatgcggaggacttggcggtgcggctcgtggggcgttacgtgccgaggacggaaggccagcgcagctttgacatccgtgggtcaaatgaacgtttgaacagggtcttcgaattaaatcaactgcgtacgacggctaccctggtcaagacgaagcggaccgccgtgggaagaaaccggcggtggagactggaggcgaccctgcgctggtgccgccgcctcctcgaaaaagagaaaatta

SEQ ID NO: 19927 - DNA, 2059 bp, Arabidopsis thaliana landsberg
gggagagcggttgcgctgacgggcgggcccgccacgagtatgagagaaagggggggaggcgcgcgggggggatgggccgaaacgtaggggggcgggggaagcgggcttcattccttttttcttttattctggcttttgttttcccttttctttttatttactctatttgattcaaatccaaataagccacaaattcaaattagcatttctaagaattatgcaccaaacaaaagtagaatttagggtttgacatgatgcaacctttcataccccttggagttttagtccaataaactataattacacaaagtagatagcccctttttctatagaaaagagaaagtggggattgggaagggtgtgaaaggagaagtaacacctgaatttgtgaatatgagcaaagaaattttataccccaaattcagggtgttacataggggcaaaatgcaagggtgataaaacttgcatttgggtccctaagacaattgtgactaaccttgtaggacccaacaagagttgggtacctaagtcccaagcctaaatttgccttgcaggtttatgcatccgggggttcaagctggattattgacagcggatgacaaaccatatgacgggggagaagaagatgttcacctcctacgtcaagaataaggattcccaagattcaataatattcggtgatgggaatcaaggcaaggtaaaagggttaggtaaaattgcaatctcaaatgagcactctatctctaatgtgtttttagtagagtctcttggatataatttgctatctgttagtcaattatgcaatatgggatataactgtttgtttacaaatgtagatgtgtctgtctttagaagatgtgatggttcactagcttttaagggtgtattagacggcaaactttacctagttgattttgcaaaagaagaggccggtctagatgcatgcttaatggctaagacttgcatgggctggctgtggcatcgccgcttagcacatgtggggatgaagaacctccacaagcttctaaagggagaacacgtgataggtctaaccaatgttcatttcgaaaaagatagaccttgtgcagcttgtcaagcagggaaacaggtgggaggagcgcatcacagcaagaatgtgatgaccacttcaagacccctggagctgctgcatatggacctcttcggacccgtcgcctatctaagcatagggggaagtaagtatggtctagttattgttgatgacttttcccgcttcacttgggtgttctttttgcaggataagtctgaaacccaagggaccctcaagcgcttcctcaggagggctcaaaatgagtttgagctcaaggtgaagaagataaggagcgacaacgggtccgagttcaagaactttcaagtggaggagttccttgaggaggaagggatcaagcacgagttctccgctccctacacaccacagcaaaatggtgtggtagagaggaagaacaggacgctcatcgatatggcgaggacgatgcttggagaattcaagacccccgagtgcttttggtcggaagcgtgaacacggcttgccatgccatcaacagggtctaccttcatcgcctcctcaagaagacttcgtatgagctactaaccggtaacaaacccaatgtatcttactttcgtgtatttgggagcaagtgctacgttctagtgaagaaaggtagaaattctaagtttgctcccaaagcagtagaagggtttttattaggttatgactcaaatacaaaggcgtatagagtcttcaacaaatcatcgggtttggttgaagtttctagcgacgttgtatttgatgagactaatggctctccaaaagagcaagttgttgattatgatgatgtagatgaagaagatgttccgacggccgctatacgatccatggcgattggagaagtgcggccacaggaacaagatcaaccatcttcctcaactatggtgcaacccccaactcaagacgatgaacaggttcatcaaaaggaggcgtgtgatcaagggggagcacaagatgatcacataatggagg

SEQ ID NO: 19928 - DNA, 982 bp, Arabidopsis thaliana landsberg
  unsure (1)..(982): unsure at all n locations
ctctaagcattcttaacaccaaggcttcaattccgcgcattcgattctttgtgatagcaactagagctccattttagtagagaactctttgagttgtgttgagagctcgtgttgtgacttgtgtgcgtgtgttgctctgattatttgtcttgtgtgtgttgctcatcccatccttactcccgtgcttctttgtgaacatctttgtaagggcgagaggctccaagttgtggagattcctcgcaagcgggatatagtatagtgaaagcaaaacaccgtggtattccaagtgggtctttggaccgcttgaaaggggttgagtgcaaccctcgtccgttgagatgccacaacgtggagtaggcaagtgttggacttggccgaaccacgggataaaccactgtgccatctctgtgattgatctcttgtggttattgtgttttgttgagactcctctctagccacttggcattattatgctaacgcttaaccaagtttttgtggcattaagttcaagtttcataggatcacctattaaccccccctctaggtgctctcagtgtgccagtcgctcctcaagatggcctcactggcagcaaaatgttctctgatgagttgactcgcgtgcttgactgggattgtactttnnnnnnnnnnnnnnnnnnnnnnnnnnnnattcctccggcatcaacgttagcatgatggttcgccaaccgagcatgtcgatggtccacaaaactatatagttggggaactcacaggtagattcatggcactgatttttggttttaatagtgaaatgacatcttaaccatttaactagctatgtccaacacattatgtatttatttctctaaatattgtcagctgctctccaatacaaattacatggttgctcatggtctatgtaaggaaacttgtttttagaggatcatctttagatgggttgaatattgtaatattatttgtctttatatacataatgtag

SEQ ID NO: 19929 - DNA, 843 bp, Arabidopsis thaliana landsberg
aatacaactattatcaatgatgatgatagctttctaaacattccaatgatttgtttttgcaggtgttgttcacggactaaccaaaccaaaacgcagaaacaacggagtttaagcaggacttgattagtgatcattgtcaagtgtttaaaaggtggcaaaaccaagaaagttttgattcttcagatgtgtaaatgatcatgtgaatctagtacgtatatcagacatgaatacaatggtcttaaatgctttgtagacatgaatagtgcatacaaagcataatcctcgtagctcgaggtaccgtaatagactcctgccccacataaccgtcgatttcattgttaaatttgacatatttgccatcaattctttggctagcatacaaaacatccctcactagaacctcctttgtcacttcattctctcacttaaccaaaatcgcatactgtctaaacgcaatatccctcaaattctcaggatctttactaaccaacaaaactccattactccaatccttcttcttaactattccacggcttaaaagcccattaccattatcacttatccccaaatgagtggaagttgattcgtctttacccatatgatctcttccactcgtttgtatcccaaagctccaaactttacaaaaaaaaaactgcatcagagtggaaactcacatgatatccaaaatttgttgagatttttccaaggtccactcacagcctagcttccattgcattgaccaatgatccagaggaaaacaaaccgtcaggtctgacttgagccttagcttttaaatgaaaacaccacccattttctccccacttaaccccatttctttttaaa

SEQ ID NO: 19930 - DNA, 512 bp, Arabidopsis thaliana landsberg
ttaaagttttttaccattttcgcaattttttgacaaaaattatagttaaaacaagaagaatgagaaactgaaagctacaaaaagaccaaattaacaattcacaagcaaaaaacatgaagcaaatactagcgaacaaaagcagaaacccatgaagaaacaccgattctgaacagtaaaggtcagacagttgtgtggtttcctcaactcgaaggacgtagaatcctcatctgtgttgccattagcaacccaaactcaaagccgtcctcaaacctaaagtaggagaacctacaacttttccgaagattaacgcaaaaacaaagcggctatagaaaactaatacccttacccggcgacacgagagcatctatgggcagctagataagctgcctccagccaccaatctttttgcaaatcaacaagaaacatctcccatagatagtgaagccacctagaccaaaccaccacctgtattccccacagagaaccccactagggcaacacgcaagagatct

SEQ ID NO: 19931 - DNA, 477 bp, Arabidopsis thaliana landsberg
aaagccgttttttgaattatcctcgtcacctctacggaaaaacggaaaagttaacccgatcttgaagcgcactaaattgaaattcaacattggcatgggatggtatcttacctctgaagtgtttttcggacaatggaagtgagatcattggctttggaggagccggcattgttgctgggcaccgagagaattccaaaggcgagaaagaatcaaaatcacgaaagtggacatgatcaatacggcgaatactagcgttgaacgggaggatttccgagctgaaggacgatgattcctcggtctcgccatcatttttgcaacaaggatgagatccggccgagcgagattcgaaagtagcagagcagcagcagcagcaggatcagaaagaaacaatggcgttttattttcttcagattgactaatcaaaggacgacggggaagtcaggccattgttttaagtcaggcccattagaaaatgag

SEQ ID NO: 19932 - DNA, 484 bp, Arabidopsis thaliana landsberg
ttctccgttcattatgttttcacgaatttaaacttatatgatttttgttatggaaacacattaactaaaatcggttagaaagggaaaggttttattattctcaccggaaaaatatgggtttagacttgaataaaaaatatgcttttttgtaacattgtaaatttaatttaaagatttgcttgttatgggaacaacttaaagcttatgaatctattaggtgagaatctttaattaatgcagatttgctcggatcggtttaacagatcgattacagtcgcggctcgggtcggctgcgaagagcagtggataatgacggttttacctttaaatttttttttttttttgtaacgtgtttttataaaaaaacggcttaaatggcttgtaattttactgtctctcattctctcttaatagtatagatgtctctgtgtgattcaccattgattgtgaagatccaaaggagttttagcatgagattcaatca

SEQ ID NO: 19933 - DNA, 650 bp, Arabidopsis thaliana landsberg
ttaggggacaagttccagctcgctaccctaatgaaattcaacatgttaccgaactatatttcctctttctacatgactctgcttgcacatgatcccgatccagctgctggctcatcgcagaaaacctttcaggttcgagttgatgaacaacaatttggcagtttggatataaactgctccattgctagacctaaacacgaaggtgacttacttgaaggtgacttattttctttataaaattctagcctgactataaaaatctcccttagcttgctgattaataatgaatgttgcatagtgtccaccgagacgcccttcatgcctcactttcatggtggcgcactgggcgatggtatcttcaaagttgaattgcctgattgtctctcagatactgctttgaatgaactggccggtgctgtcctcagaggtgaattgcctgagcatgtctttgatgatgctttgtatgcacgggccggtggtatcttccaaggtgaattgcctgattggccctcagatgatgttttgaatgacggaaaacgattttacatggtaaggtgccctatatatattatgacacaacaacactgtattaagttttttttttgggtgtgtgtgtgtgtgtgctagctagctcatgataaattaagcta

SEQ ID NO: 19934 - DNA, 707 bp, Arabidopsis thaliana landsberg
  unsure (1)..(707): unsure at all n locations
aaaaggtattcaaaaatccaaacattaatttaatatccaaaatattaattatatttaatcgtaatataatctaattatctaagaatataattataaatctaaatatgtcaattaattttggacctaaatatccaaaacaactaaactattcaaaaattatttgttatgtttgtcaaaatttagtaaaatatattcaaatataattaaatttatttaaacttaacaaatttttaaaaaaattttgtttggagacccgctatctacatacaaaatacaaatttaaatgtattttgtttttaattaaatttaattaattaaattagtatttgattttttaattcttaaagagatgaattaatttactctttaaatttttatttctaatggcatatctatgtaattacttacaaaagataaggttacatttaaaatgtacttcccaaataatataataggatcaccatcacggacccatagtatcactaatcagttgcaaagtaaatttagatttctattttaagagtatctctttaaatggtatcaatttatgacgatacccaaaaaaatagaacaattcaatgnaggattttctatttaatagtacttaataattatgggattaactttcaaggccagtgcccacttgtaccaataattaaccacaagacccatttttttttcaaaaattaaacattggtttaaggtta

SEQ ID NO: 19935 - DNA, 1221 bp, Arabidopsis thaliana landsberg
agaaaccgtttataaaccatgtaaccccctttaaaatcccttataaatcattcgatgccacttactgatgctttaaaaacgattgtaaatcatgttttacccttttaaaagcttttaaaatccctttgaaaaccaaatttacaaggatgtttagacataccgttgttgttattgctttccctggcgtctctaggcttgtaaaccactttgtatctataatatttcctgcgattgatagtggcctacaacaacaaaacagtcaccaatgaatgttttattttaaaaaaactcactatcttactaacaaaaactcacttgttttttcttgacttcttccactcagctgatttctcaaatcttgttgcatcaactttcgcatatggatgcaatattgggggcttcttcttcttagctttgaaaggtgcttttttaggaattgaaggaaacgtaccccgcttactctttctttgtgtagcgggatgatcatcattactgtcgccaacattatcagcgttatcaccatcacttccaataattttcctcttcttactctgtgcctatcaaaaagaaaaaaatagatgttttaaaaactttgtaaacaaaattttcaatcttgcaagcattcttttaacagaaatttctagcaatatcataataaattagatactaacctctttccttgttggaacatcaacatcaacactatcaacttgtttctgcctctttctcggcacctaaaatagtaaaaaacaccgtttaaaagtacttttaaaatcccttataaacatcattacaagacaattgacaattttttaaaccagtatcgttgtaaatactaacctgttttcttgtttgaacattatcctcagcataaaaacttggtttaagtctcttgttctgaagttgcaaaaaagataaacttttttaagatttgaaaaaaacattataaacacttggtgagataatacaattttttttaaatgctaacctcatttcttcctcttctaactctctttttatcttttttaacatccagactttctttagataaaatattgaaatttggtgtagaggatcgtggagtaggagactgatccttcaaaagataatagaatgtaaagttataaaaaagatactaatcatttttgtaagacttgtagagaaataagatactgcacttttgatgattcttcagctatttcatcactaacatcacgttgg

SEQ ID NO: 19936 - DNA, 1480 bp, Arabidopsis thaliana landsberg
tcaggcatgaagacgatttcgattccggttaacgaaagctaacaaattctcggagggagtaaaggtgagattcagagtctgctgaaccggaatgataaactctttgattagagaatttgacaacggtattaaagcttgtaccgttgagtcagcgttgaagtttcgcaagagagtgaaaccgttgactttgacggagaagaaggagttaaccgcgtcaaaaccggatttgtactgagtcgggtaaaaatataaccggagaaatatcgaaccgggagtgactgggaaactgtaggtgaactcagatcggaatattcgagctttcatgtacggaatccgagaaacccctgctttttggtatgacgcttctgaagtgaatgaagcgttgactaaattcgacgacagaaatttccgatcttctgccgtccagttccggccactgttgtcgacgttgttggaagtatcgccgcagttgaagagaaagacatcggtaggaaggtacgccgccgtaactccagccgtaacagagacgagaacagagagaagaaacaaaacgttacagttcatcagatatttttaagaaggagattagagatgagtgcataacttaagctgaagaagtcatggatggtgggcgagtcaattggtcaaccgttgactgacaaagcaaaacaaatagtctgattcaataattgtctgaagtgctagtggttgtatgtgtgatggaacgatatgtaatgtttctcttttggcacaatgcttaagatgaatatagtaaagtctaccgctccaacaatatgttaaacagtatacaaatttcaaaaataatgcatattttgctatgcttcataaacatagctacatagggttgttctttatgatgttgctagcgactaaatataaagaagagatgtgatagaattagatcatatcaaatcaacaagttataaaaaacttttactataatctttaaaataatcccccaaaaaaattaaaaacaaaaaccctaattgcgaagaaggtagtttaatccgcagacctatgaagtttcatagcatatgttaggtaaccctttttcacgacacattgatcactattcaaaccgacgagatcgatgccaccggagatcggtctctccttatagctggtcatcagaggagacaatcgaatctttgcacgacccatcacaacagttctgttggatgttccaggatctctatacgacattcctttaagcaattctacgtaaagatattgtgcaggaaaatttaaaggaatcttcagtggtggttgattaaccttaaaagagtcttttaccacatatgttccgtattctttggtgtcgtctaaccatgccttgatgaaatagtagttaggtgggccataagtaggtttcagaaaaagatgtctgtcatcgattgcggatgctttataaatcttcacgagtagcgttgtttttacgtgatgaacgatttttcttttt

SEQ ID NO: 19937 - DNA, 476 bp, Arabidopsis thaliana landsberg
  unsure (1)..(476): unsure at all n locations
caataattgtgctagtggtatgtcctactcgggaacttgcttgtcaagctgctgtataagcaaacatcttgctcaagtatcacccaggtattggtgttcaagnccgatgggaggcactaaacttcctactgagcaaaggcgcttgcaaaagagtccttgccaggtaaatttccatttgtattaatatgtaaacttatttctgagcaaatcatgcatttccattgagctggacttctcagatgaaacttgctatctgaccaatagagttgcatatatttcttttcaaactgagttggttatccttcgctagaacaatatggactcatgatttgaatttctaagaatatgaattaagatagattgttttttaaaaagaaatggatttccctgtccaaggtaggatttgttttcagtcacaggatatgttctttgatctaagcctcattatgcaattagatatttttgcattatttgtc

SEQ ID NO: 19938 - DNA, 3556 bp, Arabidopsis thaliana landsberg
caacactaaattcaacatgctctcgtgataggtttgtaattgtttactttctggccctttcttggtaagcttcggtttcatgatgtggatagtcgtcttttctagactgttctaatgagaatgcaaatccttcttttctaaccataggagttgtttgatcatttgggacgtccttgatgtcgagtggtgcttggttggctttcccatggagctctttgatttaatccttcatctctctcacagtgtgtgttagctctcttatacctctgtcgtgccatttagacctctccttgagttctaaccaatcatttaatgccctcatacttgactttaactgtttggttgagcactttggtcgagtatcaattgagcctttcatgttcaatggaacatcctctatttctaacgcaatgacagctttaaagatctctgatccttgtactttgttgtgtgagtctaatgacatctcataacttaaggtcaaactggagagaaatccagcttcactactttttgtcaaagcagtttgaaggtgatctttgtcaataagctcctctagagtttattagctagctgacccatttcttcaactaagaaggtttgtccttttattgttggctttttcatagtgtccctgatgtcaaacttcattgtgaaatcgtcccccaaattaagattaatttttccttgcttaacatctatgactgctccaactgaagccaagaaaggtctttccgagataagaggatccttagattcttcatccatctcaagcacaacaaaatcagtatggacctctactccactaatcattactggcacatcctctcacataccaaaaggtctccttgaagtcctatcagcaagaatcaaggttagatcacaaggcttgtactgaacgaatcccagcttccttgccacagagagtggcattatgctcactgagggtcctagatcacatagacaattgctgtaagtcaattacctaatggagcatggtagagtaaaagatcctggatcttccaatttcttggataaaattgatatatccctattttcactgatcttatctatgttttaggtataggaatttgagtctttatgttatttctcgagtctttttagtctcttttcatgtattctatgtagtggaaaaccaatggagataaagagacattttgtagcaaaaactaaagaaaaggaagctaaggacgactttggttcaagaatcagcaacgagtgtcgaccgacacactcttggtgtcgatcgacactagtttcggcccagcaaaaaccctacacactttcgagtttccagaagctcaagtttgccccagaagatttccctatttgcattattagtccctggacgtttttagggtctatatatattgtttttagacctaagtttcatttatcaagtcttttatcaacttctttgcaaaccctattgtaaaagacataagctattcattcattgttattcagagtttcattcagatctatatacagtgaagagatcccttctttccccttctctattcattgtgtttatgcttttttatctcaattatgttgtttgtttcattcaatatgtctgagtaatctgcttgttaggaatagggtttctcattagggattcatatggtttagtagattgcccattttgctaagttatctgtagaattcttcatctttaattatacctaatgttatatctagaataattaactagatcttgaatccagacaatagatatgcccgccatacgtatttgtagttgaatctattatttgatcagtttggtctataggtgtgtaataagaatcggcctatttactaagatgaacaattgaactcgttaagaatgcatatttaggttgatagtctctcggcttctccggtcactattagctatagatatagagagtttcgcggcacgcccactggttcttccataattagagtttgagtttaagaatggttcgataacaacctagctttaattagatctactaaccaatagtttcctgagaagaccatgttcctagctcttttattaaatcgtttacaacacaatcaatctgctattttcttattttgttttcttactatttcactcataccctgctagcttaatctagacatttaaatcactgtttgaacaaaagaactccttgaattcgatcctaaaatactgcaattgatctcttatttgagagagtagttctaggtaatttgaaccatatcaaccgacaaattaaaagaagccataatagaacttttgaagaaaaataaagcatcgtttgcgtggtcagcagcggatatgcctggcattgatccaagcataatctgccacaagctaaacgtggatcagagattcaagcctgtaaaaccaaaaagaagaaaacttggagtggaacgagcaaaggcggtaaatgacgaagtagataaacttttaaagatagggtctataagggaggtgccatacccagattgggtagcaaacaccgttgtggtcaagaagaagaatggaaaagacagagtgtgcatcgacttcacagacctcaataaagcctgccagaaggatagttttccgcttctgcatatagagtcttgtggaatcgaccgctgggaacgagttactaacttttattgacgccttctcgggttataatcaaataatgatgaatcccgaagatcaggattaaacatcgtttatcacggatagaggtatttactgttataaagtaatgctttttggtttaaaaaatgcaggagctacttaccaccgattggtcaacaaaatgttccacgagcatcttggaaagacgatggcagtttacatagatgatatgtcagtcaagtcgttaaagaaagaggactccgttaagcatttagaagaatgttttgagattctcaatcaataccaaatgaagctaaagccggtgaagtgcacgttgggagtcccatccggggagttccttggttgtattgtgaccaaaaggaaaattgaagcccatccgaaccaaatcaatgcctttcttaacatgtcatgttcaagaaacttcaaagaagtgcagcggttaactggccggattgcagctttgaaccgttttatgtcaagatcaactgataaatctttgcctttttatcaaattctaaaaagaaacaaagaatttatttgggatgagaaatgtgaagaagcatttggacagcttaaggcgtacctaaccagtccacctgtattgtccaaacccgaagtggatgaaaagctctatttttatgtttcggtgtcaaaccatgcaattagcggagtctttatacagggggatcgtggcgaataaaaaccgatttactacataagcaagtctatgacagatccagagaccaagtacacaatgatagaaaaactcgcacttgcggtggtaacctctacccggaagatgcgtccatatttccagtctcatccaatcgaagtgttaaccaaccagccacttcgaacaattcttcatactccaagtcagtccggaagattggccaagtgggcagtgga

SEQ ID NO: 19939 - DNA, 869 bp, Arabidopsis thaliana landsberg
aggtaaagctgatcaagcatcaaaggctctgtttgcagaaatgcttactaatagtggatccttaaaaatttagttttattgtcaggttaagtaaagttacctgcatctaaagttctttctatcctagttcaagcacttggcctacactagtcgtcttttatcacccttttactttactggattgctacgtgtagggcagtgaccaagtcttcatgaccgagaagtaacggcgacctgaatcgattaatacccagctagggatctccaaccacacgacatatgtagcacttaacccttgcatatgtcaactcgccaccgggtttctcaagaccagaacgggttcacgccaaccgagagcacagatacaccatcgtccagcctcttgccatggagggtaacgctactctctccatctctccattcccattgcgtgttggcctttcaggtatcagcctgcccgaggcaaagcttacccatgatgaggcatgtgaccagttaaaaggtcctcaattagaaagcctacatcgacacggtccttaatcgactcagacggagacactacatcgagactctcttctcgtgcaagtcacccgtctggtctcagctttatcatttaaaatcccaaagttttgtacctggcagaggtacatcttgtccgatgttgaacccatcatggccatgatggatccaccatcaagttttatttttgaaaacatccctttccacttgaagcatcatcttttgtttaaaacaaaacatttgtttttctaaagcaggactaagcatcagaaaatattttgataaaacaggtaatcaaggaatggtaaacagttccaagaaaggaagcgcagccattggtttaacaccca

SEQ ID NO: 19940 - DNA, 412 bp, Arabidopsis thaliana landsberg
  unsure (1)..(412): unsure at all n locations
atgcattctggcaaatgtgacaccaaacaaacaattttttttttaatcgtctatattctataaaagcatttnnnnnnnnnnnnnnnnnnnnnnntttctcaaaaaaaaaaatagtattttaataaatattagttatataaatagattttacttataaaataaaatttgatcaatagagaataaacaagtgtcttcgtaagtttctcatagtttctcacttgagagactctcttcactctattttttactttttatttatatttatttttatattagggaggtttttcaatgagaaattaaaatttcaattattaacgtgttgaagtaaataatataaaacactgtaatacataatatttggttcggtaaatgaccataataataaatcaattgaattatttcatacattatt

SEQ ID NO: 19941 - DNA, 389 bp, Arabidopsis thaliana landsberg
gcgcatcaccagtagcttgcgtatcgacagcaggtaaggacttgctacattggattaccgtaaacgttatatagtccgagtatggaaaaccccatgagctttatgtaagatgcatgtttatctcagatgtgccaattgctaggagacgttcacttcaaagattttttgagaaaagacggcatcggtaggcatatctgcagtgcttgttttatacacatatagctctcatctttctccatcactcacctatgagtttgaccattagatttcatctaatagtaacttggaccctctttattttcagatttgtccacacgaagccttactctgctacgacttcggaagcagacaaaaatgaaaccagccccattgtgacatgagctccaaga

SEQ ID NO: 19942 - DNA, 973 bp, Arabidopsis thaliana landsberg
tcgagagcatacggtcggataaacgggcctgctcggctgccaggagagcctgctgctgggtgagagtctgctgctgctgggtgagagtctgctgctgctgggtgagagtctgaagaatcgaagcaagagcagggtccaaagctggaggagcaggggcagcacgggaactcccagcctcatgatcatgtgagcgtggaggcataggaggcggaggcggaggcggaagaggaaccccaaaatcatcatcatcatcatcatcagctgctgcaccctgggagtcaaactgacgaagtgcagcatcctcggcctgagtgtcaaacacaggagcataagctggcactggaatctcaggagcaggacggtaagatccaaatacaaggcgtgaggcctcaagggtactctgaaaacgaggtggctggatcagctgcgcaaagatgtggcacaagtagtgagcatacggtagctgccgtcgagcacgaatcccatccagaacagtatcctcaatctcacagatcagaaagtcaacaacatcaaactcagagtgggataccagggcaccaaggagccaaagctgaatgtgagtggtagcctccctgtatcccatcctaggcaggagtgtccgcctgacgagctcatacaggtacttcgctgcagtagtgaagtctgctggagaacgtcgggacccatctgtgaaaggcgggcgaaacagagccgcgacgtgagctgtccctggagccacaccgccgtgagggcgaccgtggaggatctgaagtgccgtagcagagactgtgaaggcgagtcgtcgaatcagggaatccaaaaagctgacggatctgactagcagtgatccgtgacatctcgcgccgaaaacgaaacctcatccactgatgatccgggtcaatccaaacagaggcatagaagacgcggacccactcctcaacatatctgccgctgatagtcagaaaggacagaa

SEQ ID NO: 19943 - DNA, 1608 bp, Arabidopsis thaliana landsberg
tgaatttactcgaccgttgactccataatggtcaatgtttattcctgaaacacttaaacaaaaacatcagggatggggagaaagataaaaagtcatagacatggatagacatgggacttcctcccaaacgagcttgactcttacagagcttagtcataaaaaaggttgaaatgaggaacagagaagtcctcatctttagtggttgaatcttcagtgcttgaatcatactctgcatcctctcttgacacatggtatgatgagtactcatttgattttcttcaaaataaacttctttctgataagcagagtagtcttcttcttctgaaccaggctcctttgaccaatcctcaacttcaaagttggggttgtgcctggacaattcttgaaggtttagaatggtgtggcttaactcttccatcttgtgagtcaactttccaattgtatcctgcggagccttatatccacctagagctctaggagttcttcagcaacagaatcatgaatcaagagttcttcttcagcataggggttggtggttggtttaggtactcttggagaataagtcggaatagggatttcctcctcactcatcaacttgctctctaggcttctttcctctaagtgaacctcctttctggtcttgtggtgcaaaccattctgttgtgaaatcttcgtcctccttgatagctagtgcagtttccatcttctttggatcaatagtatttgcaaactttttaactcttttttgaaacatccatagttgatctttcagcttcatcacccttgaagataatccctctatgactctgctttgccatttaaatttttttctcatctcataccagtcatcttctgtaggatcttcagtctgagctaacctttctattgctctcttcttatggtcaaaagttctcttcagcttgctgagttgagaagtatagttaactcttggtgagggttcagtttctggttcttcatcatcatccatgtcctgaatcccaaaactctgacctactgtgttgatttccctgaagccttgttgatgtcaaatttcatcttgatacctttttcaaggtttacatcaatttttccattcatgacatctaatactgctctagctgaagctaagaatggtctgcctaggatcaggcgatcctttccttcttcatctatgtccattaccacaaaatcagtaggtatctcaacatttccaatcttgacaggcagattttctattagatcatgaggatgtgcaacagaaccatcagctaagagtaaagctaagttgcagaacttgtattccatgatccctagccttttagctgtagagagaggcataaggctaacatatgctccaaaatcacaaaggcacctattgaatgtcaatggtcctagagagcatgatagagtgaacgaaccgggatcatcaagcttttcttggatgactttcttcttgtatgtttcttgggtggaggcactagtaatcatctattgattctgatccttcttgaatttttcaattttgagattttttccaaaatggtgagtattcagcaaatgtgtgtgctctacagtccagatgatttgctggatggcgggtgcagcaat

SEQ ID NO: 19944 - DNA, 1545 bp, Arabidopsis thaliana landsberg
taaacgttagatgtttcatacgcggacattaacagaattaataacaacattaattttggaataaaatattaatatttaaataaagttttatatttttctcaaaaaaatccgaaaaatcccaaaaatttataaaaactacaaaaatgaaaaaaataaattaaatttatgtaattatttatacttttggtaataaaagtaatgaatttagagtaataaatggtcaaattttgtaatttattaaaaataatattaaattagttttctcgtaaaatagaaaaacgaaattgaaaaaaattcactcacgtttgatgtaataacttgcactcataataaaaaatgagtggaactgaaattatgaattatttttaccactttttcatgagagaaaaccttataataaaacggatgagtggaagttgatgcatcatcaaatgcactagtagatcaaggtaccttggacactggcagcttcccatttccgtggatattcgtggctatatagatggatcaactgtatgagcccaaaaaccgaattgaaaaacaagtacgaattttattaagataacaataacaataaaattacattaacagtaattaaggatagaaagtaaatcacggaggcaaaatatgatatctttttccttaattcaataaatcggctgtaagtgctttttggacatcacgatttttgaatcccaggatacaaccgatcacgaactaatacccgagcacacaagtattagactcaagcgaactagatctatgatatactctcaaacctattaaactaagaacttacttttaagaagcaagagagagagaggagagaatttagaatttaaagtgttttgtgtttgagagcttgagaaataatgataggcttgatctctttatataataaagggggataggatttgtgagaatattttcaggatatgcatgatatattttgagactatcatgagaatattctgagactatcctatcctcagaatattttgagactatcctgagaatatttccataagattcaactcatcaagcccaataactcacaagcatgacggcccacaagcccgacagcccttgagccgatgacgggacgtcccgacaacaggcagcccgactcagcccggtttggttcggttcggtccggtttggccaaagtttcccactttacacctttatttctcattcaatacaacttcatttttgacgtatgagtataccaccttgtagtactcttaccagctttccaatgcactaacgacccaacaatttcgttcagccgtttggccggaaagtcatcggaaaaatattatgtcaaaaatttccaacactcccacacatgaatagaaataagtctaaacatatgacgaatttactaatcatatggactaatccaactagctagactagatagaccttcgagagtataaacgaaaactaactgtgtctgagttggtggtgtttttcagctttgaacctactcattgttagtacctatcgagtttactcggccttatggtgaacatgatgtcttga

SEQ ID NO: 19945 - DNA, 703 bp, Arabidopsis thaliana landsberg
  unsure (1)..(703): unsure at all n locations
atctaacgctctcttccctccctgcaaaccattaagttgatcatctcctctcaccattgttataaaaaatatagagacatgaagaaagagttaagcggcagagaggagtttatagtcttgcttttatatgattctgattgtcaattcctttcacaaacgaacaaaggtatatataactctctattaatttttttttttttgttagtgataatctctatatatttttatattagttttagatattcactaaattacttgcttctattctattggttagtctcttttgttcggttcaatctttaaattcatgtatttatcctcaatttttttttatagggttttaaagttttcgctagggaagatgaagaacaagcaaatacagttattccaaaacagtggcaaattttaaaacttaatataagaaaaaggaaaacaaatttatagatcatattaagacaaaagaaaaggtcttttcaaacaatatggctagtcaagttctggaatccaaggtttttcacgagagcttttagttggttatgttaaatgctgtcttcattctctgcacaatatgtggtaatgtattgagatnnnnnnnnnnnnnnnnnnnnnnnnnnctctccatctcgttacccgccccaggccttatcttctggagctttatagcacaaaaacttgtcttgacacaccaccagtgatctgttcc

SEQ ID NO: 19946 - DNA, 579 bp, Arabidopsis thaliana landsberg
agcccagtaaagaaactctaatttgtcatatccgaaatgaaaatgtggtttttttttgacttgaattacataacaaagaggttcctacttccagaacttactcagaggcttgttcttctttgtgtgtttttttcgttactttcgccaccgccatctcagtattcttatgtcacgtgtactctcctctcacgcatatcaaatattttcgtttctgtgcacaaagtttaaacgtaataactggaaacataagaaaggtgcaaaatgtccagagaacaagatataagctattgtatttttcttttccattgcttattgtgtattatataattcattaatatcatatgtataattttgtaactatgttatcatttgtattaaagatcttgctctttttaagtttaatttcatatgattttttatttgggagaaaaataaaaaatggaatgacggaaccaacccaaaattaacaaaatttataaaccgcttggttttgttattttataagtctgcaatacaaaaagtccaaaaccacaacttaagcattcaccaaaactttggttaccgagctaaaccataccg

SEQ ID NO: 19947 - DNA, 532 bp, Arabidopsis thaliana landsberg
caagataagactcagccaacatgaaactagccatagtcacatcttttgcatgggtcaatggatagaattaattgagattgggaaaggagcataccattgataagtatttacaagaagaagtcaaaagagagaaaaatcattggagagaaattttgttgagactttttgcattggtgaaaaatcttgctaagcagaatatagcattccgtgaaactaaggagaagattggtgagagaaataatggaaacttcttgagattcattgaaacgtttgaagagtttgattcacttacgcaggagcatatcaaacgagttaaagaagataaaattcactatcactatctaagccccaaaatccagaataagttcttgctatgctaggatctaaattcaaacgtatgatcatcaaaaaaaattcaagagacaaaatatttatcagtaattctcgattgttctttaataaaagtcataaagagcaaatgagttttgttatcagatgtgtctgatgtctccaccacaacgacaccgagttg

SEQ ID NO: 19948 - DNA, 1298 bp, Arabidopsis thaliana landsberg
  unsure (1)..(1298): unsure at all n locations
aaaagaaatgcaaaagacttggcttcgtacagccaaagtcatgctcggcttagcacaccggactgtccggtggtgcaccggacagtgtccgtcggccaggccagcctccggtgaacaggtcgctcttgggagaatttggcgacgtacgactataattcaccggactgtccggtggtgcaccgaactgtccggtgagccaacggcgccagcgcaacggtcggccgcgcaatccgtgggtgatgtgtggcccacgccaatggttggtagggggtactggactgtccggtgtgcaccagatagtgtccggtgcacnaactgccacgaatctgcaacggtcggctgcgcaggaatggaaggagatccgcaccggacatgctacagtggttgtccggtggtgcacgactgtctggtgcgccacccgacagaaggcaagaattgccttccttgttgggttccaacggctcctagctgccttgaggctataaaagggacccctaggcgcatggaggagtatcctaagcattccttgatcattcctaagcaccaagactccattctcgcgcattcgattctttgagatagtgacttgagccccatttgagtagagaactcctcgagttgtgttgtgagctcaagttgtggctttgtgtgcgtgattgtgctcttgttttgagtcttgtgtgtgttgctctccctctcttacttctgtgcttctttgtgatcatcaattgtaagggcgagaggctctaagttgtggagatcctcgcaaacgggagaaggtataagaaaggaaaacaccgtggtattcaagttgatcattggatcacttgaaaggggttgagtgcaaccctcgtccgttgggacgccacaacgtggagtaggcaagcgttggtcttggctgaaccacgggataaccaccgtgccatctctgtgattgatccttgttggttattgtgttttgttgaggattcctctttagccacttggcaattattgtgctaacgattaatcaagttttgtggcttaagtttttaagtttcacaggatcacctattcaccccccctctaggtgctctcaattggtatcagagccgttctcttcacaaagggacaaaccgcccgaagagatggatcctaaggggaagggtatcatgatcaacgacaaagagaaggaatccttcgtcaacgagccaaaggacgacaagcctaccgactccggctcgggccatagacggaaggaagggaagaagaagaagacgaggcgcatcaaggagatcgtctattacgacgaaagcgat

SEQ ID NO: 19949 - DNA, 879 bp, Arabidopsis thaliana landsberg
tgtctctcatcttatgtgctccattccggcaaggcttcaataattactttctgcaatagtttctgctcaaatccatctctcagaagaacttcaaggtctttgacgttccccctcaaatctaacaagacactgcatagtcctcggttgtaacaataatccaaaatggaatccaagtttatcttttccaatagtacggtttcgaccccgctactactgattccggattctgcaaccgattcctttgcggtgaaaactacaacttttggacccgattcttccacagtgtgggaagaagcaagcatatgagactgttgtgcattgctagctactatgatctgaataggttggatcgaatcattaatagcttcttgtgaagaaatgctcgagagttcatccgatagcgaggaagaaagtattatcgcatcatattcctgcaatagcttcgagtagtatccaccactatccgaagccccttgcccaatcttgtctagcaaacaaccattgacagacatagaatacctgcaaagattttcaaaacttaaaaacaatctattgactcggatttgtctccactcaagagaagcaatgaactttacctgagggcgagaaaaggcttccctgttaacattcgatggatgaatccctcattcatcttcttgcataactcttcttcaacactcacagtaacatcgattccagcatttttcaaccgactaatacccgaagaaaaaacaattggttttgtgacaaccttccaaaaaaccatctgttactcttaaccaataaaaaagttcatttaccaggggggtgtttttcgaaaaaaaatattggggccaaaaaaaaaaaaacactgttatttaacgtcctctcctccttttg

SEQ ID NO: 19950 - DNA, 774 bp, Arabidopsis thaliana landsberg
aaaaattgcgactacttgctactgacgtattccctcacaacttgcgaggaaagagcgaggcttctgttgcagctaatttgctaccgagtacgtccctcgcaaattgcgtgtgcttcgcgagacaggtcgtccgccgcaactagcgagaaatttgcgagacccataatttgccgtgaatttgctacggattacttccctcgcaaattgcgtgtgttttgcgaggtaatttgttcctcgcaaaatttgcgagggacttgctacgaatttgattttgcgacgcgcgttttgcgaggaactaaaattcgtcgcaattccctcgttaactgctctttgcgagggactagcgacggtttcttccctcgcaactggcgtattttcttgtagtgtatatttacagttttagttaagacaaaaatttaaagacaaaatgtaactgaaattcagacaaaaatataaatgggttcagacaaaaacataactaaaattcgacaaagtaaatgggttcagacaaaatataaggcccattaaagaattatggcccatattgatttatgactttaaacttaaagtcagtttctcaagtgaagctaaaaaacttagagtcatcactttagagaactttgatgtgggtcaaattaccctaaactactctctcaaataaagaggtcagttgtgccacttagggatccaattcgcaaagctaatttgttcatacaatagacataagtatcgagatcaagctaaacaataagtaggaaaataaaaaaaagcaaa

SEQ ID NO: 19951 - DNA, 535 bp, Arabidopsis thaliana landsberg
  unsure (1)..(535): unsure at all n locations
caaacacngatgggcaatcagttcttgacttttatggtcgtctatgtaatctttgggaggaatttcaaatttataaaccagtcactgtgtgctcttgtggtttgtgtgtttgtggtgcgactagcagaccaacaaaagaaagagaagaggagaagattcaccagttcgttttgggactcgacgactctcggtttggtggtctaagcacgacactgattgcaatggatccgttgccttcacttggcgagatctattctcgggnnnnnnnnnnnnnnnnnnnnnnnnnntcagctcgggatcgtgaacaaaggcaagaggtggttggttttgcaactcacggtaatcaaagtagtctgcgaccagagttacaaagtggaggacgatccgattcctcaatcatcaagtctcgcgccatagtatgttctaactgtggacgtccgggtcacgagaagaaggattgttggcacattgtcggctttcctgactggtggactgaacgtaatggcagtggtcgaggctccaacactcgtggcag

SEQ ID NO: 19952 - DNA, 1353 bp, Arabidopsis thaliana landsberg
  unsure (1)..(1353): unsure at all n locations
ccacaatatgatcaacagggtgatcttttacaatagaatgatggattcttaatacaatttgagaatgactagttgaagcttgagaagggatcgagtgacttcaagtatcttgattaggagcatcctcaacttcgttattttgttgactttgatgaattttctcatttaaagtcatcatcatcatcattatcatctccttttggctttagttcaccagttaccatagtcttcatagcattcttcaattgaatttcaccaacattatcacacccggttttagaaggtaaaccgaatgcgaaccatgtacgtgctaggatcagaaattcacgtacacaacgattacataaatgactcatcatagcataatgcttcgaataacaataaagagtaagtaataatattaaagactagagtcatttatataatatgaatcaaagtacacagaatcaaaacatagccaacataaacaaacccaccacaggcaactgactaggggaggtcgctagcctaatcctcgaactcgtcgaagtcctggaactcctggagatcctcctcgacactttcttcttcttcttctttacctgagcatagaatgcaccaaaggtaacctggtgttttgtgaaagcaagggtgagtacacatcaacgtacacagcaaatgtctcgtttggttgtagtggactagctttatgtggggttaaagtcaagcggttgcttttagttggtcaggtaattattactagtagagagccaggttttaacattaacccaagttgttaacccaaaagtaccctttccaaacggaaaggataccagaaaccataatcataatcataatcacaatagaaaccaacattgtcctcatcatcatttgtaaacaaagcatctctgattcaatatgtctctaatcaatggagctcccttggccgctcataaccgcgagcacggctgatatatcagtttcataacactctgtagaggttgcacactttacccacgagccgtgattccctctctatcccaggcttgcaagacccttgttcactcccgagttgaatggccagggattcactacgaatcctttacaaagattccctaaggctgtagccgcccgttaggtttcctaaatgtaccgcactcctccccaaggggcaatccaccctcagcagagcgagccgcatacaccgagccnnnnnnnnnnnnnnnnnnnnnnnnnnnnnacacctcagttcctctaattaattagctaagggcgtcccataccaccctcagggttgcactattttccctggaggtcttcatcgaaccagtccttacagaaaggcactcgagaaaccgcttgagtccccttaac

SEQ ID NO: 19953 - DNA, 838 bp, Arabidopsis thaliana landsberg
tgtctatgtttgctctctatctctatttatactctgaattcttctcatgtttctctttggctcttcacacgtgcctattcatctcactcacacatgtgctctcttatcaggcattcgacgttttagcatggcttaggatctccaaattttgcagggtctgaggaagagagtgcatattttggtgagtgaacaaaatataaatgttatgctaacctatcttatttatatacttaaaatacttaatttttgttttgatgttaagtgcatccatcacctgaagtggttcttctgccaacaactcctcctcccacaccacaaacaaggccaaaggactgaatcactatgataagggcagtttatcctgtgactttgattatttcattacctgttttgcatactgattactgaatttggaacagtatcttgagaaaaaggagtgagaatcctagtaagactgttcgtaagagaaagaagttgtcttcatcaaaactaggttttcggagacttgataaccagtcaaagaaggatcaacttttcaacgagcccttgtttactggtaaaactttccagtgactctttctttcagttttactttctgttgccctttgtttttaattgcctatctacatttatctgcaggcttctcaaatgttttactcagtgtctttaaaaaggattgtgtagcttcaaaatcatattttgctgctcctaaagaacctgcatctgtacctgtatcatctcctactcgagaagctgaaacagaaattaacccggcctctccagttacacaatctacagttcctgattctactaatcaagagagtacggttcagcgatc

SEQ ID NO: 19954 - DNA, 374 bp, Arabidopsis thaliana landsberg
tccaccaatcttttctcattcccttccaatagacttcatttgtgttttcttttaaaactcttcagcactccgccatggtcaccagtgtggctagaatgaaacatctctagcagctttggaatgattggtgaatcttggggtataacgattctcccttctttgtacaaagtcccttccttaatgtgataaccgtcagcttaaccttctcccttttctaactctcccacaatgacagataagacggggtcatgtaatacctgtctttgtagctcctctctatccaaattcgcaggagctgtaagaaccaaattaagcagctgagtagtagtaggatgtctagataaaacatctttgctgaattgctgagatcgctt

SEQ ID NO: 19955 - DNA, 708 bp, Arabidopsis thaliana landsberg
  unsure (1)..(708): unsure at all n locations
gtaatttttatttttataccaattaattttaatattaaatatatgcaattcgccgaaaactctctctctatatataatacaggtaaccacgtggttacgtatataaatttatattacagtattgtgatagtaggatttttctcaattaatcctaaaacactatcctgtcgttgtagtattttaggttgtcaatccaatccggtgtgatgcaaacagatgagatatgattagaaagctctaagtcaagccaaccagagagttggttagttctaacagtcctagtatgcaataactgaaatgaaatgaaactaaaagcagaaatggcaataataggcaggtgaataacaaagcagaaatgataacatgcaatcaaatggataaacaattcctaaggatggggtaatcgaatagtgtggtctccttaatctattcaggtggttgacaaaacttcaaagaagctatccctagacaacaagttcaacaacaaattaattcacttccgtgatagaaatcctcaagcaaagctagacactgacctaattcccattagtgatctctaactaagcagacattatcgagtcaacatgttaaagccaataccctctctacagccaatcccttggggtagagtctgatatctctggaataataggatccaacgcccattaaacgcctnnttgagcgtggacgtctggactcatattcaca

SEQ ID NO: 19956 - DNA, 2895 bp, Arabidopsis thaliana landsberg
ttcaagtgtcttgtctttgttttgaaaacttacttggtagtttttttcctacttctttctttgtgtaatttgggtctgtcttagtaagatgtggcagcctgtggtactttctgagtttttttgttgtttgctttgttttggagtatagagtccccatgtgttgactacaagccgagaaattaggagccactcttttcggatgttttggaattgtttaacagtgttgaatttaagtgactggaatatagagttttaagcattttgatgggcgtgtgaggactaatgcgtttcacctgaattctttatgtggcatcgatgttgtgtaacaagtttagagtctagaggtccaaagtccaagtgacacgaaagagatagaagaagtgatactaggagacaaaataattaaagcaataggaagctactttgcattctgatccattagattcgagaatttgttcactagtggccggttttctgaatttttatattctgcttcatcaaagttagaaattagacacatgattagtttcttaggcttactatgatattttgtgaaataataaattgggtatggtaatggtttctatgtaaacaataaggtcaccttcatgggattgcaaagccttttgagtatcaggaattaactaggaatgagatacttttgctcttactacttcttgattgtaaacatgcatacatgtgttctgtctttgatgggtttatttttggaaaacatgtatcagtttgatgatataatcttcaataattttcgttcctgtatgtagatcttttcttaaaaatgctttgattctttaactatggatgcgtggagactatatagtgtatagtttccttaggcttctgtttttgttctgaaacataaacttcatcagagctgaaaaagaatagttaaagcttacaagttctagttgcattaggcattagccaacacaaatagtctggtttttctttgtttgatttcagtactctgcagacacgattcttttacctgctctttgcatcaatttcattaacttgttagtgtattatcgattttgcaaatatctaatgattgtattctggttccagctctgcgtatgaacaaggaaagttttgtgacgtatttcaccaaagggcttctggatggaggtgttgtgagtcatgtggaaaggtaactatatgatttactagttaaaattttctatgtctccttggcatcccaaaatcatacatggggtttccagatgtgaagtctctcactaatagcatttcgtgcagcgaattcattgtggatgtattgcgtctgcttctgcttatacgttaatggatgctggaggaattgagtgtttggcttgcgcaagaaaaaagtttgctttggtgagggacgatttcacttttttatttcctgtcaccaaattccatccatattttttctcggaggcatgatgttacctgattcaatgtctctcagtaattatatatcttaagctagcaagcaaacttcaactgtacaaagatcttttcaagtttaagatcgatgttgagctgtagtctgtgtgctataacagtctgtattcatgtgtttcagggacccaatttttcgccatcaccgtcctttcttttccagtctccaatttctgagaaattcaaggacgtgtcgatcaactgcccctcataaactcccccaaatcagataagcaaacagcctcctagaagtttagatccttcagttctgccgtttgagtttcgtaatcgtggaggtaataatgaatttagtcaacctgcttctaaagaaagggtcactgcatgtaccatggagaaaaaaaggggaatgaatgacatgatagggaaattaatgagtgaaaactcgaaacattatagagtatctccttttccaaatgtcaatgtatatcacccactgatctcactaaaggagggtccatgtgggacacagcttgcgtttcctgtgccaattacaacaccaattgagaaaactggtcactctagactagatggaagtaatttatggcacacacgtaattcttctccgctaagtcgcttacacaatgacttgaatggtggagcagactcgccattcgaaagcaaaagtcgtaatgtgatggctcatcttgagacgccaggaaaatatcaggtggttccacgattttggcccaaggtttcatataaaaaccaagttctgcagaatcaatcaaaagagtatccttcttctcttatagatactacattggaatataactttgtatgtttaccagaagcatatgaatcatgctttttttcatacttctgtgtccttttactcttgcttttagtttgtcgttctagcttttgatatgaataagtctatactaggttgtagaatagggtggatgtaaggctatcagataaatggttttagggataggttttactttggatacttctaagttaccagaaccttaacgatgtgtaagatctgaatccgttgtcactcctctctttgagaagatcctgagtgcaactgatactggaaagcggctggtcctgccaaagaaatatgcagaggtaaataactgtttgcttatgcaagtacatattctcgttttcttatttaaatggttaatcatgtgaatagaatttgggatgtggctctctgttgcttatagcaaatacttcactgcttttgtatgttgaatctagtagtcataatatctgaaaactttacagcgtctcaaattatatataagatgccaaatgaacaaggcatctgctatgtaacaggctttcttgccccaactttcccacaccaaaggtgtgcctctcacagtacaggacccaatgggtaaagagtggagatttcagtttcgcttttggcccagcaacaaaggcagaatatat

SEQ ID NO: 19957 - DNA, 1851 bp, Arabidopsis thaliana landsberg
cgggtctcccgcttaacagctgtgggaactttctcttcatttggggcttccattcgtgcctgcacatcctcgttgtacaccttttcaaatctaatttcacgcccttgatcaagacgcttcatccaactatcaactacaacatcgtgcttatcaacatcatcctctactcccatgatttctgccaaaagaggtacttcttcagccttctctctaattatactctcaatgacctatggaaataataaacaatgaaatattagaaagaaataaaatcatatttgctcaaggaataataggaaatactaacctcaattgttccgagtacatggttgatttgctcaagggtaaaccctttcatctcggtcctcttgaaattcaccttgcacatccttggacaaccggcatgtgcaccctctttttcttgtatgaatctttccctaagtgatggaatgacctcaaatgctaaaaactacacaaaacacatgaaatttaattgttagcttcaattacgaaaatgtaacaaggataaaacatgtgacttacctcaaacggcacacagaatccgggaacaggccatggtaactgagtgttcgggacgacaccgttaaaatgatccaatgtgtgtgagatcgattttaacatgtactcaaatgaatatctctcccatggaaatgtcttacaaaacgtaagatcacttgcagccctaacacagaaatcatcaattggactaacccttttttcggtcttaataagtacaacaatgatgcttgttagaaaatagaagaccgccatccccaacctattctaagatatagccggttccatctctattagctctgttctcacgtcttcccgtttaattaccccggttttgaagtacttgttcgcgaagttcttactaccaacattctgataattagctggatatggcttgtagtttaaaccagaggcaaaccatgcgccctaataccatagcggatgggaactccattaacaatgaaccaaacctccttcttctgctcaatagttgtcgttcgaagaagaagcatccacatccccattagcttgtaggtatatccggatggcagatggtagatgtgcttgaaactcggatgctccttaaagtaattcttctcaatatccgttagagcatgttttaagtcatcgaaggtcttcaacacttctgagatataacacctcgtcgattacttcatcttcttggtatacacttctcctcttattacaattcttaagaaagaaaatcaaatagtgctttatcaaataggtcacatgtcccaaatcgaaagaaaagtgattttgaaaacaaaataaacaagataagagtcgaaaaatgacttttgaaccaaacttatactcttaccccaaaaatctatcatcgttggtaaaagattaaattgcaagatcggaaaatcaaattacatattttgacaaaaaacaagttttgcaattttagcggaaaatgcgggtataggagtttagctgaaaacagtttttacgattttagtgaaattgagttttaatgaattaaatcatttactctcttattttagcgattaatttttttttttttaattataactaatattaaagggcttaattgggtacccaattatttgtgtgaactccatttagtatatgagtttaattgggctaacccatttaacctcatttaactctttcccctaaatgagttcagttgtaccctgtaaattgttaatttgctcaagggtaaaccctttcatctcgatccttttgaaattcccttgcacgaccttggacaactggcatctgcacctctttttctctatgaatcttcccgaagtgatggga

SEQ ID NO: 19958 - DNA, 542 bp, Arabidopsis thaliana landsberg
gccacccctcacttccccagcacaagaagtggtgatcaacaaggtgaatctttgcttgatttcaactttccagacgtttgtaagctccctgtagtccctcttttttggtgcaacaataaagaacgttctactgttggattcgagtgcggtgcatgtaaaatgacaacgctctgcgaaagctattttgcatgtctccaatgccaaggaaagttccacaaagaatgtgttgagtctccacctgagatcaaacacccttcccacccctttcattctcttcgactttgcagttttcaaacgaggcttactagcggttgttgtagaaaaattacctttggcatgttttatcagtgtacaacctgcaatttgagtatgcatcccgtctgtgcgatgaggccagtacccttggttgtagaccatcctaaaagccatccccatcctctctcctttttccctacacaagcttctacagtttgccatatttgtgccaagattaagcatcttgatcccacatatatctgtatccaatgtgtcttcgtatccat

SEQ ID NO: 19959 - DNA, 662 bp, Arabidopsis thaliana landsberg
  unsure (1)..(662): unsure at all n locations
aaaaaaaaaaacacgccgcgggagggggggggggggggggcgttttttcccccccctcccccccccccctcaaaaaataaaaaaaaaaaaaagcgccgggggggaaaatattttttttttttttttaagagggcgcgccccccccccaaaaaaaaaaaaaaggggggttcccccccaaagtggggggggaagagaaaaaaagtgggggggacaattaaaaaaaangggtttttttttccccccccccccccccccaaaaagagtgtccccccccccaaagaggaaaagcgggaaaaaatccaagatgcggggggggggcccccccccccccgaataaaatcccaacaagggagtggggcacccccccctcagaaatttggagactcttcccacaggaatcaacctcaaatctctcagttatctttgtttcaaaggatgctcacagttgaggagctttcctgaaatctcaactaacatctcagttctcaatctagaagaaacagggattgaagaggttccttggcagatcgagaacttctttaacctcactaagctaactatgaggagttgcaccaagctaaaatgtttatccctaaacattcctaaaatgaaaactctgtgggacgttgacttttcagattgtgcggcgttgactgtagtta

SEQ ID NO: 19960 - DNA, 295 bp, Arabidopsis thaliana landsberg
accgagttttaaaagatttacaagggattttaaaggggttttataatatttacaaaagattttaaaagggtgtacttacagggaattttaaacggtttttaaatgatctacaagacattttaatcggcctttaaacgatttacacgagctcttacagggattcatacagatttacacaggtctttcaaagatttttacaagggtgtcaaattgttcttaaacgatttaccatcgtcctaaacggattctaacatatttacaccgtattgtccaacggatttcccatatttacatg

SEQ ID NO: 19961 - DNA, 1894 bp, Arabidopsis thaliana landsberg
  unsure (1)..(1894): unsure at all n locations
cgacctttctatcattctgaggttttagtctttagagttcgaatcggtatgaataagcgttattacccccttaattatcattttgggaagatactttaattcatatttacaaattacaatacacctttttgtcttcttctttaccttttgaacactatacaagtactgaaacgtatgtactactttttgtttgggcaaacacaaatgtacnnnnacttaataataatatagaaagaaaatttacaagtgttacaaaacccaatacctcatatgggtcaacagtaggggtggggcataatatccgatctgaaaccgaacccaaaatccttccaaactcaaaaattcgaaccgatcccgatttgaacggataaccgaacaattcacaatttaaatacatagtaataatatattatttatatttatattttgaataatcttagtgtcagaatattaggattttcggatattttagatgtttttgggtatttaatctatttttgagtaaatttgggtagtaaatgttcaaggtttttagatattttgtgtactttgagtattttggatagatttggttatttttgaatttcgggtaatccgaatcataaaccaaaatatctgatccgaatcggtaaaattatctgaacgggttgtatacctttaaatccgaaaaaccaagaatccgaaatactcgatctgaacccaaacgtccatccctacctctagtcgcattaaagatcatttgtgggagaattatatgtgtacaattgtatcataaatatatatttttaattaatgttatgtaatgtgattttctttataataatgtactttaaataaaattgttggactatttgctatttattaaacaaatgggttaaagttcataagtttagaaagtaaagggtatatcaataattaataataaaatagagatagaatatactttagaataaatttttttgaagtgcaaaatgaatgaaaccattagaaaaggcttgcttcatttttaccttcaaatttaaagaaattttgattttgaagaaatatttgaaggtaaccattggagatgcccttatagtggaatgagactacttcagaatgagttcctaagtaaccaaaccggcaagacacgatacatataacatgatcctaatctacatatacatttttgcagtcattttgtgaaataaatcttgtaatttggacttatttacaaaaaatgccactaacatttattatttagttttacaaaatttaaaaaggatattaaccaaacaatatcttgcctaatttgtttctaaaaatctttacacaatctttccatatatcttcaaaataaaatctctgaattttactccacaaaatatgcataaatccaatttataacaaatatttatattaacattttgtatagcaacaaaaatactaatttataagaattaaaatattcacagaaaagtcatatatccatacaagaaaaaaactaaatctatcatcatttaagccgtttctttattcaaataaaaaacacaaaaacttgaaatcatatactttttatgataaatttaaaatatgtattagtagtataaatttaaaatcattcaaggggccgtctaccacgggtgagctcctaaaattattggatttataataataagaatttattttcttggattttatgacactaataatttagctagcgagataatataggcgaatttatatggaatgacgggttttgatcgatattgataaagataggtatatcgcggatgaaatcctaaaattggcaatccgaaggcaattatacgtccttttccacagagggacgttcgatcttgtcacatcgaacatatcgtcccatttaaaatctttagttatcgaaaaatgggcc

SEQ ID NO: 19962 - DNA, 750 bp, Arabidopsis thaliana landsberg
aaaagacatggggctcattaaggatggtggcctggacgtacactttatatccatagaaataacatacatttcaatccagtccatttctcaaggaaacattatagtcatatacctgaacaagtttatagtcacttcttaaaactcctatgaatcatttttaaaccagtaatttttaaataaattgtgttgattcaagtttattttcatcgttttctatcaaaaataaaacctcatatatacatcgctaatttccgtcgactttacaataaatacatctaaagaagtatatttttcgttgattcaaacagtaatttaggatgatttaagttgaaatatttctatcaccaatttacgacaaattaacgtagtattttatatttgtcaaatgccttgtaaaattgacttaagtttacgaaatttttttgtcgtaaaatgttgatggttaatctgttttcctcaagtgaaattaactttcccattttacgtagattatttttttaagtctatatattgattaattatctaaaataactacatctaatgcagtgccatggcacaaaggagtgttggttttctcatgaaacaccgagatactccttttatgtatggttggcggctcacgacaagcttgctataggcgctaggatactaagatggaatagggacgcaacaagggtcttctatttctgcaaaagttgcatcgattttagagatcgtttcttttttctcttgcacttttacttcggttat

SEQ ID NO: 19963 - DNA, 1797 bp, Arabidopsis thaliana landsberg
ccctgtttcaccccttttgacatcagatcctaaaaacgagctttcccattcacagacgtttagtcgtcctcttagctctcctgatgacactaaagcaaatggtaaggcgtctaatgatgctcaacacaaggagtcaccttctttttggaggatggcacagcttacttacccagagtggctttatgctgtattagggagtcttggagctgacatctttggttctttcaatcctcttctagcttatgttattgcattagtagtgacgacatactatacgagcaagggaagccacctgcgtgaagaggttgacaagtggtgtttgatcattgcctgcatgggaatagtgacagttgttgccaatttcttacagcacttctactttggtattatgggggagaaaatgactgagagagtgcggcgaatgatgttctcaggtactgccatatttttcttcattgttaactcacttcactacatgtttactactttcacttaacttattgactttatctgatgtgatagcaatgctgcgtaatgaagttggatggtatgacgaagaagagaacagtccagatacattatccatgcgcctagcaaatgatgccacttttgtccgagctgccttcagcaacaggctttccatatttattcaggatagttttgctgttatcgttgccattcttattgggctgctgctcggttggcgtttggcccttgttgcattagcgactttgccagtacttactctttctgccattgcccaggtttgttttgttccttcaatcttccccaacaaagcctcaagaagaccgtttgaaattattttcttatgtttttttttttgttcccgattccggtttagtagtcacatgcttccctcagtcaaaatgtgcgtctaatttatgcaaaaggtttccagttcaagtagcgatttaagatgtgaatttgactttatacctcattttggtcatcctatcctcatgcacttagcttggaagtattcgcctgttctgcaattctaacaacattataaaatttccagaaactttggcttgctggattctcaaagggcatccaggagatgcatcgaaaggcgtccttagtactcgaggatgctgtcagaaacatatatactgttgtcgcgttctgtgccggcaacaaggtgatggaactctacagactgcaactccaacggatactcaggcagagctttttccatgggatggctattggctttgcgtttggcttctcacagtttcttctcttcgcctgtaatgcgctcctcctgtggtacaccgcgttatcagtagaccgcagatatatgaaattgtctacagctctaaccgagtacatggtcttctcctttgctacatttgctcttgtggagccattcggattagcaccttacattctcaagcgccgtagatctctcgcttcagtttttgaaataatagatcgagttcctacaatcgaacctgatgatacctcggctcttagtccgcctaacgtgtatggaagcattgaactgaaaaacatcgacttctgctacccaacccgcccggaagtgttagtactaagcaacttcagtctcaaagtgaatggcggacaaacagcagctggggatggtgtttctggttctggaaagagcacaataatatcgttgatcgagagatactacgacccagttgctggtcaggtcttattagatgggcgagacttgcagtcatataatttgagatggttaagaagccatatgggtctgattcaacatgaacccataatctctttcacaacgat

SEQ ID NO: 19964 - DNA, 800 bp, Arabidopsis thaliana landsberg
tcagatctgaaggtcgcaacattctcttggacgaaaaaatgaacccaaaaatatcagatttctgattggctcggatgtttcaaggaacccaacatcaagacaacacccgtaaggttgttggaactctgtaagtatctatcccagtgacatgctcaatcaaagtattaattatgtcatgtccacttagttgactgtttgggaatatgaacagaggatacatgtctcctgagtatgcatggacaggaatgttctcagagaagtccgacatatatgcttttggagttctcctgttagaaatcataagtgggaagaagatttcaagcttttgctgtggagaggaaggcaaaacccttcttggacatgtaagacatttgctctatcctcctagtgtttcaaatcgcaaattcttaaactggtgtcaatttttaaactgtatatcaggcatgggaatgttggctcgagaccggtggagtggatctattggatgaagatattagcagctcgtgttctccagttgaagttgaagtcgctcgatgtggatatactaatccactcataatgcaacatgaagccattgacagaccactcatatcacaagtagtgaccatgatgacaagtgcaacagatcttccgagaccaaaacaaccactctttgcattgcagattcaagatcaagagagtgttgtgtcagtctcaaaggctgcgagaaatagtacacaaactgtggaatatgggcgaaatcatatgctttatctatgaattaactgcagactgaaatgtaataaccagcaattagagtg

SEQ ID NO: 19965 - DNA, 1278 bp, Arabidopsis thaliana landsberg
gtaaatgaggcccagtccagagttagtttaaatcgaataaatgaatagaaaatggatttctaacatgaaaataattactagaactttataaattcatagaaaatttatactaactccaaattaatccattccagttcctaaaattttataattttattatctaccacttagagcctctgttttatcatgacaacagtaagaaaattaatctcacacttaatcttatttaaaacacataaaactttgaaaatgcataacttaaattctgtaactctaaaaattttgatgggacccaataggttaccctagattgtttatctcattaccttgtttacccctgaatgacttgggtagtcttgttattgctttacatggttttgggataatatttcattatatgcatgttccagttattttgttattctatttatgttcatgtcaaggtcattaatgttaattggaacatgtagcttaacttgagaaacacgtgccaccacaagggtagtatgggatgcccttggctgactaattaggaaagctagtggaagactaccttacccgaaagagacaagggcagtaggggagttgcatgtagggaggttctcgggttgattttgctgcgatggcggtcagacgtgggattcttgcaagtgctcttcccataaactgtaccagtttttcggaagctagtggaactttgtaaaggcctcatagtgttgccctgcctcgcttcattggtagaggtgtataggagtcgtgatcgcttggcagatgggtacatgacttgtgggtaaagtggcaacctctgcagagtgttagaaactggtatatcagccgtgctcacggttaagagcagccttgggatcctctttgattagaaggactttgattacttttatgatgatgactaacaatgatgattataatcctgatctctggtatttcctcttggagggagtacttctggataataactgggtttattactaaaatctggctctacttatattaataaaacttgaccaactaaaagcaactgctaaaccttaactccacatatagctagtccactttagccaaacgggacatttgctaagtacgttgatgtgtactcacccttgctttacaaaccaccccaccctaggtattctccactgtattaagtgctcaggaggagatgttggcaacatggaggacttcgaggagttccaggactatgacgagttctagtttactttagtggcaaaccccgagtcaggggatcctctagagtcgacc

SEQ ID NO: 19966 - DNA, 690 bp, Arabidopsis thaliana landsberg
acctcttgtggcctagggttgtccttgtatctactgtggggtatgccctttattattgtgcttttaactttggaatttcagatttctcttatctttatatttgttatctattctaatggactgaaaagaaacttttgatgaaaaaaaaagaaagatatcttgactaatactatgacagtgacagtagactaggcttgtttattgttttcatttctgaactagtttttacaattccctatcgataaattctggtttaattaattgatgatacatggagattgctctaatgacaaatttacatgttatttttgccttgatttttttagtttattttacttataatattcagcacgcaataatattttgttttacattaattcaaatctaaaagatttgtagcgcgtggcaaatagtttatgtggatttgatccctaaacattgttgtgattgcatgtacattctagggttaattttctacattctagggttaattttctatctaaaacaaacaaaaaaaaaatccttttgctccattataaaacggttaaaaacaaaatttgcagaaaattgtaaagtgaggactcgaactatcacctgtttactgaatggtactatgagggacttaacctctctcccataataacctatgtgaaagggatgctcctaaaattcttttaaagtgatttactg

SEQ ID NO: 19967 - DNA, 1452 bp, Arabidopsis thaliana landsberg
tcgtctcactcaaatggacgacatggaaattgggaactcatggaacatagaacatctcaggaagttttacccctagctatatctcaaaagctattgggatgacaatgtactctgtaaactgagaaatataccatcaataaaaagacttcaaaggcactcgaattgttcactgtcaacctgcatgcttacttaacttggggtgaccactataccctactaacggagcaatcggcttaagtcggcaatgacttaaggcggtgcgacatgctcacgctacctaactcggggtgaccactataccctactaagcggagcaatcaacttaagtcagcaatgacttaaggcggtgtgacatgctcacgcttacttaacctagggtgaccactataccctacgaacggagcaatcgacttaaggcggtgtgacatgcccacgcttacttaacctagggtgaccactatactctactaacagagcaatcgacttaagacggtgtgacatgctcacgcttacttaacctagggtgaccactataccctacgaacggagcaatcgacttaagtcggcgacgacttaaggcggtgtgacatgctcacgcttacttaacctagggtgaccactataccctactaacggagcaatcgacttaagtcggcaatgacttaaggcggtgtgatgtgctcacgcttacttgactcagggtgaccactataccctactaagggagcaatcgacttaagtcggcgacgacttaaggcggtgcgacatgctcacgcttacttcacccagggtgaccactaaaccctactaacggagcagacagtttaagtcggtaatgacttaaatcagtacgcgacatgctcacgtctacttgatccaacacaagcacgtttgcaattactcatcttagggcgacctctatgccccgcgaaatacgaagacatttcaaaaccctcatactgtatttacttctgcgattgtagatactgttgtattctaacaacgagaagacaataacgacattcagtactaaaaagtgttttctaacagaatttccgagcacactaaccacatattcaaagcattcagtgtttctatttggtaatgttcttctcaggagcaaccgacgaagagggacgactcgaagaatcaggagcgtcattcacgtctgccactatgtcgtcaggaacaaccacgccgggtctcctcatcaggattcgccccgcgcgaatggctttgtccatagctctgtcgcgttgggccctcagagtagcggaagtgtcttcagcagccttgacagccaaccgagcagcttctagctcctagacgactgatctcttggaagcgcgtagatccttgatgatagtatccttgctcgacaccaattcctaaggcgaatcacatcatccagggactcttgcagcttataacgatgattatccaagtcttcca

SEQ ID NO: 19968 - DNA, 618 bp, Arabidopsis thaliana landsberg
ttctcatgaaagaaaggttttagacgttttagttttctttttcattcccaatttattccttatctaatctagacactaggaatctactgaaatttcttcaggtttatggttttaacttctctgagaacatcaaagggcctacaagttctgcatctttcattcacttgcacatgtctttgtatctacgcatttctgtaaaagattcataatcgtatccacatgatcacgccttttccacagaagtttcaatccacaagttgatgagcagcatggttggttagtggttactaactttggaaccctttttaatcacatacaacaaagacaaaagcatgtgttatgtctggtttaggtgctccaattttatctaacttaaaatagtttttccttatatataatgcaacaagcctattggattcttcatcaaccataacttgcattcaaagagttatacaagacaacttacaagcctcttttgctttccaatctaaaaaacacttctccctaaacataatgatgaacacaaagaaactcatgaagatggccaagaaatggcaacagagagcagccttaaggaggaaaagaatctcattccagagatcaaattctactactagt

SEQ ID NO: 19969 - DNA, 540 bp, Arabidopsis thaliana landsberg
  unsure (1)..(540): unsure at all n locations
tcatttgatggaatgcgtgacaacaggataactgagcctagtttctttttcaatgcttgctacacatgtggtgagcgctattttcctggtcaccggtgcaagaatcaaaatcagaagcttaagtgtctaaagttgggagctacaagtgagtcaggacagatcttggaagaggatgaagagtctgagagtgaggaagagcctgagccttaggctgaagcacatacccttatgcacttatccttgagttcaatggcaggactcactaatgagaagtctatgtgaatgaaaggaatgattggagatcatgaggcgataatattaattgatttaggagctactagtaatttcatatctgaagaagtggctcaacagtgttcattaacagtcacaccaacaagtgggttaggggtcgctatgggtaatgggcaagtcattgcaaggcaaggaaagtgtaccggngttccactcaacattcaaggagtagacattgttgaagattgttacctctttgcattgggaactactgatattgtactaggc

SEQ ID NO: 19970 - DNA, 918 bp, Arabidopsis thaliana landsberg
attccagcatccctcgaatagagaaaaagatacaaaactgacaaaataaaagaaatttagtgctatacatagattgtgattgtgaattttgagataacctcataattttcatgattttgtaagaattatagaacgacaatgattttgaaagagagattaaaaatggtgaaaacaaaagaatatggaagagagagatgataaaaagaggatagtttcttacccacacgatctcataaaaaatgagtttaaaaattattgcgtcatcactatttcaggggtaaattactctaattttccctaaaaagatgacaaagtgcctcatccctgaaaagtgcctcaaaaggaaaaagattctctaaaagtgcctaaacgtgtcacattccctatatattattacatgcgttgactaatttcaacataaaaaacattaaaaatattatctactactttgatttttccataacatatttgtaatattgtctcttatttgggatatatgttctccatttgttatctctgttggttctatgtcatctaaatcatgatcaaaatctttgttatttatatttgcctctgtcattacatctgcaaaatctgcatttgagaggtttgaaattctgataaaattatataatcccactgtaaccattaccactcttttttgaacgtgaacattatatcttggaaactcagaaggaatcctcaatttgttttttcaaactccaaaagttctctagataaactgtaaatatgtgtgacattggttaaacatttcatgtttgtttctaagaaaaggaatagaatagaattgagacatatgatatttcacaactcgatttcgtgacgatctattaggagctagaaattattttttgtttgggtagccaaaatcaaccagataatacttctctgatagaa

SEQ ID NO: 19971 - DNA, 522 bp, Arabidopsis thaliana landsberg
gtcttgtggtcctgcagttataggcgtccaaatgctgagctggcattgcttcttcttcactcttcaattgttgtattctgctttactaaaccataactcgaacaaatattccataccattccttgttaaagtaggccatgctttattggcaagttcaaatatttgaccctaacaaatattccaaaacataaattgttagtggtctgatgatttgcttaaatagcatcgaataaagatggtaaaaatcaagactgctcaaatagaagacttaccagttcaatatctagatcatcaccaatttcctcggcaagatctgctagaatcttcgttagatcaccactaggatgacaaatatcgagatcattaccagtttccttggcattttctagaaaagaacatcctattaagtaatataatagagtttggcttttcttagattaactaaggcagagaaatcctaatagacccaaattgcactcatcatcacttctttctcgaaacgccaaccccaaaacatgtaga

SEQ ID NO: 19972 - DNA, 916 bp, Arabidopsis thaliana landsberg
cagctcatatataatttattgccatagttgcatgagcggctactttcaggtttattcaagcttctacatgtaaacactactctccagcatgcttatcccttcaccaagactctttatccggaaagaaacatatctcatctattcaatgaatattccgggtttctttcttgaatattaatccgggtttggaatatttcaagctaagaggtatcactaacgatggtgaactgatttacggacaaaacactatgctcgaaacttttcatgttatatatatatattgatcccatgagaaagacgttaagaagtgtcggatatagaggaattggagataaagattttagactacgcaatggacttggagacaaacctctacgtggactttactttttctccaatcacattgaaactctcatgtctttgtaatggactttgtaattctgtttcttggttttcttcctattttgcagtgacacttttatttatgcaactttgtgattttatttttttatcttttaatgtccttacattttaaggtataatcttggagattcttttataattttatgattctattcattatcaatgttcttttgtgatagaactatacgtaaaacaattacaaaacatgaatcgaagattatgcatatatataaatctttgaattttaggagaacaatgtatatagtactagcttgcaatattgacatgaatattatgttgaaaaccaaaaatgtatcaaaatcatactccatcttttcattattgattgattttctaggaaaaaaattgtttataaaagattaatttattgatataattagaaattctttttgtggtaaacaataacaaaacatgaatgcgtacatgggaacattaagcatttacttcttttgaatgtaggggaacaatctgt

SEQ ID NO: 19973 - DNA, 1023 bp, Arabidopsis thaliana landsberg
gatgctccatgtatcttttagctgccaataatgtagagacgagtaagatttttaacactacataattatataatttatcatctacagttaatggagttttacctgaagattgatctcataagacgcaacaaatgctggtaattaagaaaaagtcctcaagactgatgcctgggaaagtgaaaaataatgacagaatcaacataatttgcagaggatttggtaaaacagaactcacaaacacacaaagtgaagctcgctatctgatacaaccagctttcttaaactatactataggaacctgaaagaatcccttgaaacacagcacttctaagtgaaacggaagagagaaaggtaacttgaacaactaattagaaagaaaggttcaaaaatacatatttgggagaaggagtcaacttaacaaacaagaagatgatgcacaaccatttcagaactccattaagatgatgcacaaccatttcagagctccattgcgatatatctgaaataagcataacggtgtatgacatgtacgcgacactatatgagtccaatatgagagcacaacacaaactataacttactatataggttaagaaccactgaaatcaatacccaagtatgctgaaaaatccaaaacgggatacaatggaaataatgtaaaaagacctatccaatacactttagcatgacataagtaaacggaaacttacaagtgagttcgtggctggctgatatattagcacagggaatttgaaatttacaacacgttggtctaattccttctcttgttctatattttcaagctccttcccagttgaaaatacaaatttgttaactgaattcaagacgcaaatatatgaacgaagtgatctgattaggaacaagggcatcaaatttacaatactttgatacattcatgtttatcttactaaaacatgtcgatttctgctggggaatgtttgtattgactctcaaaccatgaacaaacctgaaagggaattgcaatggattttccatatccga

SEQ ID NO: 19974 - DNA, 630 bp, Arabidopsis thaliana landsberg
acaaaaaatagcgacataaaaatctttttaatttctgaatattctgaatttcgcccagatgtgtttgactagatctccttgccattcatgacatcatcaacccataatattgatgattgtttgtaacagatgatagtactgaaaaatttggtgaaaacccataatttaagatattttgagactggttgaaagatagattatgatattgataattattagaatttgggtaggggaaaggataattagtagaattttgggtagaattattattggaatttgggtaaaaaaatggaaaattaacggaattttgtgaagaattattattaaaatccatttcacaaaaacaaaattaaaaatcaaaacaatatttttttggagaataagaagaaaactatagtaaaaatattgttttttatgtgtccgaatgaaatgaaccaagtttctatttatagagattaaaaagttatacattctcatataaatatatatttttataaattgttatctatgtaataattgattgctaatagattatatgggattaaagaagtctccaaaatctccaatgacgattattatcttacaagtgtcattatcttgaagagaaatttttaaaaaaataaaaaaaaa

SEQ ID NO: 19975 - DNA, 653 bp, Arabidopsis thaliana landsberg
tatcactcagtagttgagaggcatcactccatcttccgtaattacaaaggcaattaatgagggagctgtaggtaacaacatttggtctaattcctttggtttccatttcagtgaataagtcaacagcatcgtccacatgtctatatttgcagagactatcgatgattgtgttgaagatcacaacattagcctctattctcgcagcttccatcttgctgagcagattaaaagccaaatcaatatcacctctcttacataatccattaactaccgcaccataagtaaccagatctggttgacagcctctttgaaccattcgatcaattaaagccactgcttctgaagctttgttgtgaagaaaaagtccatgaattagagtgttgaatgtaactgtattaggtttatatcccatttcgaccatttgatcaaccaaagctacggcatcagaaatcctattcccgtgacagaaaccattgagcagcgagttaagcgtgacaatatcgggctcatagccgagtttcatcatcttgccaagaagagctaaagcaagagagagctgagagcgtcggcaaaaacagttgatgagaatactgtatgtgtaaagatcatgtgaaattcccaaagtttgcatctgctcgccgagagagatgaca

SEQ ID NO: 19976 - DNA, 626 bp, Arabidopsis thaliana landsberg
aaaagaaagcccaagaaaacaacatgcatagatcaattaatgtggcaataaacattcaagtggtgcttccaagtgatgatgtagtgagtattctatataaactacatgcaagcatcattatttatttatatttttcttaaaactgtatccagttcaatcaagggaaagaaatgctaatatatatgcaagatctaaatttcaaatatggttggaaatttgatcatgtattggaatattattaaaaactttgaaggtttaaagatagtgtcatccccgttagaaaaatttcaaatctatgcagtttcaggtatatatctttaaaagtcggaaaattctttttctgatttcgttatacaggattctccaagtttatcttcatttattattaatttagatattgaagatgttgcacaaaagtaaaaaaaaattaattaatacttaagggtttttgtcacttaaatctcttagttaaaggtttttttcattaataatatagctgagagctttaaaatggatttgtcgatacttgagaggtttttttcgtttaaatctcaaaaactttttttttctttttttttttggtaaaacaatctcaaaaacttaataccaaatcttattaataatca

SEQ ID NO: 19977 - DNA, 538 bp, Arabidopsis thaliana landsberg
cccaacgctattgtttttttataacaaaaaagtaaataaaaaagtttttgtattcgaccagtaacactgcttttctgtatggattttattttatgttgcataatatccaatccctgttattcaaataattaaaaaaaaggcactgctcagaaccttctaattaaaatacttcatacactagacgtatgctaaaaacaccgtattgtcttttacatagagatcatataacaaaaaaatctatatataatttttacagcatctatgaatatataaaaataatgatacaataacaaacaaagccataaaattgacatgagtcaactttccaattttcactttgtcaaaatatgattatctaacaattttcagattcttgcttacgtttttctcaagcaatttgtaacactctctaagtccgaactatccaaaactcagagtattccaattgttcagttgtagaataacgttccacaataactcatcttgagaaaaactaaacgtactttaataacaagatagctaactacagtttgtggat

SEQ ID NO: 19978 - DNA, 633 bp, Arabidopsis thaliana landsberg
cttattaatttatcaatttttgtcactttttacagtcccaactcgtgactggaaaaaattattaattttttatagattattagtttatcgagtattaatttatagaagttttactattacaataaacttgaaaacttttttagactagactccttaactcttctcctcttcaactcattcatcagtttttgtaacaaatctctgaaactgtacaaaccagacacggattctttgtatgagaattcatgcacaattaagaagtcctaagccctgtttgaagattctcaaaagtctttaaccaaatacagcaaaaaatgtttagagaaagatcaaaccacaatcaaaagtttgtaaaccgaaatagcaacaaaagtctagagaaagatgaaataacacacatagaaccatgtcttgtggatgtaagaaagattcacttaccctctgtagcaaagtgatgcctttctcaatggtaactttcactctcggcttgatagctttaatcgctctctcctcgtatttggcgagtccctggagaactgaatctatcacttccttaattctcttctttcccatctttggccttcgagcaaaaaaaaggaggctcgggacccaaaaaggccccaaagccaaaat

SEQ ID NO: 19979 - DNA, 1707 bp, Arabidopsis thaliana landsberg
taaacctttcattccacttaactgaaagcaaatcaagatcgtgttgtaaggcagtcgcatcaatagccctccaatatctttcagactcaaaatctgacccaaataaaatgttttcaggcacctgcaatacataggcacttgtattgggacacttccagcctaagtgcctaactaattgaccaaatgaaaataaaggtacttaaagctataaaatagtttttgttttcagagcaagcaggaagtataggcgactcacagtggcgttgaagatccacgaaacttgaggaacataagctacagcgcctctaataacaacgcttgtggtttcagcatgagataactcccccagcattgccgaaataagtgacgtcttaccttctccagttccacctacaatggcaaccaaggtgcccacgggtatctccaaattgatatcggataatgtgggcttggtagtctgggaaatattcgagcaaacactgtgatcagaatgtcatgtatactgagcattgcagaagctaatattgcattccaacataatgtaaacaagaggaaatattttgaggattcacctttgaatcccatgaaaagtatccattcttaattgaaatggctggagttcctggttgaagaggtgggttttgtgctagaattctctcttcacttagaagtagttcctcaatgcgttgtagtgaaacatttgcgttgacaacctaagtagagaagtagcaaaagaggataactaaatatgaagagtaaattcattggcacatgatggatcaaatgcagaccagtaagatgattgttaaaataacctggcttagtagatttggtagcatgttaagaggaaatcttagaactgcgaagagagaaagagatgtgaatgctcttgctggtgtcaaatctcctccaagcagaacgaaaaccccaaatgaaaccacagtcacaactaccgggatgctattcagtataaaactattaaactgcaagaggaataaatcgttaaaagtggaagaaaggtaaatctgagtttaccctagcgtaagtcatatacaaaactaagtgcatacaagaaatgacaggcaattcaaattcaaagataaggagtcatacagctgatagtaactgcgctttacgaaaccatgagagctcttcgtttctaattccttgaatccgggactcgaagctcttctcccatgcatagcatctaacaaagttggaaaattccaagagaaaatagtagtattattggattaagaatgtaccattcataaaagctaaaaagaatcaattaggaatatcaatcatactttacaatatccatggatgccaaaatctcatatatgataccgactcttttgtcagtccgctggagtccttctttagtaagtttccgcatttttcttacaatcagagtctaatttataagaaacagaataggcgggcttgtatgtaagcagatgtgattaccacaacctgtccaatttaaaaatagataaaacaacagagcgaagctaaatacctggaaaggaataaggagaaataaaatcagtgagccgaaaattgaagcaactcctagttgttgatagagaagaaccatagacgcaatgatgcgaaagggagctgaccataaaccatggagctgttctgctattagctgaaaaactccggagactatgttagcagttacaattccatagttgtgca

SEQ ID NO: 19980 - DNA, 518 bp, Arabidopsis thaliana landsberg
tccaattcagagacgcgaagttgaagtgacactggattccaacatgcaagagacgaagctacttctggggcggaacacctctgtagcctcagctggctagccatcccatccaccaaagcctgatgaggagaacagatgagtgtaatgacagcagttcatacaatgtgaaaatcaagctaaaatacatcacagtacctggaggttggaaaagaacgaagggatccccaaatcaggagagatcagttgataatcaggcgtaaggccaccacccgaagcagcttgcaacgaaccagtaggaatcagctcggtgccttcaacagagccaaacactcgatcagcggggacctgccctctaaagcgactccctggtccaaggtttgggctaccaccatacagccagagtgtggaggagatccgcatgaacgtccatggaagtacaggagggagaccctgctcgggcacctcggggactgggtcatagtttgcactgccacttgagccggatcatcccggcagca

SEQ ID NO: 19981 - DNA, 719 bp, Arabidopsis thaliana landsberg
tacacagctggcaaaaacctatcacaagtttccaaaagccaccattaaatttcacttttacggtacaccaacacacagataataaaattgtaattaattaccgaaatcttcaattaatcccatcagttagaataggtaattacgttgggattgatcattcaaaacgactaaaaacccacataactgttcacgcgctttgtgtgaaagcgcgtgtaaatcaaacttctctctttagccaaataaaagagagacttgtccttcttcttcttcatcttcttgctttcttcacttcttcaactctttgagttatttatttccagaagcttcatagtttctggaaaatgctaatccactagcggaataaaagacagatctttaatccactatagaaaccgcgttttctgaaaatgcggttgcgttttccgatgaaatctgccgttttagcgtttgctatctttctggtgtttattccactgttttccgtcggaatacggatgattccgggaagactcaccgccgtatccgccaccgtcggaaatggctttgatctggggtcgttcgtggaagctccggagtacagaaacggcaaggagtgcgtgtctcaatcgttaaacagagagaacttcgtgtcgtcttgcgacgcttcgttagttcatgtagctatgacgcttgactcaaagtacttacgtggctcaatcgcacccgttcattccatgctc

SEQ ID NO: 19982 - DNA, 971 bp, Arabidopsis thaliana landsberg
gattcccaaggctcaagacgctcacgtgtgtggcttatgcacactaatattcctaaaacaaatttcatatccgttaccgtattaaactttatatttttacagcgaggccgagattaactgggccagggaaactaatcgatttgctgaaaaagtgagtatcctcagtacatgttttctctatgctctttgtacaatgttgttgaatacgctgatggcttatgttctcacaggtggaatttgagactttacttgaggatagcccaccaattagatcaaagagaaggcttatacatataacacaactcatgcaacaactatttagcccacctccggctagggtgatatctttggttgctagctcaaattatgatgttgttgcatatactgctggaagagctgcactaggagatgcatgtagctccagtagtaccgacaggagtgagggcttttggccccccaacatttcaaaccggtaaggatattttcagtttatccttgaagtgttgtagattttctagagtttgtggttctctattgacacgaagagacgcactcttgtgtaggttgtctgagagaacgaaaactgaaaaaatcagtgaccaatacatctccaaagcagctgaagatttcattagtagaacacggaaactagagactgactttgcaaggtattaaccgtagctaactgattccattttggcatggccactcatctgtgctggtttgacctcattcatgaacatctctggttcttcttgcaggctagaaaatggaactacaattccagacttgagagtcgaagtccaggatctagagaagtttgcagtgatcaatcgttttgcgaaattccacccaccatctatggacaggaccttgaattcagttaggataaacccacaaagatatgttacggtagctccaaaagcctcagaatattccagacagggtacaatgtctctcgctcggaccaa

SEQ ID NO: 19983 - DNA, 615 bp, Arabidopsis thaliana landsberg
  unsure (1)..(615): unsure at all n locations
tggtaactccgcagacgtctcgttgctaacataatcgacgcctttcacagggacaccctacagaacaaaaattgaatagaatgaggtcaaatatacaaaaaaaaatttgaaaactagtcaacctgactaggataatataaagggatctaatccctggctttctttgcattcattatccaaggggtccacatcgtgtgctgcctgctaggagcactgaaactagaacaagaaacagttaacaactaagttatatcaataagatgacaattattccgctaacgaataactgctaacctcttcattatcaaccaaatgattaggagatgaaactgctagattggctggtgtattctcaggccgcttaaattaaaaaagaaaaaagattatttgaaactaccaatatggagaatctggctaggaaaaatagatannnnnnnnnnnnnnnnnnnnnnnnnnnnnnnnnnnnnnnnnnnnnnnnnnnnnnnnnnnnnnnnnnnnnnnnnnnnnnnnntcattttgaaaggcacttanattatactncanacatgtaacgtaacacaactaacttactacgataaagtataatgatttcgatatatggatacagctaacctc

SEQ ID NO: 19984 - DNA, 1816 bp, Arabidopsis thaliana landsberg
ttgaggaagaattgcttattaagtcgataaaatttggtaagaggattagatttgatgattagaaaaagaaaaactatgaggcgtttgatgagaagaagaagaagaagaagaagcctaagaaacgtgattccggtactgtttgcataatctcaaagaagaagacgggactcgaatctctgtatcacaactatgacaacgacagcgatgatgagtagtgaattggttttctttaccccatttttttttttttgtgtcaaaaattggttttctttaccaagtgtcaaatgttgaacaacataaatgatattaaaaatataaattaaaaaatatataataatatatataaatgatattaaacttcaaagttaatttatggcccagtagtctttaatgaagaggttaaagaataagaaaagcctagaagtttctattaggtttaggagttatctaagtcctaattgtaataggatttgcaaagttgtgcctcctataaatacacctcaagagttgtgagaagagaagagagctttgatgtttagtttttaagagagttttctaatcatcaataaaagagagttattcttttaaagcttgttcttgtgttcttaagaaactttagtcatgtattgtgaacaatgtgattaacctatagagttgttgtaatttgaagcaactcccctcttttacatttcatgaaatcaaacctaaagtgttagtgttcttagtctttatgtgtgctctaattaataacatatatacatgcatgatcacctttcttcataaaccattctagttattgcatatagcaatttttttttgtagagcgccatttgaaaatacaatctctaaatccaattattcagttttattaatgaaagtagaaggctggtatagacatgtgaaaatatctcgttatttataaacatctccaacttgaaaaagaaaaaaggaaaaaaactttttagccactaacttgatcttgaatctaggtgcttctacaccaggagtggtttcctctcggagattatatgtaaaaggactattatactaataaatatatactttttcaatagttttgaaagaaatacttgagatttatttgagaatttatatttgaacagaaataaattctcaaatagtattgataaagcctttcacagtcacagaccccaaacccgaaacacatgaaaaagtcttcgaggtaggaattattatcttaactgccaacaacataattcaattactctttcagtggaaatctctggagagatagcgacagtttatatagaatgtgagctgccatttgtcaacaagtcacgataaatgtttcctttcaagaaatttataattcttctcaacattacttttttataattagtacagaagatgagaatagtactcattattatagtaaaaacatttcatacaataaatgcttgggaaattcgaaaacgaaacctatacaacttatatagttatactatataacattgttattattattgaagaatgcgatataaattttgacccaaataaggaaagggaaagaaaagaatgtccaaagagttagtggggttataataaaaatagcgcaaagcatgagtggtgtgactcgttactaatactatggtcgatggaagccttaaaaaagatagcacagaagccgacattttaattctaaccctaaaatcggattctcacatgtctgaaaagagagacatctcacggagtgtgtcactaacttccataacaatttttacttaaaagcatttttaattctttttggcattcacttgcagattttttttcattagat

SEQ ID NO: 19985 - DNA, 1106 bp, Arabidopsis thaliana landsberg
gagagcttactaaaagtccactcatttatgttttcttcctttggcaacaacttcaatagacttctctgtataacatatcgtttctatcattcccaaggtccaaagacactacatgattctaagatttatttgtcaaaaatttcaccttcttgctgatgatgaggcgattgacaagagctaaccaaaaaacagatccaaacttagctaagtctaagatggatattattagatccggataaaccggaagaaggtccgacaaaacggaaaaggagatccgatctaaatcggaaaacggaatatgttacaaaacaaaaaaacaaagatacagtccgctcaaccggaaatcgaactttttctctctaaaagataaaggtgagataagagagagaaagtttgttttctaaaattctgtagtctatgttcaatttgtgaaatatcccgggatattacaaaattacaaccaaataaaaatattttatcaactccaatcaaagatttggcacctaagactttacaaaatcatacagcacaaattcacggtttttttgtgagataaaatgactaccaatttttgaatatcttatggtcatacagaaaaagatccgaagctgttcagagttgagactataacaaagcatagtaattccaaaactcttttcaaactaagaaaaaacaaaatgaaacattgagaaagctacataaggagatccaacgagaggccaaataactcagagcctccttcctcttcttccaccctttctgcgggtactgtcggttgggattggagtcacatcctctgaggaaaacaagaacaatgtcagagatttattcaatcaaagatgcaattaaacaattacagttgaagattgctgctgttttaccaatgcgaccaattttcatgccagaacgggcaagggctcttagagcagactgagcaccaggtccaggggtcttggtcttgttaccaccagtggcacggagtttcacatgtatggcagcgattccaagttcctgtgttgcataaatatattcaccaaatcgattaaatatagaaacataaaagattatcaagttgtctgcttggtaatgcaatttctttgccttta

SEQ ID NO: 19986 - DNA, 734 bp, Arabidopsis thaliana landsberg
tcagggttgattgtagatttcaaagtgtcaatctgcctttggagatcaattaaagaagaggccatcttggtatttatgtcagccaaatgcttttcgattaccgaaacaccactattctgactttggacgatctgttgaagtagggctgttaagtcaggaacaggtggggttggtattggtggagttgggatagggtgcgaacctgggttgaaactatttgggaatagaacatagggtggaggttgatgctgataaggaggataaaccggagggtgtgggggaatcacagtgttgtttcagtaggggttgttagaaggaggtggcctgtagttgttgtatcctttgttgtagccaccttgattctgtatgtagctcacgtcctcatatgagtaggactgcccttcctgaatctgctgttgctcctcgtcggtgatgtagtgaataggtctctcaacaattggtctaggtagagcaatgaccaacttatcgatcttgtcatacaaagcctgtaatacctttatgtggccatcctcgttatcagtggcacctcgaacggatcgatcaaattcatcacaatagttcccatcagattgagccaagttttccacgagttcccatccagaggcaacatctttgttgagaaagttaccattagaagttgtatccaagagtagccggatcttgggcaaagcacctcggtatagagtactgaggagggaggctctcgtgaacct

SEQ ID NO: 19987 - DNA, 1326 bp, Arabidopsis thaliana landsberg
aaagaattggttaaagaacatgcttaacttaccttcatcttggtatgtatcaagctgtggaagctctaagacttgataaatctcgaggccgttgataagaggaggatgagtagagttaccggtcatcgagaaagtgaaattgaaattcccatctagagaactcacagctgctggattgtatacagttgttatacgaaactttggaggtctaaaataggagaaccaattttcgccaccattgtaagtaatattgaattctctggtctcattagcttcaagattctcgatttcagcgaaatgcatgtatatatatgactgtgaagtgatgtcgtcgagactccaatttattttcagaggctgagtagcatttaaagggacagcagcagttttcgctacagtttgaggcacattgtagaagttacttgtatcaacagagagttccgtgcttaacaaggaagttttgttatctaagaatggaatccaaattcggtcatggacgtcctcatcatacctagagagaaaggctcattttgataatttaacacaaacaacaaaacaactagtatgaaaataaaacctttttggctcatttctgtacctgagaaatggtggagtgggtgaaaagtaaagtcttgcgaccacaataagcgatccactttttgtgacgtatgtattattgttcaaaggacgaagttccaatgaagaaataaacggtgtagtttctcctgttttcacaagacaaatttgaagatggtcttgtgttaagacatggatcatctcggagactgaaccatttctcactccggggatcgaaacagaggtccatttgtttggaccgatgtaaagatcaaagctcgggagttgattcaaaccatcataattcccatagataaaggttcctctgatcagatacttgcgtttcgcggtgagactgaagttgtaacaatttctttgaccctcagggaagcttctcaaggcccaaatctgttgctgaaactgggttctgtacacttcattgatcttcccgggaactccactgtcgatgtaagttgcgtctgatctgtatgttatattcgtcgacttctccacataagtaatttccgtaggcaccaaaccacaatctaagcttatgaatcctgtttatgataaaagaaaacaaacttttaagaggttttgttgatctgaaaaggaaacaaaacatcaagatttcatgaaaacagagtaaataacctgattggtcttgagcttgaaccaatccaagaactgcgaaaacgaagatcaagaaagacaaaaccctcctgttttttggggatgtttgttctgaat

SEQ ID NO: 19988 - DNA, 287 bp, Arabidopsis thaliana landsberg
gcggcaaagacgattcctttctacagtaagttgtttggccttgaggaggatgttaccgttgatagggttattacaatgttgaagaggagggttgtttcagatcatggtatgaggatcagatgtacttgcttagccattgttgatgggtttcttgtccctacatctcaccatcccaagattattaagtcccacgccgaaatggttgaagatgtggatgcctttcttgcttatccttgggggcgttacacgtttgagatgatgattaagtcgataaaagagagggaaat

SEQ ID NO: 19989 - DNA, 426 bp, Arabidopsis thaliana landsberg
acttaaggtcctttgctgagatggcaaaactacaattaactacataactcctaggctagttgcaataggtccggtactagaaaacaactgattcgctactccaaaccttaaggcacccaaactttttgcaagtgcagacagcaggagaaggaaagatgggaatcacagtaaacttaaaggcaccttacaagtaggcgagatgaaatgatgcacttacttgttataaaataacaatccatccctgacataaggtaatgatcctgtataagctgagtgaagtccgctttggtcgcagttgtaaaaaggaactacactgaacctgaacttgtggtagacggaaggcggatcacaagcaccggtctcagcaagtttcgattgcaaccaaaagaacctgaactctgatgtgcattcataaagcgagttacc

SEQ ID NO: 19990 - DNA, 884 bp, Arabidopsis thaliana landsberg
agcttattgtttccatccaccacacaacattatagtatcctgggaaatggtaacttattaagcctctaccttttgtacccgagctagcaagcgggtgagattacttttcaaacttcgtacatattcaagattctcagtgctgacattcttagtgagttcatcaaggacaggccaagcttctgtctcaagagcagccacacttttatcaacaaatgagcagacgacctcaagtgcaatctccaggacctgaaactcaaaaggaagctcactctgcagaccctctgcagcttctggatcaagaggagattgtacattcgcagaagcttgcagtgcattttcattcccattcctctgaggaaactgttgctttagtcgttcaacgaatggaagaacttcaggacggagaggatccaacaacaacacttcttctgcagtaactattgcctttatgacctctaaattcacaacaatagctttctctctggctgcagagcaaaaaaacaagcttataacttcagaaacacaatgtccaagctaatttgcagcaattgtgatcttatgacctaatccaggaattagcaaatcgaagtttttaccgagaatgttagaggagtgagagaagacagggccaagtatcctcaaatccctagcgggaacagaagcacgtttgatgattgtactcttatcgcactccaccacttccatagcaccagtccgatcaaacctcatccacagcctagctcctccggttttcttcttcgccttccccgtcgctcccacagccgatccgccagcatgaatcggtaggggaggcggtggagatgaaggcgtcgatgtctgtgcggagtcatccttcaccgcagaaccttttttccggtgacgga

SEQ ID NO: 19991 - DNA, 506 bp, Arabidopsis thaliana landsberg
cttaagttttagatattaggaaagcaatcaggagctcacctcatccattacaagcatcgcacagtctttcaaaacacagacacccttttttgtaagatccaatattcttccaggagttccaaccagcagatgcacaggttgatgtaatcgcataatatcatctctcagactggtaccgccagtggtgaccataacctggatattcaaatatttggaaagctccttgcaaacttgtgatgtctgaagggccagctctcgcgttggaactagaatcatggctgcatataaaaaatagaacaagtggttcaaggacaaacacaaacagtcaactgatcacttatcaactcaacagggaaaaagaagtataccttgaataacattgttatttgggtcaattttctcgaggactggaatgcagaaggcaccagtctttcctgtaccgtttttagctctagcaagaatatcactaccagttaaagcaattggaatgctctcttctgtgaatt

SEQ ID NO: 19992 - DNA, 1015 bp, Arabidopsis thaliana landsberg
tcgtttcacagcttaagtcgtttcacaccttttaacataaaagaactaatagggctattccatcttctgtctaatatcatagaaaccgaacaagagtaataaataaaagggtcatatacccaaaccaaacatccaacataggggcataaagaaaatacgaaaaaagacttacataaggattagtttcacaagctaaaatgcacaatacaaaaaagactcaaagatgcatactaaaaaagtaaaaagacaaaccgctcaagattcataggctttgaatatcatctttgcagtttcattcacgagtccagacctctgcaaacatagctcaaactgcttagccttaagcttcttccatttctcctccacttctctcttctcagctccatccgcaacctttgcccaaaccgcagttaatgtggattcatccaaaccacaagaactcccattatctgcattgaggaacgatgcaatctctttaccaatggagagacctgtgttcacaacctttgcctctgttctttccggtttcttcgcttcttcttgttgtttcttgggagtagagtgagctactaacttcatctctttcggtgcaggtgttcctccaactttcttccttgatgatttaccagtaaccaaaacaccattgcttccccaaatctttctggacaattcaaaacctttttgctcaagatctttagcaaactcaatatcatcttcagtctttcccttcttaagagaattcttcacagcattattaaacttcttcttcaacctctgaagtttagtaacaatttggtttttggtagcatcgaaatccatcagacacttcacataaatgcatagagcatcaatgtcctcataaggatctccttcggtagatgtgaaatcactaatcccttggagcaaagcgacttaatccgtctcactgaacattttctgaagacatttgctagcattctttgaagaaatctatctaacctcatcattacatattcccttattgacatgctcacag

SEQ ID NO: 19993 - DNA, 574 bp, Arabidopsis thaliana landsberg
  unsure (1)..(574): unsure at all n locations
agtttgtatagtatttttatttttttgcaacntgttgaaatttgaatatactacaaatccacaagaatatataattagagtcgttgtataagagtacacagtccttttttttaattaattccagtttggatgactgaaatctcattcgttaaatatataaagaaactacaagcatttatgagagtctttatctaagagtaggaagtctttttaaaagaattttgttgattgaaaaaataagcaaacacatggccaagttacagctttaaattagttacagcgttgcattaaacatctcacaattacaatctctcccaatttcctgaaaaagcttcaaccaacaatggatttagttaatgttcattccaatgaccaaccaattctcatcaacaaagacatgttcaccaacaatcaactatccgaaccagtcaaagatcaaaacctccatggtttagccgaaatattgactcttcagagatgtggaggtacagaggaaattaccagaccgggtcaagaccaagactataagagtcaggagcagacttgctccgtgttctgtgagatcgaggtatag

SEQ ID NO: 19994 - DNA, 378 bp, Arabidopsis thaliana landsberg
catccacaaaagcattagaaaaataaagacaggaatattctatagatgcttaattcacctgtgcagactgtgatagcaatcgacaccacgggttctcaaacctactgtgtacatatgtccatctttcaaaacttgccttctcttgcaaaatcgctgttgagtatacaatccaaaccagaaaacaaagacgaattgaaaaaacaatctcaaaaggaatttaaattgggtccaagagcataaagatcgaacaagaataagagcaacggaccttgcgcaacaggtggtggttgcgacgtcgtagcagccgccgcagaggcatcaatctgggagtctccagaggttggattagtgccgcctaacacgcatttactagaatcc

SEQ ID NO: 19995 - DNA, 1514 bp, Arabidopsis thaliana landsberg
gctgcacgttatgtgaagagagcaggtggtcttggcgtaatcatcgcaagacacccgggttacgctatccagccatgtctagatgatttcccttgtgttgctgttgactgggagctcgggactgatatacttctctacacacggtccagtgggtatgaaaatatatcttcaccactcagaattagaagaaaatgtatctgagactatgtttcattcttgtggtttgcagatcgcctgtggtgaagatacaaccttctaaaacacttgtaggacaaccagtgggtacaaaagtggcaacgttctcatcaagagggcctaattcgatcgcccctgcgattctcaaagtacagaatccttgcttgttcatttcttttcagacccattaaatgatcttgcctaaggttttatcaatcatatgaatgcagccggatatagcagcaccgggagtgagcatattggcagctacaaccaacaccactttcagcgaccaagggttcattatgttgtctggaacatcaatggcagctcctgcaatttcaggagttgctgcacttctcaaagctctgcaccgtgattggtctcctgctgccattagatcagccattgtcaccacaggttcttatcttctttatacaatgctaaaaaaaaacaaaaacatactgatcttaattgttttatttactctatgtagcttggagaacagatccatttggagagcagatatttgcagaagggtcacctccgaagctagctgatccgtttgactatggtggaggccttgtgaatccagagaaagctgcaaaacctggtcttgtatataacttgggacttgaagactatgttctctacatgtgctctgttggttacaacgagacattaatctctcaacttgtcggaaaaggaacagtttgttcgaatcccaaaccatctgttcttgatttcaacttgccttccatcacaatcccaaacctcaaagatgaagtcactctcaccagaacacttactaacgttggacaacttgagtcggtctataaagttgtgatcgagccaccgataggcattcaagtgactgtgacaccagagacgcttgtgtttaactctacaaccaaaagggtctcttttaaagtaaatgtttcgaccacacacaaaatcaacacaggttacttctttggaagcttgacttggagtgactctctacataatgtcaccattcccctctctgtgagaactcaacttttgcagaactactacgatgaaaactgaacctataaaaatgactaaccattcgtggaagtattaaactttatttaacgttgaaagtatttatttttatgtaaccatctatacttatactgtatacttgtatgtatcaaactgtttgactttatgtaacgttgtttaatagttctgaagttaacgttgtttaataatgctgattctacttatgatacttatctccaaatttcctccaagctttacctttcagatttttatgaatataaaattatattcaa

SEQ ID NO: 19996 - DNA, 556 bp, Arabidopsis thaliana landsberg
ggttcctccctttgaacgtcccgttaaacctcttatctgataaaaacctccggtgtagtatttcgcgaaattcgcgtgacaatactccggagctccgattgttctctggcctaaacccgttttccaaagcttgacgatatcatcgacgacgacgagatccgaatccaagtagatgactcgcttaacgcaaggctcgagcagatccgccaagtaatttctggcgtaattcaacggttgctccagggcttgtctcacggaagaagaaatcaaagactgtacggtctcaggggcaaaatagtaaattctgagattcgtcaatttggggaaagtagaacgaatcagagattctaggttttgagactcggaggagactaggaagtggaagaagacgctttgagggcacattgagtgctggaggatcgaattgacggctgcgattgagccacggaggtaatcgatgtcgagagtgatggctacgtggacgagatgatggttacagacgccggaatcttcgccggaagatctgcattgttcggcgttactgaacattggagat

SEQ ID NO: 19997 - DNA, 750 bp, Arabidopsis thaliana landsberg
tatagtagtagtctaaactaaagttacaacaatgatttttgtactagtaatataaatcttgactgatttaagtgcagtcgattttgctgtcttagttgtgagagacgctttggttttaagttagactcctcaaaaccaagctctcttcttccttcagtaattaagatttatattttttcataaagaatcaatttcttttctgtaggtgaaattataagtttttgtgggttaactatacttttcatttttttcttattcatgaaaaagtataaaatatggttgtttttctctcttccaaatcaagaattcgttcaaacagaaaaaaaacttattctttttcttttttctaaattttagaaaagctaattctctgaaatcgtttattttggtttacaaatgttggaaaaacttaagttggttcagagtatttacagaagcaaattaattgttaaattgttaaaaaggttttaaaataggtgatcaaataaacttttaaaaaccaaaaaattaaccgtaaatcgcaataatttatttttttaaaaacttcattatgctttctttcataacgatccaaacaaaatagaatgggaaaactacaagactggtctataaccacttgtctcttccttttctttttgcatgcatcacaaatccattgcacctgccaatcacatgttaagaaaccgtctatacccggaccaaaagcgaggggatttggtttcggtcaaatagaaccccaaggcccacttt

SEQ ID NO: 19998 - DNA, 1928 bp, Arabidopsis thaliana landsberg
ttgagtatatccctttgcaataagtctggccttatatcgttatatactgccatctgcatgaaacttaatggtaaaaacacatttacatcccacagcagtctttccttgtggtaagtcacagatactccaagtttcagttcttataaaagcgtcaatctccttacccataccatcagtccattccctgtcattcttagcctctgaaaacttttgcggtatttttattttggtgatggtgttaataaaagcactggaaggctcagataaataagaataagagatatagtttgctagtggataaggggaagttatagatagggtattaagagtattagtagtataacaatgaaagtcctgcaaatgggaaggcagttttctctgcctattcgatttagattcagaaggaataaaaataggagaagatgtctcatctcgatgttgaggagcatcagaagatggttgcactagaggcagatgtccatcatgatttggtgcaggaagagaaaaatgaggaaagaagttctttacatcatccgagatagtggatgatgaaaaagggaaaatttcctcatgaaatataacatgtctagaaacaaaaaccgagtatgtctcaatatctaatagcttataccctttaaaacctgatgtataacctagaaaaatacaagctctagctctaggatcaaatttggttctattcttaggggatgtggagctataacataaacaaccaaaggttctaagagattgataatcatgtttttcactagttaatctttcataaggagtttggttttccaagcctggggaaggtaatctattaatcaagaaagctgctgttaaaacacaatccccccaaaattgtaaaagaactcatgattgaaacatgagagccctagttacattcaacaaatgctgatgctttctctctacaatagagttttgttcaggtgtttcaggacaagaatgaaaacttttaattcctttttccagatataaagatgtaaatttcaattcattagcatgatgtgacctaactgaacaaactttagtgttatattgagtttcaacaagattaagaaaaccaggaaaaacatgtaagatatcagatttctgtttaagcatataaatccatgtagcatgactaaaatcatcaacaattgtcaaaaaatatctaaaaccatctacagtaggtacagaaaacggaccccatgtgtcaatatgaatcaattcaaacggtttattacgcatgtgatttgacaatttaaaaggcaaatgtttctgttttgcaagatgacaaacatgacaatgataagatgttttattgattttctgtttagacaaagataaaacttcagaaagagtatcaattttattcaaagatggattttctaatcgtttatgccacatatcaggttcaacatgaacactagcacaaacagacatactttaagaagactcacaaacatgtctaagggacttatcaacattctggacatatagatttgcaacttgactaccgtgcccaatcattaactcctgagtaattgcctgaatagagcaagcatcagaagtaaaactgactttagatttcaaagttttagtcacaacactcacacttaacaaattaaacttgaattctagaatctgtaacacattatgtaaagacaaagcatcagtaagttgaacataactagcaccctcaattttcacagtctgaccattaggtaaccagacataggttctatctaaggcttttgtactctatatagatttccctttcatgagtaacgtgatgactagcccctgaatctattacccaagctctatgagacaactcagtttcatgaggtatagatgaagtcaacatgtcatagtaagagaagtcataatgagaaagaaatgtaccagttatctgtgagatttat

SEQ ID NO: 19999 - DNA, 745 bp, Arabidopsis thaliana landsberg
ttaggagttttgctgtccaaagtttttaattaattaaacaagataatggcataaaatatgaaaaaacaaacatagttaaatttgtagcatattttctgtgggacgtcaatttagagcaacatgctatattttatttagttataaatataaaaaaatttatttaagaaatacgttttatgtaatttaaaattcgtgttaaattttattatatatagtcacactgtaatatggttagataatggttaaattatacttcttctgttctaagatatttgatgttttgagtttataatttgttccactaaaattgatgttctgtaaaggtatcatcattaatttagtttgtgaccaataagagtaggagagaagtaataataatactattaaactaacaaaataataattaaaaaatacaaaagttattttttcttaatagatgtgcaaaactcaaaacatcaaatttcctagaacagaggaaatatgtatcttcatttttggtttttgatcgacatgtatcttcatttctatctatatattattactaaaacaattttttggggtttgaagttctctaacaccatttcggggtttaaggtttatgttcacaatccgcataacgcctttaaatgcttgacgaacatgcatgatgcatctagatcgaatatcttttgttaaacactggctcgacctaatcccattctttaaagaatgtgtgttgctgccgtgttgacagctagtttgatcg

SEQ ID NO: 20000 - DNA, 264 bp, Arabidopsis thaliana landsberg
tccgaataactctttttagagctgtaagattaatttatcaaatgtatgtcacgtgtgaactgttttgttttacaatgctagatttactctataaagtattgggaaaacttaaaactaagaaagcatgttcattgttccttgtttaagtgttaagctctcttctttgcaccaacctttttccttttcttcttcatgtaatgattgaaattccgtaaggacggagcaagtttgatggcgcacgagagatctttttcagaagtgaaa

SEQ ID NO: 20001 - DNA, 207 bp, Arabidopsis thaliana landsberg
  unsure (1)..(207): unsure at all n locations
ctggatgctgaccccaccgaacaatacgtataagttcttgattatttttattacaacaatttaattgatgggttatattttttgaaaaatgctgcaaatgcaccatcacctatcaatgaggttgtttatctctatgagttgataaatttgtgcactcgagagtttgagatcaggcaaaaaatatanttgaccactttttactgagga

SEQ ID NO: 20002 - DNA, 748 bp, Arabidopsis thaliana landsberg
catccgtatgattttagactgatcggagccgaaattaaagcatatcatcgtttcatagattgaatgataatctccttcaatccacggccgtcgtctaccgtccagaacaagatagatttcagttcaccgggtaatgatctagccaccgagatgctttctccggagacaacgaggaactaagaggatggcgaaagaaaacactaagacgctctcgtttgtggtttcaagtttcagaacaagcacgagtcgccgcctgaggatatcacgacttttaggtatattactttactaccctttttcttttttaataaagattatgattttgattttaaaaagaaaaaaaagattttatgtttttcccttctgatttttctgatttaaaactaatcacaaggttttcacaaatatttttttaaataaattgttttaatatttgtttttaatagattttttagtgttaaattttaaatatgtgtaaactattagatacattatcccgtccataatatgaggtctttaagaggtgttttaggtttaatatgttttgcacatataaatttttaacacttattctttttatttaaaattgtttttaaatttgtatttaatgcactatttaatttttgttttgatttttaagtaatattttagataaaatgttttattttttaaaatatacataatacttttgtttttaagtgaaaaaattttaaatatgtgtaaactaattggacacaacatcccgtcc

SEQ ID NO: 20003 - DNA, 1062 bp, Arabidopsis thaliana landsberg
acactccctccctattctacaagaaaaaagcagttataatcatataaaatagattgaaattctacttacattattacgggcacagaaaatgaatatcaagaaaaatctctcttctctctaaatcaaaatcaaataagagaagagaggcgattccacgaacgattgcatatgtatgattcctacgactgtctcttgctcgcacgagagttttcttcgccgggtaccggcggttacttcaaggatgaataacgggtgaacgggcgcggaccccataactgtttctgaacccaacctatttataccttgcgattgtctctgttctcgattggttgataagagtgaatgttcacaatttcctttgttcatattgataatggcggataatctccaaagacagatgcaagaaattgcgctaggagtacaagaggaagctatcaatctccttattgaactatgtgatgaggcgctcaggaaacccaatttagcctcattacaaaaccggtgccctaagaagtagaatctccgagcaatgctgagtgctttgcctcgcctttggagcgtaggtgaagaggtggtaggcagaatcctggagattcacaaaatcgaattccttttccaatctgaagaatccatgttctcaatactccgtcgagggccatggtcgtttaatgattggatgtgcgtcatccaaagatggacgaaattgcactcggatgcagaattcaagagaatcccattctggatccaaatcagaggaatacccctccgcttcctcactgcaaggattattacttcaattggtgaaagaatgggtctgttccttgagacaaattttggtcgcgatggtgtggtcctcacggactatgtcatggtcaaaattttgtggaatattgatgatcactacgctttcagagaattttccgattcggagaaaagtcagtgttctgaagtttcaatacgagaaactcaggaatttttgtacacttgtggaatgctgagtcatgatgctccgaatgtccacttctgggaacgaggtctcatgcggacgatggtgatgatgat

SEQ ID NO: 20004 - DNA, 262 bp, Arabidopsis thaliana landsberg
ctaaatcggactgagtggcacattcaatcatgtcttctctgtagcagagagctcggctgcttgatcttaccgtttttagatgaagagaagtttagcgagactgatcgtaagtatgtccgatctctcttttcctttgggtctttccttacgcgttactaggaactcgatggattattaacttaggcttgaacaagaatctgggtactgcttcaatatgacacattttcaggatgaggcgcacaatggacactggcatgaggta

SEQ ID NO: 20005 - DNA, 797 bp, Arabidopsis thaliana landsberg
  unsure (1)..(797): unsure at all n locations
gagaatgaggtatgtcttctgaacaagtctttgtacggtcttaagcaagcacctagacagtggaatgaaaaatttgatcattacatgactgaaattggtttcaagagaagtaactatgatagttgtgcttacactaagaaattgtctgatgattccactatgtatttgttgttgtatgtggatgatatgcttgtggtggcaaacaacatgcaagccatagacgcattaaagaaagagttgagtaataagttggagatgaaggatctaggcgcagctaaaaagatccttggtattgaaatcatctgtgatcgtgaagctggtgttttgtggctgtgtcaagagagttacttgaacaaagtactcaagacattcaacatgctggaagcaaaaccagcattgactccgctgggagctcacttgaagatgaaatctgcaactgaagagaaactgagcgaagaagaaaagtatatgaagtcagtcccatactcaagcgttgtagggagcatcatgtatgccatgattggcactctgacttagcctatcctataggcgttgttagcagattcatgagccagcctgcaaaagaacattggttaggtgtgaagtgggttctaaggtacatcaagggaacgttgaaatcaaggttgtattacaagaagaattctgacttcagtatatatggttattgcgatgcagactacgcagctgatctagacaagagaagatctacgtggttattttatatgtggcgggattagttntactcttttgttttatattgcttgatccaacaccgc

SEQ ID NO: 20006 - DNA, 354 bp, Arabidopsis thaliana landsberg
cctgaggaagagtctaagaaaaacaatcgctatgaccgcgttgatttctacgactacgagcttcccgaggatttcgaggttttaattctttctcttcactaattctccgccactgtgtgaaattgcaagttttgaactttagtgatcagaagatacgatacagattttggttttagctcaattagggtttttgctatcgggtttcttacgttataacaaattggtgaatccaaaattgagagtttttaattgattgattggtaatgagatagcaactttagatctggtcttggcaattgttctgtccttggtatatgcatgtcttattgataaaagtgtctatgatctcaatat

SEQ ID NO: 20007 - DNA, 1539 bp, Arabidopsis thaliana landsberg
gatccacagttgaggtttttctttaaacgtggactaaacaaagctactttcttttcaaattaacttttaaaaaaaccctgacgtacacattgaatgaccctcacggtaatatacactagccacagaacacagtgccaaatgcgtgagaaattatgaactccagtttgatgtatcacaaccactacttctattaagtatcaaatttttagccttcataacagaaactccgaagcaaacacatcaacaaaagaactaaaatgaactatgcttacctccagatcatgaggagaaaccatactgctgaaaaccaaataccgtacaggagcaaattcgctagcaaaatctctccaacaaccaaacagaatcaaagccaaagctttagactcagtatcacccttatcatacacattcttcactcgtgtaagcaattccaagtggttatgcaccctaccctttgacaaaaaccaacttgctgattcatttacgttcttccctcggcttagcttaaacatagacataaaaacccgaacaacagcaagcttaataagcttatccccaacacaaaacgcgtcaacaagcctcaacaggatagtatttgaaaagagcttatcttcttcaggaaccaaaccaaataaattgtaaacagcaatagcagattctggttctttactccactgttcaagcttcccaccagtctctaagatagcttcaacggctttaactgaaataatatcacccaaaactcaaaactttatactttcatagttccagagaagacaacaagaacatatattcgccaaataagtaaagcaaagcaatttagaggtttgcttaaaatgtgaaacaacaagaggagctgaaattcgaaatttctaagaactatgaagttgaaaagcggaagaaaggacctgagtttttagaacgaagagatttctcgagcttgatgctccattccatggcgcaagctgcagaaaccttctccatggttagcactttttggcttcttagggcttacaaagaagaagaaaccggagattgatgataaatagaagagtctgtcaaacgaaagattacgaattttcacgccatacgcagatgaagaagcctcttctcacgaatttacagaacataaaaattcaatcgaggaccaaacccgacttcaaattattagctgccgattccggttcggttcaggtaagtgatccggtttaagagaatacgcgatcgtgatgggctcaccactattgggccttgtatctttaggtttttatactttcgtaggtccttttggtttgcacaataacacaacttctttttttttagactacaatcgtacaataatgatttcgtttattatattgtgactaaaactgtattttaattttctttgtaacttgtaggcttgttaatatgattgtaagttgtctcgtttaattatataggattacattttaattgattcccccctaagcatgagtaagctaacactcatcaaaagtctgaacaatgcaatcttgatcaattaagcattcgtttttg

SEQ ID NO: 20008 - DNA, 397 bp, Arabidopsis thaliana landsberg
cgggataacgctcttcgggtggacagtagacaggcatttgataaacacaatattctccattgtgttttctctagatacttttgaactgggcaagactgcagactcacggtactgaatgaccaaaaaaaaaaagggttggtgtatcatgcattattgcatagctttattaccttctgccatatagtgagattctttaattgataggcgaagacatacttacatgagccgactatcaactatatttatattgatcaaccagcgagcctctcttaacttggttacgtcgaagagtgtacagagatatattgtactatatggaggaggagatcgtggatactgatccttatgatagactagccatatctgaggaatccatacttgctctctctcaaattgt

SEQ ID NO: 20009 - DNA, 1273 bp, Arabidopsis thaliana landsberg
  unsure (1)..(1273): unsure at all n locations
taatactatagtcacaaatattatatttaaatgaaaattatcataaatacgaaatacatcaattattttatcatatttgcctgctaaattaatttataaacatttacaaattacaaagaaattatnnnnnnnnnnnnnnnnnnnnnnnnnnnnnnnnnnnnnttaaaattttattaaataattacgtaataaacacatatacaagtgtgtattaggtgagataaaactatagatactaaaaaggaaaaaaataagtatagaaaaacacatggtcacacataccaactatactattgtattttcggttaaacaaagtagatgtattgcatatccacatatattaacgccgaagtcaaccaatcggtgtaccaaaattgtatgtttcgggtgttaaccatataacatagtatagttcatatatgtagctatgcaatacatatactttgtgtagctgagaatacaacagtatattttgcatgtatgaccatatattctcttatactttgtatagttagcaatattttttttattaaaattaaaaactgagaatcttatattagagatgtactcatatatatatatatatatatattataacttcttatcatttaactacaaattattatttttaattaaatttcacaatattatctatttaagtaaacctatactaatttttgagtatttttatactaacgaattaatctagaggttaaactaccaaaaacataaaagtttagaagttctacattcgattcgtgttaataatgatttgttttataaaacataaataattatatagtttgctcttcatccgttatagaaaatgaattttctaatcataaaagaatcattatttactaataaaactaaaactacttttctttattaaagcaatgggtagggatgtcaaaatgggtcaagatttttgcgtcaactcaactcaactaaacttatgaaccttaataagttgaaaattttgactcaaaggagttgatgaatcaaatgagttagtgagtcaattggtttgatgaataaaatgaattggtttgtaatggttaatggttttaatggtttacacaattaacccatcaagttttgttaatttgaattaaaccaattaaaatctctaaaccaatgttgatttaagtttaaccaacacatctaaaccaatattgagaaaaccacatgtgttcctcagactctcctcgacacaaaattgagaaaatatagattccttcgtcaccgtcgaggtcagtgtgatcctcgcgtt

SEQ ID NO: 20010 - DNA, 760 bp, Arabidopsis thaliana landsberg
agcttatcatgaacttcttatttttttataaatagatcatttcatactcaactaatgtacatcaaacaatattgttgggccttcttttaatataagcattaagcaaattgagtgtccgagagaatttgaaaatgggttcttctaaattgttggttgcattcactctcatcgtcatgatgaccatttcctatgacctcttcaccggtatgtctctttacataatacagatttttttttttttttacttatttcatactgattttttattttttctttctttctggtatatttaatttctaattacttcttatgatgatcgtaggaataggaatagatgcgagaactgtgcctccgacatgctatgaaagttgtaacgcgacatttcaaaatccagaatgtaacaaaatgtgtgtaggattggcttataaagatggtagctgcatttatcctcctcatgaggttgatggtcttcctcctaaacgaccttactttcctcgttgttgttgtaatcctataattctttcacctccttctacttgatcaatacattccttttcaataaaaccttaatttctattcttatttcttccttcttcagtgaaaaagaaaacaaaaacttaagttccaattgggaaataaaaataaatatatttgaacaaatccgattttttttcgaacaaagacgaaacccaaacccagacattttttaaattccggaaaaaatgttttttgaaaaacctgaacaacacccacattttta

SEQ ID NO: 20011 - DNA, 1326 bp, Arabidopsis thaliana landsberg
gctcgcctcaggtccatctcctaaatatcatcccatattcgagctccgctcctccaagtaactctcaagaactgataaactcacgtccagcgatcttatcttctgcatcagtatcttcaagacagtgtcccccggcattctgcttcctggttgatgttttatctcttccaccggatctggcagctttcttttctcaagtgatacttcatctttcacaaccgcattctctggtgaggcttcttgttccttctccttctgtttactcttgtcttcatcgctttcgaaggactcttttgcttgcattgtcttcttctctttctgctcagtgtctccttcttggagtttcaatatgttcttgtcttggattgatatcaaatcctccagcattcgctccacagcgtccactccatagacttctagtaaactcaaggtgcagtagaattctgaaccgtaatggcttagcaagtttagctttagatatctcacccatttgggatctgcaaatgtaaagttctgctcgtgcttcatgtttaaagccgtaaaattccctagatgaacccacgtatcagtcgggtaaaccaaggtccccaaaatctcaaaatccttcagattggaagagtaatgctgtaaatttgcaatcttgattgtgttcaccaacgtttcatatgaaagttttatgacaacgaacttcccttcagtagaacacgggtttcggagatacttgtctttgtcccggcatatgatgcttgaagctccttttgcttccttgttagaagataagacctttgcaccttttgaagcagctgcataattgtactctttcccaccaggctccatcctatgaataacgccagttacttggcctgacaaagatttgtctctagaattggacgctctgctcttgaactcatcaaggccaagcggaacagcacgagatagctgatcaagctttgaaccagtggtctctgaatcattccctggaactgtgttattatttatctcactttgcttcataggcacgttgtctttgctttctgtaacatttcctacgataacgattgtgttatcgacttctaattgcttcaagatggtttctgagcctttactttctccggctgcagctatatcaacatccgaactcaatccaggattagaatgaacagaggtagactctagtgatgttgcatcaacagactcagctgtctcatctgccctttcatcatccggttcacctttttcaactgaatccactaaagatctacctgcaaatgccccagagtcagccttatacacacttaagatatggcctatccatctttcatgatt

SEQ ID NO: 20012 - DNA, 685 bp, Arabidopsis thaliana landsberg
tagacagaaatggaattcgatgagaagagaataaggtaagagactgaagaaagttagagtaggagaataatatgattttcataagataaggaaaccctaaagtttgggatccatttaaatacaactgagtttaataaacgacatcgcttaatacaaataaacgacattgtaaaattctacttgaaacagaggcttctcgacacttcttctttatttttcttttttatttttttttttgtcaaagtctcgacacttcttcttttcttcacttctagccacttttcacggatttttatcacttatgccacttttttgaaaaaattgatctggactgccatctgttaatctgaatgccaccgaaaatgtgatataccagttgtacccttaatgagttgattaaaaaaatgaaaaagatattcaaaagctaaataaagaaaagcgaatccgaactctctccttcatcgacgtcttcttcttctttcgtcgacgttcttcttcttcgtccgccaccatcgattccggccgccgccgacttgaaaatccatcgtaaaaggcaacgaattaggtcagtttcttctcatatttcctttaacattggtgcattgtgattttagattgggattttgaattatatataattctcagattcaatatgatagtttgatgattggtttgcaaagtaaag

SEQ ID NO: 20013 - DNA, 2037 bp, Arabidopsis thaliana landsberg
agtcctagtcaaaaattgttgactgcctgtgcaagtgtctcatctgcaaagtgattcacggatgcttgtacacaattttgacacaacggaagcatgaattgtggttgtatattgaggtttccactccgcttctctctccggaattccaaatcacaactggcctgaattgtgataagtttccaaggaattttgaaaaggaagatcaccaagaccctgcatatctgtctgtttggaattgtctatttggggagaagtgtgtaatgacagtcatggatgttattgacatgctaaggggagatgttaatgctgagtctcgaaagtgattctcgacatggaagatgctgagtctcgcattaatagtcttgattgatggggttgttgtttgcagcaacacaaaacaacatcgggtaagtggcccatttgtcgagatgcttcatgatttggaattctttatgagctacccatggggagagtagcttttgaatcaacaatgggaaggtttggcccttccgctggggaaacatatcctattgcagaactcaagagccagctatctaaaaaagaagcagttgctaatacgggtttcgtcttgcacttcaactccaagtcctcaactccgttcatgctctttgtagtaggattaaagagcctacatatttcagaaattttatctaaaggcctgcagttgatcttggtcgcaccatctttctccgggagtaagatgttattgacgttgaaaacgctgctaatgtaagtaacattaaatactgtttatatatactggtatagttaagttttagagtgatggatacattcatttcatgcatagtttacctagtaattttgttttatgaattttacagttatcagtggaatacacactataccagtcagaagcagtgaacggagatctctcttggccagatgaagatgacgaccacattcgtagagatggtggacaaaatgtgaatttagaagcctctgatggtgtgtgggatctttatgggtctgcaaagagtattttagaggtattacttaaaaagtattgacgaccctcttatgtcttgttgtattaatttcccattgctgttcatcttatgtgtttgttggacaatatagaaaattactacagaaatttcttcctctcctattccaaccgccaatgcaaaagatccagatagcgaagccgttgaggatgatatatttgcttaggtaatactttgacaatattcgttgtatccagttctttgatgtcctaatcaatcatacatttctgaagctcttacactggttttaaaaacacaaataatccatacaaaggagactgcctctcgtattccaaacattcccaaccccactgttatagagactcaagaagaaatgtttgaggaagaaataattgctggttcgcctacacttactccttgttcactagtaacaccaatagctcaggtttagaattatgaagaccggaatgttcctcatccaattcctatattcttatatattcattgagtaacctgttttcggtttggaatactattattatgacatgttattcccgacacgcacaaggattttgcccttgatgaggttaaataccgcaatttatcctcgattgttgcatcatcacctgcttattttgttcaagagaggaccaatatccgtcagccgcttccggataagcgtgttcctaggtgctctcgcttcctcgacacagcggagtatagcgtagatcccatgattagtgctctgtttaagagcagaaccaagtaacctgcttacacacctctcccctagttggatgaagaagagttccagacatttaaagagttgcttgaagatgatcgagccaggtttgttccttgtataaacaataaacttgtttgtcaataagatttttggtttgaaaacctgtctttctttaatacagagaattcacaatttgcactggtcacaaagtgggtaataaccacttcttgcacattgcacgaaaggagacgtgggtctcaacagaggtaaattgagtaaaatggg

SEQ ID NO: 20014 - DNA, 577 bp, Arabidopsis thaliana landsberg
gatgactggtctgaactcaaggcaccgaaggttgatctgaaacaacttcctaaaggtctaaggtacgcattccttggtccaaactctacttaccctatgatcattagtgctgagttaaatgatgatgaagtgaacctgctattatctgagcttagaaagtataggagagcaattggttattcattatccaacattaaaggaatttcacctagtttatgcaaccataggatccaccttgaaaacgaatcctattctagcattgaaccatagaggaggttaaattccaatttgaaagaagtagtgaaaaaagaaattttgaaactacttgatgctggtgtcatctaccctatctctgatagtacttgggtttctccagtgcattgcatcccttgcatccctaaaaagggtggaatgactgttgtcaaaaatgaaaaggatgaactgatccctactagaactataactggtcatagaatgtgcattgattataggaagttaaatgctgcatgtaggaaagatcattttcctttaccattcatcgaccaaatgcttgacgtttagctaatcatccatacta

SEQ ID NO: 20015 - DNA, 632 bp, Arabidopsis thaliana landsberg
  unsure (1)..(632): unsure at all n locations
agtgcacgagcaagattcagaagcagagatgggttgctgggattcagtctaatctccgcttagtaagttgcctcgaggctgccaaatgctctctggaatctctgagtctcagcaatcgcatgcgatagagaatcctgtaaatatttactattcacagttttttctgctgtaaatactgcaaatgaatcaacaatcttatagaaattcgtatcaccttttcttgagatgttcaaacaaagaatcagatgagaatcgtagttattgctttcttaactagaatacaacagtcttgtttgtaccataaggtaatacccttagttcgcagtaagattttatagctctcgtgaggcattttttctctaggtcctcggatttctggacaaagctccttaagttgtctcggtgggaaacactctcaacctgtgaaaagttccattcaaacagataaattgagaaagctgcagaagaaaattgacaatccccagaaggtactacattacatatcaactacttggaagatgaannnnnnnnnnnnnnnnnnnnnnnnnnnnnnnnnnnnnnnnnnnnacaaagtgactagtggctccaattagtttcacaccagcgtcgaatgcctgtaaacagaatctaga

SEQ ID NO: 20016 - DNA, 566 bp, Arabidopsis thaliana landsberg
cctgccgatctatatttaagcatacgagtatacgccgtcgtcaaaaaggttcttcactggaactcaaacatggttgttcgataattggcttgtgaagaaagcccgataatctaattttggtcctaaacactcataaaaaaaaaaaaataagacacctctctctctagtgatgttacaatgggcctcaagcccgcgagtctaaacgggctatttgttatgttttttttacccgaatccatttaaaaaataaataatttaatagggttcacccgtttaagcccgattaccaacgggtctaaacaaataataatcgagtggcccatttttttttctctttggcaaaatgacgacgttacagtttagtgtattgttctaaatgttcttcaacttccttccaaaaccgatggagcctaagactagtgcggaagcatcaaaatatggacatcctgtcccagcccccaggagtgcaacatttcttagagtaaatgtggatgatggcgagtatggaaactatgatcccttgccttctcttttgccactttatgaaagtgcttcgggatgcaagg

SEQ ID NO: 20017 - DNA, 532 bp, Arabidopsis thaliana landsberg
gaaaaaatttaaacaaaaatacatgaccaataaggctatgaaggtatcaagtcatcagtagttcatgcctctttgaaagaaaattagacaatatgcataaccctgatgaacatcgctatatgtgcaccgctatctgtacatcgctatctgtacaccgctatctgtactgaacaatctgtacattgagatctgtacgccgctatctgtacaccactataagtacggataaaacgcaatctgtacgcttagtaagtgtgcggtgaaatctatacgctgtaataactgtacggttatatctgtacagtgaaaaaggtatacgtgggatctctgtacgttgtaaaaactgtactacgttatctgtatacctaaatgacataaacgattggtgaagatgtgaaacaactgattgaacagaaatacctcgccagatacaacttgaataatacccaaaaagtaatatccattcatcagtaataaatgcaactccaaaagatgtttaggaattagacagtgttgttaggcattcaggtaa

SEQ ID NO: 20018 - DNA, 1555 bp, Arabidopsis thaliana landsberg
  unsure (1)..(1555): unsure at all n locations
tctctcatttgattatatttgctttaattttcaacattgttagtttctactgggtgagatttgtcctctgttcttgatcaacatctaagacaagacccattgtttcaacgtttcaaaactaagctaacaagaaattgcatgattgaagaactgatgctaatataaaacccgaaatggtagaactgtaggaacagaggacatggccggcctttaacaagtgcaagtagttgaagatcatttaacaatctaacaaacattgtgaactcctctagtttcttctaccgacgcttcaaggtagtgagactgctggtttcttctttaaacggctgagtcgacacatccgataaagccgggagcctagaaacacttcctttccctttcctcgcatttggaccaatcacttcaatcatgtatttccacccatcaatcggtcttctcctactgaatatgtgttgctttataaaactagctatctgcgcatcaaatttcaagaacatgctgatgaaatctagaaagtctcaagtttggtaggttctattgcaagagaacagaacatttgtatgaagatttgtgtggtggtacctgaaatttgcagaaggcagtgcgacgatcaaattcttggagaagaatgtcttcttctctttgtgacatctcccagaggtttccatcttgttcctttgctgttgattcccaaccatcaggcttattcttcaattcagatccactcgaaacctctaatttgtcaaaatcatggtctaccgaatcgaaaatcctgaacgtttttaagcattgaaagatcaaaatcaccaacaagcagacagatcttcaaccacaatcatatataaacataactaaagcatgcaaagataactgaaacaccaagatatccccatagcaatctctgtaacgtttattgtgaaactcaatgcactaaatggacatgtttgagagattgtacacaagcaaatcacagatcttcaaataagcttgcaagttgtaagtgaaaactaacatcaaaatcaccagaattccccataacaatctctcgtgtatttttgcaattgggggatcaattgtttcccaataaaagatggccgaagaagattcaatagctagtggctcacttgaacgttaaaatttgcccatttttgttttacttaaccggctatcatgagataataaatacacgaaatatataatggtagctatttagctattgctaggtttctctacgtcttttcttaattgttttttccaaggctaatatataagcttttacagatttttgttttcttatcaataaaagatactatatattgtcagattaattatgtataaacctatgttaatcgtctaatagtgaaaataaacagaacgtaacatcctatcttttgatcattagagatgagcatgttcgacttattttttactattatataaatcactcggtttccaaattgatttgacgataaaatntctcaatcgttcatccaaacccccaaaacttctaaaatcacgtaatttacaaaaccgtaaaagaataatttttaaaaaa

SEQ ID NO: 20019 - DNA, 1088 bp, Arabidopsis thaliana landsberg
cgatccggtctcgttccgataaatccaaattcggacgatcgttggagcttagaattggcccgtttgggttttcgggtgggtaattatccggacgacgatcgaaataatcaaaagcgttacgttctagagattcaaatgaattaaccaaaatacccttggcttcagggaacctttccgccatttcgacccaagcttcgtaagactcagtcgtgaacaaacccggtggcaaaactttaaccggaacggagttaacaaagccaggaactgatattgtttcctcgtcagaactccggttaagttccggtttggtttcgcggtttctctccagaagatacttcatcatacccaagaaacttgcgctacacgtcaagaagatgtaagaagggagattaaactcgtttccgacatcgatcaaagggacacagaagaaatcaagaactaatccggcgacatgaactgaatccgattcatcacgagaagacaagagagtggagagagcgtttctaaccaaaggaaccattttcttgacgtattcaagaatgtaagattcggaagctttcacgaatagctccattggtggagggttttggacatcgggtaaggtaatgagacggatacgagactctgtttcgattagggatttgaggaaggcgatagtgtcagattgaggaagaaaaggtaagctccaatggaggatggtgatggtgtggatccgactaggttggtgactgatgagacgtttcgcgagttcgattgtggcgagaatgtgtccggggattggaaatgggatgaagatgagctctgcttcttgctgcttcgccattcttccggcgatttttttctagatcaacttaatagtcaaaagaagacgaagctaaaggttttgtcttatctcaacaaaataaaaaaataagcataagaaatggtcgagggtatacgtgccaacgtggtggagagacattgagcaagtaattatatttaaataccactagcttgtgatacctaagccagtggtgattatagtaccaatataattgtaatattatagaaggtaaggaattaaacacaacacagtcatctatggtgtt

SEQ ID NO: 20020 - DNA, 398 bp, Arabidopsis thaliana landsberg
taaaggaatccattgcatgatttcacagtattgttagctataggcttcggattaaaccctcaaggcaaatctgcgcccatggcttctcaaacaaactcttctgccgctgattccaacactttcgcttcttcttatagcttcgcctctgccgctggtaaaaagtcggattctttgccggtgtttgacgatcttggtcgagatggtgatgatcttctcttcagagatgtgtttagcggaccaccaccaaagtatggatcttctggtgattctcgttctccatctgctcctgcttttgactatgatgttatgttcaaggaacccaaatccaaatcagcgtcgtctatgccggtttatgataagcctgtgtatgatgatgaggatgtgtttgagtctattcc

SEQ ID NO: 20021 - DNA, 559 bp, Arabidopsis thaliana landsberg
gtgatataaatatgttgttttcatatgtttgaaatagagcacttttatcgtgtcacgatagagtagttctaacgatggcacaagataatgattatgaatttcctttgcctcctagacacaagtattatgtagttgattttgggtatccaaataaacaaggctttttagcaccttatagattttcgcggaacagagttgttaagtatcacatctcacagttctaaatgttccttctcttaggaataaacaagagttgtttaatcgatgtcatgcatgaaaaatcaattgaaaggacaattggagtttgaaagaaaaaatggaggattctttgtgaatttcccagatatgatattgatgttcaaaaaagagtggttacaattacaatgggactacataattttatgaggatttcgaattattttgacgagaattttgatgaaggaatgagaaatacaaatatcaacaacgtagattctgtgaatgatctagatgacatggagagaggtggtatacctgatggaaatcatatggcaaatatgaaaaaaaatattgttgatat

SEQ ID NO: 20022 - DNA, 927 bp, Arabidopsis thaliana landsberg
atgtcccttcaataatagaatcgtcaatacgtcgttaatggacaactatggtcagacagattgagttagtcgtaaaataacgactatgttactactaattttcgtgttgtcgcattgtagtcgtcaaaccgttgccaaatggtcgcttgataatacgactatgttgattgtcgctcttcgtaatagtcttttacctgttttcttgtagtgataggttaatgggtcggaggaagaagatgatagcagaatgataggcggctagggtttcaaggaaagcatgatatgtatacaaattacttttttgcccttctcatttgtatgccaaccacgttgtcagagtttggtgaatgtgcatggatgatcgataattcgaaatgattgaaatgaccacacacaaaatggattcaaatatcaatcactccaagtctccaaatattacatgatatcattggcacacactacaagaaaactgggttttggcgactacaccaaaagtcgttaaatagtcgttaagtggtcatttacgactaaatagcgactaaatcatgtagtcgtaaatcgagagtcgctaaaatgtatagtcgtaaaaatagtcgccaattaggactactttacgactaatatttgtagtcgtaagtatagtcgtaacgtagtcgtcaaatttagtgactaattaatgactaatttacgattaaatttcacaaatataaatagatgtagtgtagtggtagaatagtcgttaatttaagtgactaactgaagactatgttgcggctacaatcgtaattatgtattcatacaatatttatgtatttatgcagtatttatattaataataatatttatatttgttattaattgttttaaatatatttttggaaagaactgaaactacatttagttattatgaaacgatatttaaaaaaa

SEQ ID NO: 20023 - DNA, 1321 bp, Arabidopsis thaliana landsberg
ccccttttttacttttattttattttaaaaggttttataaatgttattttaatattatgttgtgaaatctaaccggattgtggatccggccatttaaccgtggtcattagcgattccacaaatccaaaatattttctcatcttcatgtatatttataatttaatttttattttattttcttaaaaggttttcaactctttattttttattttttaaaaagtatttacaaacactaaattaatatgacgttgtgaaatctcaccggattttggatcccgccatttaaccgtggccattagcgatttcacaagtccaacatgtttttcacatctttatgtatatttagcatttatttttattttattttttcttaaaagtttttcaactcttttcttaatttttttttagaaggttttataaatactaaatgaatatgacgttgtgaaatctaatcggatttttgatcctgccatttaaccgtggtcattaacgatctcacaaagagttgtcctaggttcaatactcatgatttaaatttttaacactcgtttttatttattaaaaaatgtttttaaaattctatttttatattactattaaaaattataaagtttcgtttttgataaatgttaattttttaaattttgtgtaacttaattggacataacatccaaaccccaaaaaggtgtcttaggttcaatacggtttacacatttttttaattttaacacttgtttttattgtttttaaaattatatttttatatttctattaggttttgtttttgataagtgttaaatttttaaatttcatgaatttattcgtaacttcatatttttatttacataattattttttaaatagtacattatcactaatttaattatttgttagtttatttaagaaaaccaataaataatttaaaaaacggtggtggtatccgttttgcccggctctagccactgtgtatgagaactaactactaactaacaccaatcaatgtattcaaaacggttattgaccaccaaatgatttgaataagataggtgtttctcctataagtgatgagagaccatttgaattgtcctagtaatagcatcaagcgatccaaatgctatgttctatgctacttaaattttgtagaactataaagtctaggagtgggagaagaaaaacttagatattctggaacatgtttgctttatatatatatgtttcttagttcacaaagagaaaaggaaatagtactcttattaataccatagtcaccgagcttaatttgactctatcaataccataatcaccaaaagcttgatatgca

SEQ ID NO: 20024 - DNA, 695 bp, Arabidopsis thaliana landsberg
  unsure (1)..(695): unsure at all n locations
agatatgaaaacagaaagtaatatattttttaagaaaattaattttgtttgaacactgagttaatttatgttaacaaccacaaaaaaagattgcatataattcagttagatcaaaaattaaaatatcataaatgagtcccatctaaaatgtaaattattttgagtcaattaaaaagttaaatattaagttgagttaatttaagaagtttatttttcaatttgtaattctttggttatgttaaatagagatttttttgagttaattatggaatttagcaattctttgcatgatcgaatatattatattatataatagtactaatgaaaaaattgcttgcacaacacatcattcgttactttaaaagttgcttgcagaattacattttcaaatatttagagaggtgtcaaaccttatttaagtcatcttatcatatattcttaacatgttataaggataataactctttctatcaaatattcagaggtgtcaaacattatttaacatgccgccttctagaaatattttaaatatatttgttttaaaaaataaattagagtacttataattgtttttttatctattaattatttatgatattctttaaatatattaaattaactactctaaatattctacattagaatattaaaaaaattattgtagtaaataaaattatgattntcaaaaaaagttt

SEQ ID NO: 20025 - DNA, 674 bp, Arabidopsis thaliana landsberg
gtagctgcggatctagcagatggaatcttgaaagaagctttgactttaaccaattgctcagaagcaacaagactcttgagattcacaagcaaaagcttcctaaaagtaggaggcagtgatttatgtttctcctctatgaatatctgaatcgcgtatggactagatccagttctctgcttcaacgttacaatcgcatctttaatcatctgcatcgaatgcaatcaaaattcaaattccaaatctatgaatctgataaaaactcaaacaaaaaagtttagatcgaatattgacctctacataggtagggtgagaggaagttgacttcttcttcgtgggagcagcaactttcacaggcttcttcggtgctttagccgacgccggcttattagatttaccacctttggccgccggttacttcttcggagatttcaccgatgtatcagccgctactgagtcaacagtcggtggaacgttttcttcctctatagacatcttgttctctctcagacactgatctctctgtattgatcggaagaaaatgtaatgcgtcggacaattttgtgatgaggacaacgaaaagaactatgggaatgatgtttatatagtcagatgtgttcatgagacagagcttgtaatctcttctctgattggctaaaatgatgaacactcggatc

SEQ ID NO: 20026 - DNA, 2151 bp, Arabidopsis thaliana landsberg
acaaaacttaaaaccatgctgcagaggaaaaaacatcatataaagaagctgaacttcaaatgtaataatggcctttcattcctacccaattctgaacttgcaagccgaaggagagagttccccatcagataaaaattgaactgtgtctaccagctcccggttccataccaagcatccaattccactaatataagcaaaagctgtgcaggaacagttgcctaggcaatcttggtagcactgttctgcattgaggaagcctgcaagttggtacagatctggagtcttaacacgggtcatatggtagaagctgtctgtttctttgccttgtgtttttgtagaagaattcgtatggcaagataattgtgtacgtctcacacacccacttgtccaattcccttttttccactcgtcatctgactttggtacaaaccctttcaagcatatgcacttttggatttctggatctcacacacaaaccgaaaggaccacaagcacgatatagatcacatgagcttgttggagcctcaaagtgaagcttccaactttttccatcattccagaggatcttcattttcccctctgatgttagcgttacatacgacagtttatagtttcttaacatggaataagaaaaggatgctgtgccctttgctacatcttggagaacagtgaatggacttacatatgatgcatcaattccaggtataccagagaatcttgtttttgcccatggaccacttctccagtagggcgatgagcctcttcttataaggccttgtggggggacttgtggcgtaaactccagtgtgaattccccaggcgatggatcgctgttacttctccatgaggtcaacacacgattctttccacggggaatatcatacatcacagaagactgaggcagcatagtattaccaagattctcgaagcttttccataaagtttttccggaaacatcatcaattacaacaagatttccggtgtctaaaagctcagcatgacacttgttggatgtgaaagcctctcctgttgaccaaataacatcttgcgtaccatcaagcaagatcagactcccattgctgctaatagttagattcgccgcagtttttgtgactggcttatctctgttagccacccagacaaccacttgaggagcgatgttcttgaaccagatcccaacatactgtttccgagaattattaggactgaagaagcctagctcataaactccatcaggggaactcagagtttgtcctattgacaaaggacttgatgtgtttatatctgcatagccaaaagttggaaatataatcagcaagagcaagcaagcaaatataaccatacccatctttctcatgtgtacagtgtactcctgtttgtctgcacaatttctttgtggaagtttgtacatatgagcaaaactttacgtagaggaacagagatcaatgagacaaaagaaatcaagactttcatgttatcctctatatcttaagcattgcattagttgattatgttttcttttgtcaaagagaataattataactataatctaaacataagcattaaaataatctgtatagacagccttgacaagaagttccatgttactctttcttaaagatagaatctagtaaatgagttttgttttttccacattttggtctctcataagtcaaacctacacagcaattaagtttgcagctttttcaatttccaaaaggcaaaacagatttagaaatttctttcaaacgttatataactttattgatagataaagtgcaaactagaaagtgaagctaacctgaaacactgtacgtatttaaacataaccccaactccttgtggccagcgttggaaactttgtatatcgctcaggcatttcatcaaacacgtttagtgcgtattcatagcattgctaatgttgccgggacctatatcttgactcttgagacaaatagtaccaatgaatgcaacttccaccatctgggctaatctacatgtggtcaaagtagctgcgtaatcctaacgttccaagacataccattcaaaggcttgctaatgtcaccgttgctgaagtctcgacctgggcttaactacttctagtcaaagttgccgactttaaggctttaatcgaaacaaaacacactcaca

SEQ ID NO: 20027 - DNA, 1267 bp, Arabidopsis thaliana landsberg
agcctgggggatctgtcaacactctcacacagatcgatggtctcaccacagaagtccaaaatcctgactatcaagcatggcagagatctgaccaagttgttcgagcatggcttctgggatctctatcagaagatattctcagagaggttgttcataccatcacagcacaagaggtttggacagctttagctcagcacttcaataaggtatcttcatcccgtctctttgagctgcaaagaaaactgcaaaccatagaaaagttagataaatctatggaagactatgttagagagatcaagagaatctgtgaacaacttgcatctattggtaatccggttagtgagaaaatgaagatttttgctgcattacatggcctaggaagagattatgaaccaatcaagacttctatagaaggatctatggacttacatcctccacctactttcgagtctgtgattcctaggttgactggttttgctgatagaatggctggatacaatgctggaaatgaggtgtctccccacttggcattcaacattaccactactaatggttcccattactatagtagccaaggtcctggaaatggaaagcctgtaaacaacaacaaagggagatcaaattttacaacaaaaggaagaggctttcaccagcaaatctcatcatgttcttcaggaggtgacagaataatatgtcagatatgtggcaaacctggacatcctgctctgaaatgctggcaccacttcaacaacagctaccaacacgaggaactgccaagtgctctagctgcgttaaggattacagatgttacagagactcctggtcatgattggtttactgattcggctgcaacagctcatgtcacaaactcagctaataggcttcggcagtctcagccttactcaggatctgatgcagtaatggttggtaatggtgagtttctccccataactcacactggatctactagtcttcagtcaacctcaggtaatcttcctttaactgatgttctagtttgtcctgatattgctaaatccttgatatctgtttctaagctcacatcagactatccctgttgtgttgaatttgactgtgacactgtgcgtattactgataaggcaacaaagaggttgttaacaatggggcatcacaataaggggttgtacatgttgaagaatcactcacctcttgaagtctactattcctcaagacagcaagctgcaagtgatgctgtttggcatagaagactcggtcatcctaatgctca

SEQ ID NO: 20028 - DNA, 1137 bp, Arabidopsis thaliana landsberg
agtacagccagggtagtctccacttgctccatttttgtttataacaagaaaatccactgtgacgtgaaccaggcagtatattaaaaaaatctaccgttagttattattgtgccatggcatcaataatgtggccagtaaaacgcatatgaatagctcaaataccttgtgatgaagcattacttccaagatgggagaagcagtctgaggaacaagaaaagtttaaaggaaaagtgaaaaatggttttacttgtgtagttgtagtttctatagcagtatatgtgatacagaagaagagatttacttaccaacagctgaagatgctgttagtgggaaatcagaaagcaagccatccacggagaaatctccattgtccatgaaagataagtactcggccaatggatcaaaactgtagttgtatgcaagatcaaaatcgtttccattaccttatgcatatacttctaatcctgctttgtgagcatcttgaacaaaagatgtacggggaagcaagtattggctttcgattggccatatgtaagacttgggaacaagaactcctgaagcaaaagtcttgaggaatgttaggtttcccgcaagagatccataggtttggttggttgacacctcaacatcatctttttcaagaaaccggaacacaaactttggcccattgcgtccaaaacgcctaccaatgttccgaaagaaattcacctcaggggaagagagatagtcaataatcacagtcttggaaattgatagcagaaagctgctcatgctcagattatgttgagcatagaatgcgtcgtgctgaataaagaacagccgtattagagtgagctttcactgcaacaaaaaatggaaaacaacaagaaacttactgacaaaagagctacctgaacatttaaccaaaaaccctcaggttttaactgcgtagatatatctttaactgtcgatatcccgtaactgtttccatcgaatgccgctgaccgtgataatattccttgtttcactatgagaatgatttgtatgaagaagattcaagcaagttacacctcaatgaacagcagcaatcaaatctaacaataataaaatttactcaatttgatcaaatgtcacagacagattcccgctaaaacatag

SEQ ID NO: 20029 - DNA, 333 bp, Arabidopsis thaliana landsberg
tttattttcttcttggagatgtatgggaatcgtttgcagagtggagtgcttatggcttttgagttctactcactttgaataacaataaagatcgtgtctttcaatactacgtgccctcgctttctggtattcaagtatatgctgatgttgatgctttaacttcatctcttcaagcaaggtaagaactgttcaagcttacgtgttcataacttgtagtggttttagtctataaagctcaagtcttgtctttctctaagaaatttggggtgtcccgcctattaatgtgccggcggctaggtgaggtgagcgaacgcaactttagggattcaagta

SEQ ID NO: 20030 - DNA, 1026 bp, Arabidopsis thaliana landsberg
ttctcatccacaagttcaaacaagggttatgcccaataaaataataaaaatagatgctaaattatgagtgagttgagaaacctttctcaactgagagaccataaaaacgtaccttaacacatgccttgttataattgggtaaattgttcttttatactttaatctttataaataataatattatactacaataatttattttgagaaaataatagcgtttctattgcagtgattctcttatacctttgtcaaaacctaaaagcttttatggccgtgttcgggaaagtataaacccaaactctttctttgtttgaatctctctcgccaccttcatcttcttccatgtatatttcttgtcggccacaagtctctacttgtgtgccattggtgtttggtcctcttaaagatatatatctatcgcttgtattcctctttaatttgttacttggaattgtagctcttcatctttccctctatacatatctcattttaacatcatccataaaagttatattctagaatgagttcgtaaagtaaaagaacttatgtatgatcaatctttagaactcttcaatttccattatgctttacttttgtttggattgcgcctatttgacaagacttatttgtgtagaaagcctgacaaacttcaaaaattataagatcatgtactttcttaatgacttacgaaatcaggtcgttttacttatttgaaatgacgtttttaccctcacatgaatgtaaacaataacccaaatgaacatctattcacgttcttcagtgattaaaaatttaagaacacaataaaactaagactgaatcttcataggttagtaatctagagcaaatttttcaacgctagaagaaagaaaaaaatgaatcaagagcaaatctttcaaaaccagaaacagttgaagaaatctaaaaccaaaattaatctacacactaatcgtattgaggataaaaaccataattttctatcatgaaattcatgaaattggttgcttgggttccctttttcccatc

SEQ ID NO: 20031 - DNA, 583 bp, Arabidopsis thaliana landsberg
tttaaaatttatatattattaaagattatttgaagaagtttatatcttacacccgcctaaatatgcgggccttatctagtatataataaaagaataaacagaaaacaatactaatccaagtgttcaaataatatattggaataaatgttactaaaatggatcatatttgaacataagacatatttgaaataacttaaaccagttaaccaacaaaatagatttaaatgattgataaatttatacaattattaatttatgatacttataggactatcaagttacatagaattttcaaactaatttgttatcttttattatattatcaaataatgttaaatattacactagtccgactagagaaaaaatattaatttatagtgattattaacttatcgagtactaatttatagaggttttcttgtacaaactgataagaagttaaactttaatttacaattatgctaacttcttttcttcacctaatctatttgaatgttatataattactaaatcatattcacaatcattctgtaaagtaaatttcatttaaactcactcaacatatgtactccacaagtgccaa

SEQ ID NO: 20032 - DNA, 358 bp, Arabidopsis thaliana landsberg
gccggaacctttttgattccgcgttcgcgcattgctttcttctctatccctaactttttcccattccccagccgctgcatagatgtttgacatgcttacataagcagcagcgtccctgagcttctccatactgaagagcttctctgctgctctctcagcaaggctttgattcttgtgaatccgacatgcgttcaacactgacgaccacataatttcatctggctcaaagggcatttcgtccatcaacttctctgcttctgcaaatcttccgtttctgccaagcaaatccagcatgcatgcataatgcttcttttttggagttatcccatagattggagacattgcctggaaatattct

SEQ ID NO: 20033 - DNA, 237 bp, Arabidopsis thaliana landsberg
ccatgggtcactctcacacaatcgatccatagctgattgaaggaatttcgagagagagagaatgatttgagattgagagagagagggagagtgaattccgaccagagagagagggagagagagagggagagagagagagagagagagagagagagagagagagagagagagagagagagagagagagagagggaatgatttgcagagagagagagaatgatttgaagagagagaatg

SEQ ID NO: 20034 - DNA, 1190 bp, Arabidopsis thaliana landsberg
  unsure (1)..(1190): unsure at all n locations
accccttttttttgaactttagtgtaacccattatgttacaagttctggttacatgtagatatatgatacattcatnnnnnnnnnnnnnnnnnnnnacaagttggtatattctttttgtatggaccaaaaccgttaatggttcgaccacacaagcaaattaatgtcaactcaataattaaatcttaaacttggaccaatctataactcaagccaaattatagatctatcaacctatgaaaattatttgtctagttgcggatctgcgattaatacacctgaaaatgaaagatcccaccgatagataatatgcatattacaggtcaagtggagaaagttattccaagaaccgtggcatgtattatttccataacttagtttctatttacaactactgaagcagtgcccgagccggcacgtcgtttatcgttttccgttcatacatgcatgcattgattgtacggatatttgtaattaacatcataacatgtttggttcgtctctgagattacgattcatgttatgcgtaagtgcgtagattctcactaagtgtttaaataaatcatatttaatttcgactatgtatgtatgtgtgtgaacattttgaaaaatgtgtaaccagaagtcaaaaagtcaaaatatatagataaattagttgttctttcggatatcaatcgcatcgcgacgctcattttagaattgaacatctttcacgtcaaagtgtttcgtatccaaatcagacaaggcaaccacaaaagccaaaatattttgtcgtctaacctagctaggcctcgccatacttaaatagtattcgaaatatatttatttgggtataagtagtattcaaaatatataattagttagtgggaataagcaagcaacaaacatatccttgcgattgatagctaaaagaaaatcttgagtagaccggtagagagaatataaccgtgttacacttttcccttggtgtttcatcaccaatttcatttgatcttttatatcaacaatgtccaaaaacaatattataccactaggtatggtgtccccatgcaaatcacatcatcatcaataatcactagctagtatactcttaatgaatgttacgtgatcacctaactgtatgattgactatcacatgaaaagaatataaggtgattaaaatgaaaccagattgttaataacttactccctt

SEQ ID NO: 20035 - DNA, 614 bp, Arabidopsis thaliana landsberg
tatgatacagacaattttaacaaaaagtaaacgtttgaggcggactcaaagaaagaaatcaagaagttgcagcggtatagagacctcagatcaagacatggattcagtccagtgagatcaaagataagaaagtcagtggtctttatcttcaacgccttttcttttaactgactaaggatgcgacttggctcccttgcaatctcttaacttgcacatgcaaaccgtaatctatggctatgtgtttagttatctctcctgtttaaagtttgtggtgatgatttcaatattatcatcttataactaaagcttgtctaacatctctagctactttactttggtttcatataagctgagaggagtggcttcatctctgtgagaaagaaaccaagacaagaccaagacaagggatggctgaataatgtggtgagttgttttagcgtattcgtgcctaaatattgattcttgacccctttctttaacaaaaacgtcaaagaagacaaatgtttatggtgtttttgaaatatatgcaacgttatgcaaatgctgtaatttatgctatgtgggtgaggcaatgtcctttggcttggtttctctttcagactcatcttcagaca

SEQ ID NO: 20036 - DNA, 834 bp, Arabidopsis thaliana landsberg
ggatcaagttatgcttttgcttcaagcaacctaagtcatgtcttaaaatattgaagatggtgtgcgttgatgagacttgtccatggcatttgactgctcgcgtcgtgaaggattcagaaagtttcaaaatcactttgtatgctacgacacatacgtgtaacatcgactctcggaagaactacaataaacatgctaattataagctcctcggagaagttgtgaggagcagatacaattctacgcaggatgggccgcgagctgtcgatttagcacagctgctcctaaatgatctgaatgtgcggatttcatattctaccgcttggagagcaaaagaggttgcagtggaaaatgtaaggggggatgagatagcaaattacaggtttttgccgacctatctgtatcttctccaattagctaatccgggtacaataacacatctacactatacactagaagatgatggtaaacagcgcttcaagtatgtctttgtctctcttggcgcttctatcaaaggtctgatatatatgaggaaggtagttgtggtagatggaacgcaactagtcggaccttacaaaggatgtctccttattgcatatgcccaagatgggaacttccaaatattcccaatagcttttggtgttgttgatggtgagaccgatgcttcttgggcatggttttttgaaaagttatcagagattgttccagacagtgacgatttaatgattgtctcggacagacattcatctatatacaaaggcctaagtgttgtttacccgagagcgcatcatggagcatgtgctgttcaccttgagcgaaacctctccacctattatg

SEQ ID NO: 20037 - DNA, 471 bp, Arabidopsis thaliana landsberg
caaaacaattgatgaacttaggaatttaacaaaatagatcatagggctttcatttatatttacaaagattaaaagaatctccaacaaaacaatttataaacttaaaaaaattttaaaacggatcattactttcatatcacgttctcaagtgtaattaataagattaacacgaatttcttacccagatcacagattgtctccccttcaaaccttcaaactttgtaaaacagcaactgaaaacttcagattcttcaccgtaacacaatttggattccttttttttccagaattctaatcttaattatgtaaatatcttataatataatctctattataataggtaatcatgattttttgtcttgtcaaaactttttagcatttaaaacatctgagcccaacaaatttttttaaaattttaattccaagctataatgtcaaattcgccgaaacccagaaaatatttaatgcact

SEQ ID NO: 20038 - DNA, 1901 bp, Arabidopsis thaliana landsberg
tccttaggtttggtcttggcttgagacttgtttccctttttgccacctccccacttcttccggtactccgtgtacttgtcgttgaagttagcctattcacaccaacaaaaaaacacgttaagagtatggtttgaagactacatgagagtatcattccaaaactattccattgtcaaaagctgattcagctaattaccttgatggcctcgaggattttgctgaactcaagcttgtcctcgttcttgacagtggtcaagcacaaggcagcagcagtcttctggtgaacgacctggagagtagaagcaggaaatgaacataaattagggtgaaaacattaaagtaagaaaaactcttaatggaagtttacatccatggagtggtgaattatttaccgctccaagacgagattttcccttaacaatgcagtaagggacttccattttcctgcagagtgcaggtaaccagaccaccaactcgatagggtcaacatcgtgtgcaatgaccacaagctgtgccttgttctgctcgatgaggtaagtcacatggttgagaccatacttaacaacaatgggcttcttggattcagcaggctttccttctgcctcagcttgagccttgttcaaaaggcgttccttctttgcggctttgtcctctggcctatacttcagaagaatcttgaagaggctggtggctgcaattacatgacacacattaagcaactgatcatacaaacatatagatttctgaataaccataagaaaaagagactaaccgagattcttatcaagggtcttggtgaactggttaagagctggaggaaccttcaacctctgcttaaggatacgcttctgcctttgaagacggattgacttaggccatttgatgtaacgagaaagatccttcttaggaggcaaagcgccaccaataccgaattgcttagggcgtctctcaaacaatgggttggtaactttctcctaaaatacacacaacaacaaatctaatgagaaactccaccaagactaataataatactcagagaaaaacaaacaatgcttaaaggaaaagctaagagagcataccggcttcttctttgaagccactttaactcccttcttcggtgcctatgaatcaacaacaaacggcgataagcatcagaaacaagagtcacatatcaccatagcatcgatgcattcactatacaaactacgaaatcaaacaaagccagaatcctcagggacataagtataagccagattccaatatagatttgacgaaagaagctcaaattcgaggaaacaaagagctaatacagatcctaaacaaacgaaagtggcaatgaaagctgcaaaatggtgtaaaagcggcgtaccattgttgtcgtcgacttctggaggtaagacagacggctgagagcaagagcgactcttagggttttgtgttttcactatttataaagacactgaagcccaaatgatacaaatattttttttcctcagaagcccagatgagaaaattacgtttttggacacgtattgctctctcaatatagattttctgaatatcaagaaaataatttttcgtcaagaaaattatatattcatgatctttatatcttactttctatatttttttattaaatcaacgatattttttatagaaaaaaattacacaacgaacgatctgatagcttttagtattcaaaaaagcatagaacaaaaagaatcatatcaaaaagagtgaaatacatttataaattttgaagtagaaaaatggtggattcgtgaataaactggctttcctaagaaacagcatggctattaacatacactttattaaaaatcagttttgatgttttaatttttctatgactatctctatcttgtaaataacattatacagtt

SEQ ID NO: 20039 - DNA, 502 bp, Arabidopsis thaliana landsberg
ggacgaaaaaatggaagcctacctgagtcatgttcagaggttagcaaaacatttcgacgaattcatgatatatcaaggattccaagaggagaaaattcatgggccgacgccctagctgctctggcctcaaccttcgacccgaacccgagaagagtcatcccagtggaattcattgaaaaaccaagtattgagctcggcgaagaagaacacgtcctcccgatacaaatcagcacggatcaagatgacccgaacgaatgcagcccaaagtggatggaacccatcataagctatatatccgaagggaaattgccctcggataaatggagggctcgtaaactcaaagctcaggctgcacgtttagtcttaaatagggagaaaactttacaagtggccgattatccggaccattgatgacctgcgtggaaggagaagcgacttgcaagatcatgaaggaaattaccgggggttcgtgcggaaaccactctgggggaagggctttagc

SEQ ID NO: 20040 - DNA, 1994 bp, Arabidopsis thaliana landsberg
atccggtatatgacctgcaggaagaaatataaacttaagtccccaaaactagaacaacgatatggccacaaatgaaaaaagagaagacacacacacacaaaaatcagcaacaagaataaagattgaaaaatcctcatatgcttatactctagagcctcgcttacagaaataactgagcaccaaagtttaaagtattctagagcattattttaacttttgtacctggtctagtgtttgcacagattcagaagaatccatagatttggtctgcggagcagctttgacaagggctgagtagtaaattttttcgtctgcccctttatagctttctttatgtgtttgctcaacctcgtcaatataagcaacacgtagagacgggtacctgtcacagagaaatagtaaggttaactaatgcatataagaaagacataacagatctattgaagaattatgatgagagaagacatacgtagtcataagcctcaatatgtccttcgcacgttggtcaccggatctcttctgaacactgtattgttggcatgaaaccacaaaggtaaatttcatgtcagcaagtgcttgacactgagcccagagcgacgttccactcttcgatgcgtcttcactagttaactcgagagccttgtacccttttaataattcttaaaacaaaaacaaggtagtttaaggaatgctttcatactttttaagaatcgaaaagaatcacagagaagattcttcaagcaccttcatcctttgccatatcaaggaaggcctgaagttccaaagcctttcggtaatacatcattcctcgcactagttgaaacagatcagaaatcaggcacaacaagtttatcaaaagataaattcgtcaggttagaaaaatgaagcagaattcaaccgattaagagaggagactaaagtctaccagttttagtcagagtttggcctctgtaagatgcccaaagacgaagctcctcttccaaatcctctcttgctcttagttcttcttcgttgccacatttaactcgttccagaaagtttgtccattcatctgatgtaagccatggactcagctgatagctcaaacaaagtaacagtaccatatgaaaaaattaaaacagatggaaaagtgaaacctgggaagatcttctgcaagtaaaagagtatagaaactccatcttcattttgctgttctaagccaaatatggagaaaagaacatcctctgaaaagtatggtgtaaggaccctatgaaaaaacaaaatggaagatgttaagatatagtaagcctacgagaagatgtccatcgtgactggaacctacgagaaggaaagcatgttgcggatcttgggtgcaggaggcatgtccatgaatagtgaatttgaaaagaaagtaagacgccttcgagcttccaagttggatggaacatccatagctgactccttgacagtaagcaaaagatatatccgtttgatctacacatacatgcattaaagttttgagaacaaatcatatgaagactgcgcgaatagaacttaaatataaccctatctggcataaccttctctttccaagcttctgttactggttcaataggaaatctaatggcacctgaggatgcaaacagctgatattgttgttcgagagggatcattcccccatgccaagtgccaccatgacttgaatctaccaagctacagagacactagatatataagattttgatgttcatacgacaagccattgcggtgcggtagaaagtcgccaacctcgatatattgtaatcctccatcataatgtctcttgttacaacttccagcatgtcttggaagagaattacaacgtgatctctatcttcctccttattgtcaagctacattggataagaaaacgaagatattggaccaattgacaaataagtttttagatactaaaactacaaaagaaacagtaccacaggaagaacatttaccaaatatttgatcaacttgacaaa

SEQ ID NO: 20041 - DNA, 1056 bp, Arabidopsis thaliana landsberg
gcatcacttccaacaatttcagctgcttcttgttgaaaaacatgaagacagtgtcaggttttactagtcaaagacacactcaattaacacctctatttagacttacaatcttttcagctacattagtatctactggtgtaccatcctttttggtacgagacttgatccaacttgtagtcttgtcacgctggaaggatctccactttcaagtttctgtacaaaaaacaacatttcagtgactgtcacaacatacaagcaataaccgtataataataagcaaaataaatgaagtagatatcttgccatttcttctgttagtctgacaatccctttacggctagtggtatgaggtatctgtttctttcttcttgctttaaatgtatcactcacagcctaacaatgaaacatgttactaatccccatttaaatacaaaactttatattcacaagtaattaccttgaatgctgaactggttttgagtttgacaaacttttgccactcaacaggattaatattagttggtctcaaattcatcctctcttggttatttgcagccaagttaatagccttcaccctgcgtgacttgtgtgctctccacagatttcccatctggtttatcacaaatatcctttgccaatattcatcaagctcaaaccttgcctgcattcacgaacaatcacaccataattatagaagaaccggatcacaccatttcagtatccatgtcaacgtctactggtaatggaccaattatatctgcatttccatcctcagactcatcgttactatatcttcttgaagcacctctcataacaacagaccaatttgatccttcttcacttgaataaaatacttgctttgcttgtgatgctaggatatatggatcctttagaaagcttacttggctctgattcaagttaacaagagtgaacccatcttccactttaactccattacctcttactgcccattcccctctcaatataggcacatagaacacattgtagaataacaatatgatgtcaatgattctcccataatatacaccaaatgac

SEQ ID NO: 20042 - DNA, 386 bp, Arabidopsis thaliana landsberg
acgggaactgtaaccccattcgttgtcgtaccatgacaccattttcacaaacttgtcgctcaatgcaattccagccttggcgtcaaaaatgctcgacctgttgtcgccaacgaagtcagttgagacaacatcatcctcggtgaatccaaggattcccttgagtttgccttcggattcctccctatgtattggtggtaaaaacacttggtgagtaatttgatcactactggaatataagaaaacttaatctgtcattgttcaaaagcttacttgatagcctttatgatttcttcgtaggtagcagctttcttgagtctgacagtaaggacaacaactgtaacattaacggttgggaacatggaaaggcattccagctaaacttttcc

SEQ ID NO: 20043 - DNA, 378 bp, Arabidopsis thaliana landsberg
aatatatgtgagaaaacgaggaatcaagaaaataacaaaattttctatatataaattcttaatggttttctaaaactatatatcttaaccaaattattttcaatcattagatagtgaaacacatataatatatatattaagcaaaaataggaacaaaaaagtgcatttaaaaagatagccaaattttattacataaaaaaagcttaacaagataaatcaacaaagaacaaaatcagaagaataaaaaaaaccaatcataaaaagaaattattgcactcatgcttcttcttaaagaaacaattcaaaatcaataataaggcgtcttgtagacatatggtggtggatggagacttgtaagtgactttaggagaaggagag

SEQ ID NO: 20044 - DNA, 1050 bp, Arabidopsis thaliana landsberg
ttctcggacatgaagacctggtcactgacttacacgtagcattccagtaaagtaaaaggggtgataaaagacggctagcgtaggccaagtgcttgaactagggtagaaaaaactctagctacaggtgataacttaacttgacaataaaactggatttttaaggaaccactattagtaagcatttatgtaaacagagtcttgattcttgaatagccttaccttgactccctcaagccagcatatccttgagagtcttttccttttgtcgagtaagacttgcgaaagtacaccccgtactcagggttttcgaacccatgttgttgtaggtgaggaaacagcaaagttttgctgtttttgttcaaatgtggtacttatggaagagccctagcaatgaagttggtcgcgggaggatgtctgcctcccaccttgaaaacaataaacttttgtgtgggagggtgttttgctccctggtctataataatactttgtgcactcataataccctggtattgtaataataatactctctctatatattttttatgaatgtaaattaagttattgtaatatgcttctgcttattcttccacccgatgtgatgtaatatctgcgtaataggtgaagcgctcttgggcgaaatgatgaggatacagttaccgaacttgtcgagtgattatgtgcatctacagggttgtccaaggtccttaggacaaggacaactttaggtggacctaataccttgggaggttccgtcacatcatgggttcggcaaggaaatctccagtgaccccgtgtatgaatcccaacctaatacggtccaagcgcatctagtgggaaaagtgaagagggaaaaggggattaccagagcttattagcacgaacattgtgtccccggaaggatatgagccacgacggcaaaatccaattccggtgaggaattccacccatcccggatgcattcctcgctagaaagagctacagaccgatgcggtgtgacttgacgacacacccccactacttggtgagtcccagtgtggtggcgcaagtgcg

SEQ ID NO: 20045 - DNA, 551 bp, Arabidopsis thaliana landsberg
cccaaaaaaaaaattttattttttaccttggttttaaaataaaaatttttattatgaaatttttaactcgtcgagtacatctcttattagttaaatattcttacatttttacaattggttccaattatattttctaaaaatattgggaaattgaaagattttaattattttcggttttaacgtggattattgatgtgaattattttttatttatttcttaattaaaaacaaattaaataatattagctaatcaaaggtgttaattataattacacaaatactcaaaatatatgagtaacttttaaaagatgtatgatattctagtaatattcatacttttctataacatctaagtaattaattcgtttttgtgactgaattttaaataaaattcaagatataacaaaatggagaagaaaaagaatagtaaacaaaaaacgtagacaacaaaatattcacacttataacttggcgagtgttcccaaagtcactaagcaattttaaattgttaaacctatttttaccttgttttgtttccaggaatcggttat

SEQ ID NO: 20046 - DNA, 593 bp, Arabidopsis thaliana landsberg
ccactaatttaacaattttactttaaatattacaccaatttggtccaagaaaaatagaatctaggattttatctattgaaaaatgtctttggagcgtggaagattgattatttttataacgtcataaatatttagtgatagtctcaaaaatatttttagatattgtattattaaattttaatgtataaaataaataaactatctttatctcaaaaaagtttaaaataattaagattttgaatttattttattttatttttcttcctctaaatttcaaatttcgttttaatttaaaaagaataaagcttttactttaaatcgggaaaatttatcatttacatattacaaattgttattttgaaaaatataggaaggtgtatttttcaaatgaaactaaaaaatagggtagttttcaaaatctccctaattaaaaatatattaatatacatttattagttttaagtaaagtttgaataacaacccaatgatgatgctactaccattacaattgttattagtaggatttaagaaacaactgaaaaatttgaataacaaccaatatttttcacaaactcaaatacttcactatgcgt

SEQ ID NO: 20047 - DNA, 515 bp, Arabidopsis thaliana landsberg
catctaatcggaaaacaaaagatgaaatagaaaaaaagaaaacttccattttccctctaatagatttttgaaagagagctgcataatgcatttatgggccggtatcgaatacctttgccaactagaaggtgaaacatcaaccattactcacaaataaggtacttaaattcatgtattaatttgacaaaattccactacttcccacttaattcatacttttaagcagcaataaaaaaaaagaaaaacaaataatttgtacgttgagaagacaaaatatccaaactaatctatttaaacaaatacatataaacaaagttatcatccaattgcaaccaccaaatacttccaacaaaatcaatggatcccaagaaagctgatattagtcgtttagaggcacttcctcaagatctacttggagaaatagttgctaaagttggagcaacaacagctgaagattttcacaattgcattcttgtatgcaaagaactaggtgcatcagcaaatgacatacacgt

SEQ ID NO: 20048 - DNA, 485 bp, Arabidopsis thaliana landsberg
  unsure (1)..(485): unsure at all n locations
gatcacgcccatctaacaaaaacggcctcgtatgtgactgactcggagacggcttctcgaaagtcttacaacaatctaaaacattctccggcgaattcgattcagcaaaagtcttcaaagctgcatactttgcttcttccacacctttcccagtcacaacaacctatggttggtcactctctccttgtcctaaatcctcagcttcaagcttcttctgcgggacatccttcttcttattcttctcagactctatctcctctctcttacgttacttcttcttctctttattactcaactcttcctctacaccattagtgacctcttgaggcacttcttcgacttcatgattttcctctgtatgtttgatcttcttgctttacttcttcttnnnnnnnnnnnnnnnnnnnnnnnnnnnnnnnnnnnnnnnnnnnnnnnnnnnnnnnngcttttgtccagccatttctttgtttcgtttacaggagaga

SEQ ID NO: 20049 - DNA, 935 bp, Arabidopsis thaliana landsberg
tcattgtggtgactcttaccatatggattttttatagagggttaatgtcatacaaagaataagtttattatagtcacaatatttcaaacaaacttgcattttccttaagaaattttaccaaatcattcatttttcacttagaaacaaatttatctgtaatttagagccgacaagtaccagatggctaaacccatgacaaaggttgaaaccagatgtctgatgtcttattgatttgtccgcgtttgctcatagatgcgtaaaaattctaattttctaagagtcccacatcgacaagctagagagagtttgtcataaccttagtagtataagtaagaagctgagcccatcgaaaaattcatacctttctcggccttttggctaagatcaagtgtagtatctgttcttatcagtttaatatctgatatgtgggccatcggcccacacgatattaactctattttttaagggagaaagcccactaagatagcttgctatctgggctttcgcgagtcgcccatgcgttgcactactgcacgggccggctcaacccgccaatttcagtgaaaatttcttttatgtcaaatacatataaatttttaaataagctatatcgaactaaatattgaggcttgaagccttgaaccaatcaaaaccattaacaatatctaattacgaaattgctgggtttccaaactgaccaagaatttggtttgtttcttattaagccaaaggcaaaatcgattctgaaccaaacaaaccagcaattggaatccaaaccgaaactcttgggaagtttcatctgaaagaaaatgtcggaaccaaaaattcaagagagaagaagaagagatgggggaaatgggaaaggcgataggattgctgataagcgggacgcttgtgtatcaccattgcgctaatcgcaacgcgactcttctctc

SEQ ID NO: 20050 - DNA, 942 bp, Arabidopsis thaliana landsberg
  unsure (1)..(942): unsure at all n locations
actccggttaacctttgctgatcttactcgcagaggtccttaaacaagatatgctacaactgtccaaagaacaccattactatgatttgaatttgagaactataaaaagtttgttatttatataaccacaactagtagtgcgcaatgtatcgatgtgagtaaatgtatgtgaccagaaaacagaaaacgatgaaataaacatttgttgaattgagaataggacctatttacattctccaaagatatgagtttacatcaataccaatcacatcaatgtatactttctattcaatccaaattcagactaccttctaaaattatctacaaatcacattctaccaaccaattagttaatgaccgtccaaaccacaacagattccacagtgtgcctattctctcttccaggcttaatatgagaaagtgcaacagcatccttggaaacaaaattctttcagctgttgttgcgttcaaacaatgcaagacaagacgacatatcagtccatcaaacaggacagctagagtctaagccatctggatagtagtcaatatccataaagaatgaagtcatctcatggaccttcttgtatatcttttcagagagtctgtgagacgtatcatccttcatgaatctatgaacttccccttgtaattctatctgnnnnnnnnnnnnnnnnnnnnnnnnnnctgcattctccatcttcctcctaacctttgaggcagcttcacgtaatccacaactcgcgtatccattggcaaacacaacgtaattccctccatttgttggatccaactccaaaaattttgtagctgcgagttctagcagtttcacattcccatgaatcctgcaagccccaagtaaagaaccccatactgggggatgctccttgcatggtgacttcattacaaattcatacgcttcttgtaacctaccagcacggccta

SEQ ID NO: 20051 - DNA, 970 bp, Arabidopsis thaliana landsberg
aacaaacccgtcaatggatcagaccgttttttgtttaccattcatcaattataatccgcagtggtacggacaaaaaaaaatagaagaaaaatgctgcggaccatctgcagaccgtttttactacaaataaatttggtttgcagcggtttatagtccgccccaaaaatgagatggactaaaccgcagacaaattagaccgctttgtccgctgcctccattcataacctataaattatataaaaaaggtcctagacagatttgctacgcatcatttgctaaaataaaacacctgttgccaaatgtcgacgatccagaattatgattacaagtatcatcatcatacgattacaattatataaagaaataaagaacacacagaactataatgccaagtaatttcatcagaaataaaattacgttgtttggctaagattttaccacgtgtcaacttttcattcgatctagatggatacccatggaccccacatggatagactcattgacacgctcatgtgaagccaatagtaacaccaaccacaaaagaaagagacagagagacactgaaatatagagagaagaaaaagaagaggtttagagagagaaaaatggcgtcaaagctctgcgattcgtgcaaatcagcgacggcggcgttatactgccgaccagacgcagcgtttctatgcttaagctgcgattcaaaagtccacgcggcgaacaaactcgcgtcacgacacgcgcgcgtgtggatgtgtgaagtgtgcgagcaagcaccggcacacgtcacgtgcaaagcagacgcggccgcgttatgcgtcacgtgcgaccgtgatatccactcggctaatccgttagctcgccgtcacgaacgcgttcccgttactccgttttacgattccgtctaaagtgacggttccgttaaacacaccgccgttaatttccttgacgactgttacttctccgatatagatgg

SEQ ID NO: 20052 - DNA, 1700 bp, Arabidopsis thaliana landsberg
ataaacaaaaaactcgaaatcaatagaaagatagtaagatttattggtgtgtaccggtatgtttcactttgtgtggaagaaacaaaacgcagcaaaagccagtatcacaaaaagagaaaggctcacaatactagcaacaatgattttgttgcgcttatttccacctgagatatataaaacgaaaaaaagttagagaacagtaccaatggagtggaagataaagttgtaatggcgaagtctctctttcgtgttatgttttaagcaatacctagttcagaacttgcaaggcgaatggaaagaatttctccccctgcagaaaattgcactgcgtccattaggtcttggttccacattaagcaacctattccattgatataagcaaaggccaagcaagaacaattgtggaggcaaatttggtagcatccttcagcatccacaaaacttgcaaattcgtaaaagtctggaggctttatgttggcaacgtgatagaagccgtttacagttttaccattagtgtttccttggcaatgtagttcagtatgcctcacacaaccatcagtccagtttcctcttttccactcctcaatggattttggtacaaaccctttgaagcatttacactttggaggtactgacataacacaaattccaaaaggtccacaaaagccgtaaatatcgcatgaattttctggagcctcgaagtttaattcccagtccattccattatgccgaaaaatcttcagtgagccttctgatgttatcattatatatgaaagtttgaagtttctttcaaaataagtgaaggatcctgacccgtttgtatcttgctgaaggctgaatggacttgtatatgtgtcatccattacaggtatcccggtgaaccttgttttagcccatggaccgcttctccaataagtctttgagcctctcatagtacacgcctgggatggaacttgcggtgtaatctgaaccgtaaaatcgccaggcgatggatcagtgtgacttttccaagaagtcaacacccgcttctcacctgtggcaagattatacatcaggtttgagaaaggtagcatagtgtcaccaaaatgctcaaagctttcccatagagttcttcccgaattattgtctatgacaactaaatttccgttgtctgtaagctccgcacgagacccgttagatgcaaaagtttctccaatggaccacacaacgctatgattttcattaaacaacagaagacttccattgctgctgatagttaaatttgctgcagagtctgtaacaggcttttctctattggccacccacacaaccacccggggaatgatacccttgaaccagattccaacatactgattttgggagttattaaaactgaagaatcccaattcataaactccattagaggagctgagagtttttcctattgacagaggactttctctcgttatccctgcatagctgaaacttaaaaagatggtaattaagagcaaggaagcaaagaacatgatcctcttcttccccatgtgttattgtgtctacaagaactatttctttggatcaatttaagaaacaaacatgttaacaaaagaaaaagtaaaccaagaaaacaaagtcacgttgtgagtactatattctcaaacacctaccaatattgttgaccaaaccagacttatgttccaaaattctgcctttgcttaata

SEQ ID NO: 20053 - DNA, 1182 bp, Arabidopsis thaliana landsberg
ggatggatgaaacaatgttaatcgttcatcctatctgtctctatctccattgcatatctttctccacattgtgccacctgaaactgttggaactcattttttcgcggtcctacagaaaccacaaatatgcctttagaaactcgagatttctcaaaaggttcattctcgagagcaaatggaattgcaggttctgtctgatgagcttgagttggccatcacagaccgtgctgaaacccacaggcgtgatgtgagtttagttctttttcatctataaagagtttgttggtttctctcctttaacttgctagctaccaagtgaatcctgaccaaaactctgttcctgcagcgttgactgtcaccgcagagccttctctaggatcagcgattaaccacaacccaagaatgagatagagtcctgagctccatgagcattttctagaggcagtgaacaagcttcaagggcctgaaagactaagtagcaccgaaacgggtacgggaactagaaacggggatggaaaacgacaaagtcaaaattcatagtatgtagagacaactcctaaggctgctatgaagctaatgaatgttgagagtttgaccatctatcaagtgaaaagccatctgaacctgacagaaatttcaactacataagctgaattatctttgaagctgtattttttccttgcagaagtatagactagccaagtatatgccagagagaaaacaaggtaacttgttccctcatctgcttctagttcatatatgatcatctgagacagtttatttattgattcattgtttctttttttattgagaagagaagaaagcagcttcgaataacttttggattgtgggatatgttttcaaacattttcttaaaagtttttctgtttactttttgtgcagagccgtacagttagcagaagctccgtctgcagatggaagtacagaagcaatcgcatgaacagctcgaggtaaaactctgacattggtgataaggtttcattcaagatttgctctcaaccaattcatgtacatgttactgctgggtgagtaggtacagatgtcactacaactacgaatagaagaacatatatactaagtacttggaaaagatcttgtaagtacaacactaatcttgtaaaaccaatgcatctgaaagtaacgccgacaaatgtgaaactt

SEQ ID NO: 20054 - DNA, 918 bp, Arabidopsis thaliana landsberg
tattgaatgttttaagaaaatttatttaaaagagagattatagagaatttaacacaataaaaaacttttgatttttcctcaattaattgtattaatatttttatttaattaatatagaatgacacatgtcattttcttgtgtgatgatgtgtcacttatagggagagagttggccaactttcatatatatgattagtaatatgtttttttttgggtcaaactaattagtaatatatgttgatgtaattaggtgattttttcttgtcctacgaagatctgtggattcctaattgtacattgagaaccatcagaaaaacaatcgatccaactcattgtttaaaaagaacaactcaaattcgaacaaactcgatattataaaaataattttattttatttttaaagactattacaaaaaagtttaactttcaaaacatttgaaattgttgtcaaaaaagaagaaaaatcaaacattaatcgtggaaccaaaccgatcttccatgtgggtcttgaaccggtcttgaatttatctcaaacccctattcaattagttaattaattagtaataatactaaatcaatatcatagctaatgaaattacatttgcagttacaaatacttacatcgacaacggcttccctcagagctgtaatttgttcctttgatattgtgttcacctacatacaccaaaatacaaaaacaaaaatccaaaaaatgtttatgtaaggtgtaacgaagattattgatctataacagaaacaaaaaaaatgttatacccttttctggacggtgcaaataacgccttcggtgcatggaggaatagtgagagagccaatgtatctatagaaattgatggtttcaaatctaatatctcgaggatccacgattactagatctatctcttttttcctactcctttt

SEQ ID NO: 20055 - DNA, 1146 bp, Arabidopsis thaliana landsberg
tatttgtgtttaatagtctaccatataagtcttgtttcgtaatattcagtgggtgataaaaagctggtctctgaggccgaaagtaatttgattctgattttacattaaatcataatgataaaataaggtttattttaggtaatttttgtgttgttactatagtttttttttggataactcaaggtaagtcctacgtctatagagaacagtagaacactatggatataccctcttttcagatattcaaatggccgtaagcaaggcttcagatccatatggttatccagaaacaatgtgttggagtttcacacaacttgagaagtgttgatgcctcaaacccatctctttatcactagaccacaaagtcccgaacttgagacgtgttgttagtataattacatattttccgatctcatttaagttaccggaaaggcggaaacattgagattagttgggagattaaattttggtttatacgagtatttactgctctaagaaacaagtatctgcgagtataatcatgttgtttattggacatgatgtttattgaagatgatggttttcacgttataatcttcaatttgtagtatttcaaaagtctttttggcgatttataatcttcaagtgttgaaacttccacgaccattatgatcataacatagaaagtgacatattaacatacatcttctcttatagacttatacaatccttctgacaagttaacgtaaccaaacccaaactacagaactttctgaaaacttagagacttaaattaatattaatttaccaaatcatatttttaattctttttttttacgtctctactgcgacgagctgcttggtttgaagttatgcactgcatgtccagctcctctaaatgtagcaaatgttagaccttcgtattcttgaacccacccacttacatattgttttattattgtaatataagaatcatcaatttcatacaaaaaaggataagaataatcaagaaactaaccgtctaataaataatcttgataaccggtaattagatccatcatgtgatcatgtatatacatgacctccaaaataaaacacctttggttggtatgatatatttactgtatgtcaattttgggatcatggatagttgatacacgtctactt

SEQ ID NO: 20056 - DNA, 305 bp, Arabidopsis thaliana landsberg
acagagatttcttgatccgtggcattgagagggataacggatctataaggtatccgaacattaatatcttgtaatgcatcagtgagacgaggcattataccttctccaaaggtgttgtcgatgtaaactggcacaacttctctccacccaaacaacttgataatagcttttatagcatgcacttgagggagtcctcatatgtagctcggaagaagtatgcactgcggagagaagtaagagatgggcttgttgcagaatatgaaacaacaggaacccgagattttggccaatctgagcaagaaata

SEQ ID NO: 20057 - DNA, 165 bp, Arabidopsis thaliana landsberg
tttcgagaatctttgattctcaaactggcgatttgcgggatgaaaggtgtttgcctacctttttcgatgacctggttgatattcggcttcgaacttatggcctgatggaattttgacctcatttcttttaattcccggcttactttcctcatggatttcggatct

SEQ ID NO: 20058 - DNA, 1753 bp, Arabidopsis thaliana landsberg
aacttctcctattcttcagaaaaaaagaaaaagaaatgagcttttcttaccacaaacaacaaccaatcatctgctcttagaggtcggtggaaccacatcctgccaaggggcataagaaaaataagaaacaattacttgaagtattgttttcggagattgtaaaatcaagatattagacgataaagcaggtatataattatgtgtgcgcctgcgtgtatatatatgaattacatggtttgtacatatgtgagggaggatgatacaaactcacacttcgctaagacaaaagaaaaagcttacgagtggtccaggctaagagcagctacactcatgccctctctgcggtgagggtttaaactgattgaggcgaataacagatctgaagcaaacgcaaccacacatctgtataacaatggcaggcgcaagacaatcagaaagactgcaagagatatatcaactatatcaatcagtgatacttaaataatgctgctaggtgaactccttggaatgctaaaaggtgaacgctacaataattcaaattgtctaccaagtttttaggcggttttcagtttaataccactgaagtagagttgctcacctgtgcaaagcttgatcatcatcagaaagttttccctttgctctaaaccaatatttcagtctgcaagatgattttagaaaagaaatggttattttttatcagtaaccacgtaaacatttagtatttaagttttagagtgacaaaatgaaatatgctccattgtagtaaacaataaaactgattttttcaggagttagacaactaggataaccttggaggagacttcgtctgtttagtggaatgatttggctcacaaaatcgaatatctatagggaatggaacttcaatttcagttgcaactttgttacggtaatccctgaaatgaagaaacaattgagaagtgtatgactctgagctcttggaataattggtctggcaaatttccacttacctaggtagtagaggatcagttacaagccgctcaagtatttcctcccttggtagaagctgcagtaggtagggatgaaactgacactcatcgcaattcatttaataagcctcaaagtaggagaaatgatttaccgtttcaggagctggtgtatgaggcatggtcgactcctggtgaataaaaccttgttgctttttctgtaaaaccaaagaaaaacagaagctacaaggttataaactgttgtgttaaagcgtgaaaagctattcgctcatgatgacatagtaagagaaacacagagattcataatgaaatatttcaggaatataacatgaaacctgaaatgacgcgaacaaggtgaatatagtttttcctttctgtctagcatctacacttctggtggaaaagttgttgccgtcacgtaagcggttaacttcaaatatgatgggaactgcaagagtagcaaactatggtaacttgcaaagtgtaacagatgcgtgagctctagagaaatccggagaaaacagcaggcatggttttaaggtaggaggaaaagcaattgcttgcttgcaaaagcacattaaaactatgcccttactatttatatctccaacaagaaggaaataggaatggaaattatggactatccttatagtttcaacagtttttgatgctgcggcaagtgcctgcgaagcataggcagttgtgtcacaatgattactacttaatttcattgcctgattttatagcacataacaagctacatatgc

SEQ ID NO: 20059 - DNA, 261 bp, Arabidopsis thaliana landsberg
gggggcttatcgttcctgtaagcatttctaaaacatctttcattgaaggtcgtgaaaccggtgatttttgcagacattgcaaagccaccttaatgcacaaaaccgcttgttcttggtctaacaactgcagcttttcatccaccagatcaccgagtctccctcttctcgccagcttcctcgcccacgacatgagatttgcactcagcatgatctcagacgcgggtccagttacttccagcggccgccgtcctgaaaaccagg

SEQ ID NO: 20060 - DNA, 137 bp, Arabidopsis thaliana landsberg
gatatgatcaaaacttatatagagatttgataattttttaattgttgaatactttctttttgtgctaattttatgtgattaagatttagttgatttcgtatataaaatattaacttgttttacgaaattatttgttt

SEQ ID NO: 20061 - DNA, 2335 bp, Arabidopsis thaliana landsberg
aaaactccaaaaacccagaaaccctaacccgaacaattttaacgttattttgtgtacaaagaaaaaattactctttttgttttgttgcactctcaaattttgaccgtaaattgcatagatttagagggagacaaattgaaaagtagaggctggagaaagattaaaaattgtttttatctaactctgttgatttgctttattctatatacaatatgatttttttttccgatatgggaggccgtctcgtttgccctttgttaaagatttgggtcttcgtttgtttatactgggcctttatgctgggcttttcaaaatttcagggttgtttttgattttttttgttttttttaatttttttaaaatcagagaaatttgattttctatattttctatttaatttaacggaggaattttatttctttaacctcaaggaacttccaattaaaataaaatttcaattctacttttttttaaatggatattcttcggctaaaattcacctatggtagccttggtagttaaaagtttaacttagggcatctccaactcatcttttttttaatctttataatctatttttcatctatttcactctaacccatctctatttttatttctaaaatagagatcagatccctattttttcttctatatttacaagaataaataaaaacaaccattggaaatggttttagcgaggggataaataaaaaggaaatttactagagtaacccataagttaaaaatttatacataatgacccaaaaggaatgctaaaaatatgagttatttgagtaataattatacctaaattatccttgttttcctttacagagaaaaacaatattacagaaatgccattactatttaattccagcaaggcaataaaaccacatttatttacgaaaatgccatcgtcgtttttggtaaatctgtggctcttgttgcgacggatttgttatcgatcacagatttgttggtcaaccacagattttttacaacagacttgttttgtaccacagactttactgtgttatgttacgccagattttttttttttcgcagattttttaaccgtgactgatttgtttcatatagtctccacagattttatttaaatttcaaaagtaagaatgttgaaaccaaatctgtcactgatttgttttccggaccacagatttttctttatggtggcaacagaatttctatttgcacccaaaaatctgttgtgttataacagatttgttaacctcgaaaaatgttatataggcatgacagaattgttttgtgtaatcacagatttaattaacttgttaacaaatctggtgttttacaacagatttttgttaaaaaataaaattactacacagtcacatagtgataacagatttgtttttagtgatgacagttttgtttttcagtgtcaaagcataacagatttactcatgtcaatgttatggccgatttgtttatgactagaataacctttttagtaataacagactttttttggcagatttatttttaaaattttgaaattttttgttatatgagatttattagctagccctcaattaaattatttccggtttgattgtatgttaaatccggtttgactggatttttatttttttttttgaaaacgttacgacagacttttattagccgacagatttttccgaaatattaccatatttgagtcaaggaatattctcgtaacgcctagggttttcaatgaaaaaaactgccattgtcgttttcttttttcttctgtaacgcctaccaaatctaatttcaatacaatccattattcttctacctattcgagatcttagttgcttcatctttgatacaaattcgattcccttgttttattcgattctctctttggtatggatcaagtaattctcgtgtgtggtaaatgggtatatgagaaaacgagatggctttttgtcgttgatagtacaaaaggttgtcgtgtacttgaaggtaatagtcaaaccagttatgatgatttcatccaaatggtgtatgaggattacaatgtcaagaaaagtgtatttgaagttagtttgagttacaagatctcgaaatcaaagcaattaccagcagatactccacctgtaatcattggtaataatagacagtttcagtcttatttggggcaaacgaagaatgctactgttcgactttgtgttgaattaaaagagaaagatctagatgaatcaaaagaggaaatcattaatggtttagatatcagcgatttgccgaagacaaaagctgttgatgtatacggtattgtcgaagaaaacattgaaaacgtagacgtatacac

SEQ ID NO: 20062 - DNA, 1992 bp, Arabidopsis thaliana landsberg
catatggctataatatgggacattgatttctcgttgtcatgattaatcgagaaaatctgccatatcaagatgactatcatcatcttggccattaaggttccgactcatcacagatgagattagtttcaacatcccttttttttgccttttatgaggcttgataaagatcgactaaatattttggtatatgacacgtctggtagaagtgtcatttcatgccgcatccgtggcaagtgctttcaacatgccttttcttaacacgaccaacattatttttgttggttttttccgcgttgaaatcattggaatggaaacttcttccttttccttggccatgaccacgatctctcccacgaccacgaccacggcctcgataaggtctgggtcctcgccaattatcatcactggatgtagcaacattcacttctaaaagtggagctgatcgaggtgggcgagataaatgattaatcatcatgagttcattattttgcttagcaaccaaaatgacttgcatcaactcgaaataatgagtgtatcctttggcccgatattgttgttgaaggagtacattttcaggatgaaaggtggaaagcgttttttcaatcatatcataatcgctcactttttcaccacataatatcatcttggaggtgattttgaatatggcagaattataatctccaacacttttgtaatccaaaaaccggagatttagccattcatgtttagattttgacaatcacatattttttatgatcgaaacgatcttaaagtgattgccataccttctctcgtgatgtattcattttttaaattgttgtggagatggtggcataaaataccatggctttacctttgctctcatttgatgtcgtttgagatgcatctatggtgataagaagcccatttgattttatatgcatcttaacatcaaatgcccatgtcatataatttttgtctgatacatcaaatgtaacgacatcgagcttagctagatttgacatgattatctatataaataaataattatttaaaattaagtcatttatagtatttcgaataggcatagctattattcgattaaggaggagacatagtctcatactccaaaaataacatacatataattttatatgaatgaatataaataaatttaatataatttaaacgttacctcaaaaaatgtttagataaataaacaatcgatcagttagacaatcactcggagagacgatcgtgctggtaaagtgttataaaatataactccaaacaaataatattattatattgtgtaaaataaatatgagaggagagtaaataacatagaaattatcaataatattctaatttaatcactactttatgttgttattattgtcatacaacattattttcatcttcctattatttatgttatttttgattatgaatttaatttctatatcttaactcataacattttatttatgtatttgtaacacctcgatttcttaaatatgatggtgcatatagagaggtgtaacataattgatttgaccacctatgtcaccaaagaacacttatattttttggtcaaatgttctaagagaactacacagttaagcgtgctcgggctgaagtaactgaaggatgtgtgaacttccgggaagtgattgttagaaccatgcgaatgagacaaagcatggaaaaagatcatgtggtgatttctcggatcagtaaaataaaagtctttaaacccacccagacgtagcaaaccgaccgtctgataggagtggacccacgaacacgaaagagaacgtggagcctactgatagagacggtcggaacgttacaatatttcttctcaatctttgtcttactttaatttttaaatgatattcatatataaattcactatcatctcaacaatattttataatctccaaccacatcaaactttatgtatctccgttaaaaagaatcccataattagtcaacacaacaatatatata

SEQ ID NO: 20063 - DNA, 449 bp, Arabidopsis thaliana landsberg
  unsure (1)..(449): unsure at all n locations
gaatataattatgcatacattttttgttcttttaagaaatttaaatctaaatgtttgtttgaccaaagaaaatcagaaaactcataatttttagtcacttttaaataatttttcatcgtatcaatattgaaaaaagctaaacatacggatcgtttaagaattcgggcaaaactttttggtatgtttaattatcgaccaccatataaccgtttattataaaatttaaaaactttaatgtcacaagaaaannnnnnnnnnnnnnnnnnnnnnnnnnnnnnnnnnnnnnnnnnnnnnnnnnnnnnnnnnnnnnnnnnnnnnnnnnnnnnnnnnnnnnnnnnnnnnnnnnnnnnnnnnnnnnnnnnnnnnnnnnnnnnnnnnnnnnnnnnnnnnnnntgatctaaatattctatgaacccaatgatttgtattaagctagcatactcatagtg

SEQ ID NO: 20064 - DNA, 1271 bp, Arabidopsis thaliana landsberg
gcgaaacggacacaggtggtgcagacaccggtggtggctttataacaatttgcttgttgagcccgtatctagccttagggtcttccgctgagccaccgaatgagatattagaagcttgtgttgttgtcgggatcccgagtctttcccttctttgcttctttatctgctgctgctgctgctgcgattcctcctgacccgctataaaactccctaccattacctgaacaatatacatatcgtattcaaaaccacaatgcttaaaacgatacaaaaacacgagtccattaaagagatcaacacaacacctcatggtctaagttattacctgaacaggaccagcggcaataaagagaccagcaagtccaccaccaaagacacgaccatcttgtcctgcaagagagacactcatcccaccagctctgcttcgggttcctccactctcgcttggtataaacgaacccgtcaaagaaagaatctcaaaatgaccctgaccacaaattgtagactaaatttagtaaaaaagaaaaaagattagaaagaatctaagagagagtgaagagagagagcaaacctcataagtgagagtaccaccagatgtcatagattgacgaagtgtaacattggaatgggaccgttcgctgaaagaatacaaatagcacgcgagccttgttgagagaatgtcattatcttcattgtcacatcctgttagattcagtgggccaaaaatattagagatcttgtggacttagtcaagaataatgagcttggttaatcatagtatgttcctattaaggtcgctaaactgactttatactcacaaataattcagtaaataaatcacaagtagatagaattatcgaaaacatacctcaccggcatttactgtgagcacatgaggtgtaaaacttggactgacaatttcagcaggtcctcctccacctgcaaattaatcatcaaatgaatcaagcttaacagataaaacaaacgaaatctgatcaagaaaactaacaaattgctaaaaccaaaacagtaaagagttcaagttaaatccttaagtattaagaccaaagcctacagattcctcgatatatatactcttaatcacactgcttatgtcactatcatcaaagaatccgaactagtttccctaaattgccttcttcttctgggacttttcctttaaattcaactacttttttcacacagaatcctctagtttactggacagtaacattcactagctttataagtctgacccttcgtcggtattc

SEQ ID NO: 20065 - DNA, 1428 bp, Arabidopsis thaliana landsberg
  unsure (1)..(1428): unsure at all n locations
ctgtctaggtcggctaacttttaatatcgtaaagattagtaagggtaaatgatattttaaacgggattggagtggttcataaaaccgaatttgttttggaaccttaattgtcacaaacaatatgaaaacatattttaaaatgaagagagataaactttaaattaagtggttggctcatatgatccaaaccggtagaacattgttatatattttattatataaagtatgctattcaaagatagtaactcataggatcgagactagtgaattattaaagatttaatttttttattttcttaaaaatatagaaaagctaaaaaggaaaacaaatttacatatactaattcacatgtaaacatccgattggttgacttgatcaaaagaaaaattaataaacttgttttacatgtgttagccacccatcctttaaacatctcctctcgactaacaggaacatttgctttatcgatacctcttggaaacctattacctggcttttttgggttggatcttcaaagataactatgaccgcatttatagttaaggctcaatggtcttccctcatgtctgctcccctctaatggctgaagttttggcaactcttacagccataagagttgcaattggatcggcccttacccatatctttttcactttagactcgttaacgctagtcaaagctctcaattagaagctctagtcgaaggaacttcacgggattctccatgatatcctcaatctatcttcgaatttcgttcgttgctctttcaattctttaatccttcaggataacaatcgccaagctgatgcgttagcgaaggctgctctatgctcctcttgtacgaaaacctaattttagtataagagaatgttgttcaaaaaaaaaaaaaatttagcaaaagccatctatatatacatttttgcaacacttttatcaaataaatcctggacttggaacttatttacaacacaataccattgacatttaatgttttaacaaacttattttaaaatttaaatataaatcgatttttttactaaaatttaggaaactaaaagaaaacaaattacaaaaatcatataaatctttccaattctaaactaaaatatactacacactaacattccttttaaggggatcaattagcattaatcaccctgatttttacccaaacaataacactatatatatatatatatatatatatatataaaatttgaagtacctttttaaagtacttttgtgttagtaaagtaagaatttacaaagaatgtcattacaataaagtcaaaaacaattatttttttaaaaatattattcttgatatattttaggtttataaaatattattaataatttaaacatanataacttaaatttcatgagacgagtaatataagcggactggtttggattgataaacacgg

SEQ ID NO: 20066 - DNA, 1358 bp, Arabidopsis thaliana landsberg
caaaccgttacatagaattctatctttatcacataaagtattccaatttctctttttatggaaccaagaacaaagatatcacgtttatcacatgcaatgcatgtcacgtctcgtgattagctatgaaccggtctgattgacccggattttttccttgccaaatcagaattccaatctgggaaataatatgcgctttggtaaaattaattttgaaaaccaagtaaaactaagagaagtcattaagcctcacaactgcttgattacatggtcgtaggttagagtatcccggagttggaccggagattagtttcatgaaagaaactggtagagcggagttctacacagcaacggacgaagaagcaattcaaggtacgtatacctctatagttaggcatgaccaaaatttaaccgtagctgaattttggatcattttgaaatcgtaactagaccataatcgtataaaaaccataacggttaaccataaaatagactaattaaaaatatatagcaatcgtaaccatatcaaaatcgtagttaaccgtacagttaacctcacaatttatcgtatagtactaaaaccttaaaattactattttaactatttgtaatgcaaacataaatgtcgaatgttcggataaaatatttcaaaaagaataatatggcatatgaaaaaatctataacatacttttcatcgtattaaaagcaataaaaagtcggataatacgtaagattttgcctccggtattatgtgtattgtaattatccataatcatgatcgtaattatccaactgtaaccttatctaaccataaccatcttaactgtatatataatggttaagattacggttaaaaaataattatagccctaaccaatggttaataaaccgtaaccgtaataactttaaccgtggtcatgcctatctgtagttacttactattaatgttttctttataatatttacaagatttttttttctttttctatatatacataaaacattaagcttaattatatgttgtcgactgcagcgtgcatgcgattaagcagattggagggaataataccggcattggaagcgtctcacgcgctcgcgtttctcgacaaactcgttcctactctgcgtgatggagccaaggtggtagtgaactgcagtggccgtggtgacaaagatttagatactctcatccaacgaggcatgccttcttctttttgttgactcaccaagatgccacattacacttaactcttttagaaaacgtatcgtccaattacaaccatcattatagattaaattctaatatatcaatcattatttaaattatcgatttactagtcaccctaaatttcccattccc

SEQ ID NO: 20067 - DNA, 847 bp, Arabidopsis thaliana landsberg
acgttggaaatcaaagcattttaacactctctattacaatggttgaaagtaaataagcaaaatttactgtatttcctaaaagtgagaccatttgcatcggaggatgtgaatgagatacttatcaattaaataataataaaaaagaaaataaattagagagaaagagaaaaaagtggatgaacgtttttcacaggagaaacgattctcagcatttattgacagttgtcatttaaccagtgatttattttcttcgaactgaagctgtaaatgatgactaaaaccgcatccaaaatcgcaccgcaacagtgctgtaacagtatcaaaatctttacatatacatatgtatctatgtattttcgttattatttgaactgcaccattcggaaaatatattgattggattaatttttttttttttgagatactttctatcacttttaccgtgaagatgccctaaattcagcaattaaacacgcaagcaggaagagagaagtcatcatatcataccaacaaaaagggccaatcgttcgctctttgcaagttgcaaccgtcgcgctttcgattccggcgaaattgctccatcttctagtcgcttttcagatcgagctcgtcgttttcaggttccatttctcctacatcttcttgctccacatttgattccacgccgcctattcgtttctcggcgatttcactcctgaaccctaatttcctccacgcagataatttcgacgatcggagcttccgctcttggtctcttgagagtcctttgatatcatatctgattggtcgaagaacgtgtgtccttgttctttttttttgacatcggattcataagtatttctttgag

SEQ ID NO: 20068 - DNA, 602 bp, Arabidopsis thaliana landsberg
gagtgtgttgaaagtgggctatgaaagtttacatgagaaagaccaagctctgtttctccacattgcagtcttcttcaattatgaagatgttgatcatgtgacagccatgctcgcaaaaagtaacttggatgttagacttgggttgaaaatcttagccaataaatatctcatacacatagatcacgaccgtgaaagtacagtggtaatgcatcggttgctacaagtaatggctgaacaagtcatttctaaacaagagccatggaagcgccagattctagtagatcctcgggagatttcttatgtcttagaaaatgaagtggtaagttttatgtttaattattcggtttttaagcaggtcatcaggccactaacaaattcatatttggaatatttttgttagggtaatggatcaatagtaggtgtatcatttgacgtagcacatatcaacaaattaacaataagtttgagggcttttgaaagaatgtacaatcttgtcttcttgaaagtctatgatgggaggcattgcagtgcaagaaaaacgtacaatctagaggggattgagttttcgcgtcacctacgattattacattgtgatgcatacc

SEQ ID NO: 20069 - DNA, 544 bp, Arabidopsis thaliana landsberg
  unsure (1)..(544): unsure at all n locations
gcgtgtggtnnnnnnnnnnnnnnnnnnnnnnnnnnnnnnaaacctcctgttgattttggtcgagcaattgacatnnnnnnnnnnnnnnnnnnnnnnnnnnnnnnnnnnnnnnatgtatatggaaacaatgcagagaagaagactatgatcgatgatgacagcgaggaattaaagtgtttgctccatgaagatggtaccataactagagaaatggcgagatcagataagaagtgttgcagtgaagctgagaaggaagatgctgatggagggatcagtgacaaggttctagcatcaaaggcagacaacaaaaaatcgatcccttatcaaaaacttgcttctggatgcgctaatggagatgagacaagcaaagcatataagcctaaggtactgaagcggtctgatggaaatcaagctcatgcttgattgnnnnnnnnnnnnnnnnnnngaagtgaagaaactatgaaatccaacgaggcagtaaaggtttatgaaaagagaaacaatgatttgggtgaaggtttgatgctgataatgacaccactga

SEQ ID NO: 20070 - DNA, 955 bp, Arabidopsis thaliana landsberg
  unsure (1)..(955): unsure at all n locations
tctcaaaaatacaaattcttgatagaatagataaaccacacacttattttacttacatctatcaataatacttacagaatttaagcatttcctatacattgtttcttaatagacaatggtagtaactaacctgtagagagcagttttaggatctgaaaccaactcatcagcaagagttgcttttctattcttctttgtcaatctcccataaaactcttcagctggttcaattactgtaccaatctgtttttttttttacaacaaaagtttgtgttaagacagaaaccgaaagagacggttattctctttgatctagttctgaaacttgcctggaaatatttttcagctagtttagaccgtgacacagatttcttgtagtgtagagcaggatccattacagttctcaactacaataaagatacaattagaataatgtaaggactatggaacctaaaacaacaacaaaagcaaaagaatctattaccttaagcaactgaagatctcttttcaactcaggagtcattgttggagcaggcatatcaaacctatccacagtttgaagaaatacaatttaatcacaagccggatccaactaatccgagtagaggagataaagaagagttaccagttagaaccagtagtgtctttgagttgttttctaatcatcttgttaatcttccttggatcattaggtggaagacaaagaccatcaacaagctctgacttagaactctcagctgttttgcttctggttgaaccagttttctagtctaaggataagcctggaagctttggttcccatttaagaccgatcagtggttgtttagtctctgccattattgtaaattgcctttgttctctgtgacccggaaaaaaaaacactgaaacttgtcgagaactcgaagaatcangcattcgagaactctacataaaaagtagaaagtgaagagtagta

SEQ ID NO: 20071 - DNA, 480 bp, Arabidopsis thaliana landsberg
  unsure (1)..(480): unsure at all n locations
ctggtggccgtgccacccggtgtgaaacccgaagagagactctagctgcttgatagtgaagacttattctttaccatggatagtgaaggtcaggtggggaagtccgaagtctctttctgtcttactcgacctcttagagaatatctccacctgcaaagaggacagaaactggatncgtttcttccttgaacgcgttgtaggcacggttcatcagcacgaacagactggtctgttcgtagagatactcgatatcatcagagataccaagctccaccattgtctcaggatgcgggtacctcgttccgacgaaattgtgtcgcctgaagagctcacagtactcttccatcgagacatcgttggtctccctcttccaaggcttagattcagcacttctcaccgagttgtagtcgatgaggttagttggctccctaacgctttgctttcctctaacgatgtcgtctcggaaccgagatactattg

SEQ ID NO: 20072 - DNA, 552 bp, Arabidopsis thaliana landsberg
gctggttccggcttttgttttgtaaaactccgcgcaccgagacgatctccctccgatccataaaaggaggatggtttggagctcgtcggaagatgccgaaccgagttcgagtcaccagggtgatgcggcttcatcatctaatacgcccgaagagccgagccctttcatggctcaagaagatacttccgctgatatagctcgggaactcgatcttcgagaggatcctgagccatctcttgttcgaaggcctcatgtcccaactgctaacgaggctggaacatcgaattggcgagatgtgtccgaacccttgtttccccaggtgaaggttgaggataatctttacttcgagccctacgagaccgagggcatcttccaggcggccgagcggattgcgatgcgcaaagctgacaaggcgaaaaagaaaaggaaaaagaaacgggttatgcccaacccgcctggttcgactctttgcaaagagcagcccctttgggatctggcttcttggtttgacttcagcgaagatgtcatcttacgccttgcgaccccgagcga

SEQ ID NO: 20073 - DNA, 385 bp, Arabidopsis thaliana landsberg
gaagagggatggatgaggcatacaagctgcatagtgattggtatcatcatggagattagaagtcagtggataaagttcaaagcaaactaaatcagtggaatgaggaagtttttgaattatataaagctgctgaattttttgatgaagagctggcttgtagaggcgacttaggtgagaatctgggggccgactcaagcgagattgtcgagcgtgaagaccaccgagaagatgagttccttgcactgatatcggacgctgatataccactatacccaatctgaccaaaccacacaacgctatcggctatggtgactttgctcaggattaagacacatcttgactggtctgacaagagcttcagcgagctgctgcagacattgcccag

SEQ ID NO: 20074 - DNA, 1121 bp, Arabidopsis thaliana landsberg
cggtatcacgataattagatatctaactaagcccatttatattagttatcttttagataaaatattaatatcttattagttaaatcaaaagaataaacgattaaatacattaaaaccaaatttcattaaaatagcaaaaccatgttttcagctgaaattgaaaacccgcattttccgctaacatcgcaaagccatattttcatccaaaatccgcgatttgattttccgattttgcaatttaagtgtgtacaaccaaaaaagaatttctggggtaagagtataagttctgttctaaagtcattatttttttattcttagcttgtttattttgttttcaaaattattcttttattttgatttgggaccaatgacctatttgataaaacactcgttgattttctgtcttttgtttttattaagagtggaagtgaattcaaaaaaccctttaaaacttttctaatctcagatagacatccttcattgcatctaccaccgctttttgcaccattctctttatcatttaaggtaacaacagctctgaatcctcctccatctgttctgcttgtcgaacattttgttgaggctcttccatttgttcaacagctgagagaggtacctctttagatcttcgagaatcgacatccaccttatacagatcctccctttagatctttttctgttgtacatcaagacgctcgttccaagcatcggcaactaggtccactgaatctccatcttcaactcgctccataagatcaagtaaaagatcttcttcacctgctgatggttgtaagatacttatgatattctgcaaaaaacaacaaggaacaagtcaatcttatttgttaccttagtatccttacacttgatcatctcaacaagttcttaccttagttgttccaagtactctatttacttcgtcaagtgaaaaacctgtcattccgttgtctttaaatttccttttgcacatcagcggacaactatcattagcgcctattacacgttcttgatactgtttggatagctcaagaatgcattcaaatgccaacacctatatcaacacaatttacagaatcacaatctttattcatccaaaacagagaacttattaaaaagatata

SEQ ID NO: 20075 - DNA, 944 bp, Arabidopsis thaliana landsberg
tgaaaattaaattccattagagatgttaatttctttttaatattaaactaggttagtacctatgcttcatgcttttattagtttataaattttgctattctagcaaaattacttaatcaaagaaaaaaacacaccacttaactgaagttacactggacacttactaccacttagctgacacaagaggtcaaaggtatggacaaaagcaaaccaaggcaaaactaaaccaaagcaggagagaggtaatcggaatcttttatgtgatcatataatgagtctgaaccttcccactatcatgcttactcatcccgtcccatgttgtttgttgggcgatgcatctgaaccctcttagatttgttggataaaactgcttcggcttgctcgatcaaccctctcctcaagccttatgaaaccggctaatctcggtcttttgattagaagattatctgcgctttgaacttgtaatcttatttgccgattgcattatgcttactcctctaatgaaaacccttccctgaagccttactcctgtaagagatatcctctttgaaacttgaacccggagaaaagtctcacaccgcagcctcctctttggagcatttcaacgaaagcttctatgcgtcgatcgcacgagcttactatgatcacaagttgatccgagatttctcgaagctagtcttcaagcttgaatctctgcaggtcccaatagatctaccatcccttgcaaccttcttgaagttatgcattttggaagactcatgaaatctttatctctatctttcatgtaatgctttaattttactttgtatgaacccacctctcttgaggagttagattaatgaaagcttcctttgcccaaaaaaaaaaagcgattatgatgggtctttatattttttatgtacaatggtggaatcttaaattgggtctctttaaaaaaaaaatgt

SEQ ID NO: 20076 - DNA, 786 bp, Arabidopsis thaliana landsberg
ttaatccaaataaaaatctaaggtttgaagtgatataagtcattcgtaaattttatcatagacactgatatatataaataaaaacataacatttaaaaggaactaacactagatttaactaagtatagtgtcaacttttttttagttttatgtatgggagatagagtcgaactctagagtcgatcactcgtgattaaacatcttccgaaggtggcattgttatttgtgctagaggatctgaacatgtataatgtcaactcttgatgatattcgttttagtgttatttgcattaattataaaatgtaagatattatgagctaatttggatattcatcatctaccaagtgtcgttagttcaattggtaaaaatcttaggcgaagtttagaggtcgccggttcgagtgacgcttggaacgaaactaatattacatgctatggtttcgggtctgggggaattacgagttttggcccaaaaactccaaaaaaaacaaaaacaaaaacaaaaaaaagattcatcatcaaattgacacacttgtataaaagattttaaaatgaaaggaaaaaagcttttttttaggaataattgtgagatttggtttaacaagagatgtcgatggaaaacacacacacaacacggctttgttttctgattatgggattgggctacgtggccgaacagcggccacttgactagtcaaaataatttgatacgaaaaaatatataatttgaccatgttatgagacatgccagatctcaaccgggcgggttatatccacaataccgg

SEQ ID NO: 20077 - DNA, 897 bp, Arabidopsis thaliana landsberg
  unsure (1)..(897): unsure at all n locations
ctttgactctagactctagatgttcggtttctgttatatccattcggttatctgtttttcggttctaaagtttagtatccattcgattattttgaaagcttggttcggtttcggtttttttggttttaaaatttagtattcattcggttattttgctttaaatattttcggatatttcggttatttttggatattttgggatattttttagatattttcaagtatttgtactattttatatatattctcaagtattttaattattaagtctagaaataactaatatttttgaaaatatatttatatttcggttatttcggttatagaatttagtatccattcgattagtttccaatttttgattcgattcggttattattatttcgattttagttcgatacattcggttcaatttatttgcccaaacatagttgcatcttgcatgtccactgccagcactttcggttatggaatacaacagagaattaaaacctcatatatatttaaataatctataatagcttgaataggttgtattatacgattctcttgtaaataatcaaaaatacgatgaagaaaaaacacaaaagttaccaatacaacgtgttcactttacgtaatctgattcctttcttctccaaacacttcaagaactatttacttttcttctttcatacataactcctacactccaaaactttcatgctcaaaatctccatagttntttttgccaggaaatcatcaaagcacaatgacaccagaccgaacaactatcccgatccgcaccagtcccgtaccccgagcccaacccatgaagcgtcaccattccgctagctactacgctcaccgtgtcagagaaagcctctaaacccgatatcgaattcatctgcgcaatgt

SEQ ID NO: 20078 - DNA, 640 bp, Arabidopsis thaliana landsberg
ttttttcttgtcagggttgtgctgattaattaaacatccaaataccatcaaaagatccacaaaatatatcattaaaatgaaaaaaaaaaaacattgaactagctagtagctagtaagatataagtaaggtaggagaattgggactgacccgaggcctttggagccaccggtaacaagagcggtcatgccttcaaggctccatctagatttgtctctcgagttttctcctgctttagccatttctggatatcagtttctgcagtgaagagcatagtcttatagagaatatcatatgaccaagtctagttgtcacgtttgaccatgagaattttacgagaatgtttaacaccaaaaaagtaataattttttttttacgtgattgttttgaactttgtctcatctcaaattccacattatgatgattttttatgaccaagtctttttgtgttcaatgtagaaaaccttaaatattactacatgaacattcttttagctagttggcctaattagtcaacccatatttcactgtcagtttcctaaattatttctaccatctacagactaccggtaaaagagaccagatcgtttattttcattacatttctttgtttgggtctaataagtggtcattattataaca

SEQ ID NO: 20079 - DNA, 441 bp, Arabidopsis thaliana landsberg
cttgttaccggaatacctcatatggaaattgaaagagaaacccgtgcttcatgcttaattgggaaacaagctgatgagaagtttccctcaagctacatcataccgtgctacacataatttggagttaatacacggagatctctgcggccccatcacaccttctacaagtgctcggaacagataaatttttatgttgattaacaatcactctcgctatatgtgttctattctcttgaaagaaaaaagtgaagcattcgagaaattcaagaggtttaaggcaagagttgaacaagagagcagaacaaccatcaaaacgtttagaacagatagaggtggagaattttgtctctcatgagttcaacacattttgtgaagaaaatggcataacaagacattttacggcaccatacttttcacaacaaaatggagtggtagagcgaa

SEQ ID NO: 20080 - DNA, 607 bp, Arabidopsis thaliana landsberg
  unsure (1)..(607): unsure at all n locations
gatccttgttttatatcatctttatatatatttggtatcaaagtttcttattcggattttttaatgtcttttttgtttttttttgtttttttttctttgatactaaatttacaaaaagatatatgaaactaaccgtattttggatccagctttggtcgttagtgattccaaatattcaacttgttttcatattatttttatatatatttggtatcaaagttttttattcggatttttaaagttttttgttttgttttgtttgatattaaatttacaaaaagatatatgaaactaaccggattttggatccaacttcggtcgttagcgattctaaacattcaacttgttttcatatcatcgttatgtagatttttgtaaccaagttttttatttggattttttaaaagtttttttggttttttttcttttgtttgtttgatactaaatttacataatgatatataaaaactaaccggattttggatccaacctcggttgttagcgattccaaacattcaacttgttttaaatcatctntatgtagatttagtaaccaagtttttattcagatttttaaagaattttaaagttttttaaatttttcttt

SEQ ID NO: 20081 - DNA, 1354 bp, Arabidopsis thaliana landsberg
tgtcatttccttccgattgaaggtacacttgtgattcaataatatttttatttatgctcaataataaatgattgttcatgttttcttttatattatttatattttatcaccttcgtcattgtctgatgagttcatgaaggtatgtccttcataaccttcgtccgcaagtcattacatcctaagggaaataatgcttcggaggacgaaggacattaacgattaacattttctatgttgccttgttcttaactcttgaagtgcttgagaacaagtccccaacattggcgcccacctccggtgaactcacttccatttcttgagcttttcaacatcttcggcaagcatcaccttcgtcatgccgccgaagaaggcttcagcaccaggggctggcacgctgcagccgctggaccccaatcaagacgtcctttctcttagagaggcacgaagccagaagaggaaagctaccagtccaacacctccggaggatgatttagatcaggagattcaaaatctggaaatccttcagcagcaggttcaacgcaagaaggagaagatggccaggctagctgaactgcagaggcagatagacgaagcctctgaagaagttcgtcatcttgctcaggatgagcaacaccgaagcctcagcatcaagaccttcatcaggagggctttcccaacgaagatgactggtatgacaatttccatcatgggaattttgtttttgatgatgcttctcccctgtccgctgagctgcaggctacaccttggcccccgtcctacaagccgcctcagctccccatatttgatggccactcagacccgaagcagtttttgatgagctacgaagcaacagtatcttcgtatggtggcaatgctgcagtcatggccaaatcttttgttatggctgtcaggagtgttgctcaaacctggtattcctcccttcgaccaggaacgatcacttcatggcaaaagctgaaggacttgttgttaaccagcttccaagggtttcagacgaagccggtcactgctcaagctctattccagtgcacccaggatcacgaagaataccttcaggcgtacgtccggaggttcttgcgtttgagggcacaggcaccaacagtgcccaatgaaattgtcattgaggccatgatcaaggggcttcggccaggaccttcagctcagtacttcgctaggaagcctcctcaaactttggagaagctgctccagaagatggacgaatatattcgggccgataatgattttcgtcaacagaagggaggaggctttcaggttttctgaacatgaccaggggcttcggaggaagattctatccgaggcacgttaggtcaatcca

SEQ ID NO: 20082 - DNA, 706 bp, Arabidopsis thaliana landsberg
aagatggattggataagcctgtcgaggaaataacatctagttatggattctaggacagccacattccgagatggaaagatagagttggtgaattcagaattccaaattttgagattgttttgaagcttcaagagttttcagtgacatggatcttaatgttttgattgagatcgatgaagaaagtgcagaagctgcggctgctactgctctagcttgcacagttgcacttgtgtggctgcagcgctattatgccgcctcctcccatagattttgtggcagattatccatttcttttcttgattagagaagacaaacttgaactgttttgttcgttggccaaatctttgatctttcggtatcttcttctacttaggatggcattaaccggatcagagtttggaattttaagatttagttcttcatgtaattcttcaattttttttaactctatcttttcatttttttttatcttaatataatcaaagtaatcaaattttgtttcaacttttaatttactctcattgggattctagttttatttttccattttgaaaataaaataaaatatttttatcttttttttaatagggcgtatccaaataagagatttatccaaattaaaccattccggattcttttatttcacatttcaacttcatcagagaaatattcattttaataagttcataatcttatggctcttaat

SEQ ID NO: 20083 - DNA, 2968 bp, Arabidopsis thaliana landsberg
gacagatctggcacttaaattctgcatcaacacaataccaatgacagtttagatggattcgggaataaagctatataaagaaagagctggatatatgtggttcatatttatagttagcagaaccaatttggaaacattgacttcctgattccaaaagttctcaggcagtctagaaatatatacataatgtactagaactgattcggcaaaaagggaaaaaaacaataaacgttctaacagcagaggtagagaatttggacacactgacctttcaggagtcttgccctcatggtattcgagtgtgccgcctttatggctttcctcaaatttttcctctcctcaggagccaaaacattcactgactttttacttgcaggtggcggcttcatccatttccaacaaccctcaccttcctggtcaagtaggcctatattatcagtgggtccagataaacaactgttaaaactgagatgtcttggaacttacatcaaaagcccatgatggagtttcttttctctcaaacaggtcggtggccatattaagctctggaatattagggataggtcttggacgatctccatgctcatcactgcaatatatcacatcattaacttaaatggtaactatatatggagaaaaggcacacgattttaagaagtagaccaaacctggtccatggagctggctcattgtcacatctaacgaacaggtaacgacagaccttaaaagaaccctatggaaaccagaagagtgtacgtcaggaacaaaaaagaactgtgaaaagaagcaaaataggaatgttagctatatattcaaacctgtactccaactttggaccagcatttctctatccggtagaccccatcataccttagtagtccttccgcaggggcatatggagaacgcttctccttccaagacctgaagattgaagagtcatgataactatctactcagagtatatcgatgaataaagataatctattcttattcacataaagttgaagagagtctgcagaaagtgagaaagatataggaactttgcacaaagaaatgctaaccttacaactcggacaggatagcccattttgcaactaagtcttagagcttcattcatgtttttaaacgcctggtcagaagactgtatcttgttaactcttttgtttccactgagatcccttccaccactgcaacacacattcacacatattaagataaattggaaaaaggctacttcaataagaagggaaacaggtgacaaatataatgtaaaaaatcaaaccttcctgtgtagagaaaccattcaccatgatcctcatcatcgtcataacctccagagagggccacagactgagctccaaccgctgcttgcccggcaatgccagcaacatgcgggaaatgaactccccactgcctacactcttgcctgtcctcccaagattctccaaccaaaacaccttggtttctagtgacatcattcgcagctggtatgggaccaaaatgatcacgaggtattgtcacaaaaaacttaccgctagcagcattagctttcccagtttttactgcccgctcggtagtaaatgctttgtcaggacggtcttggttgcggataatatgatgaaccttggccgcagttgcctcaccagaacatttggtaacatttgctaaacgaatagcagaaactagagctaagttgatgcgaggatttttcgccacatgtctcggaattttgcttcggcatatcatacaagttagcttcccttgacctactgcccatttctcgaaacatttcaaacagaaattgtgcccacacggtgtctacaaaacacacaagtacaatacatccattagtctgctaatcaacattatcaagtatacaaataaactagcgattctactacacttatgtgtactaatcacaagattcaacaaggcattaacactcatcacaagcataagactggttgcaaataagcattagtgtgctacttcaaatattaatcatccttatcaacaacaaacacataaattagccattctagtagggtttatatgtattgatcacaagattcaacaagacattaacacagatcacaagcataaattcgcgattctactactattattaacaataatcacaagatctaacacgtcattaacacaagtcacaagcataaattagcgatttagtagggcttatgtgtattgatcacaagatctaacaagatattaacacaagtcacaagcataaattagcgagtgaaaacgaaccgtgacaggtctctctggcaattgaatgcaaatagaacaaaagatttctaacttcttcttttcttcatcatcgacaccatcgtcaccaccaccactcatcagtctctgcctctttttggctttctcagcttcggtcaaagtcacatcagcctgaatcgcacggatcgcagcaacgagaactgaaccggaagattcaggtccggagattccggtacccggagcggcggagggaacaacaacgccggagcaatcgggacactcccagtctccagtggaagaagcgagtgattcaggaaggagacacgacacgtgccatggagtgacgcacgtgccacacgtgagagtctcttctgacggaggattcacctggcaccgcatacatacaccgtctccgtcgcaaggaagctgagtttgaatcgccattgttgaaacgagtgagtgagagagagatttagagagaaaatggtgttgtcgagatttgtgagagatttaggctaaataagtagaggaaggcgaaaagtgaagaggcgggttttgaaattttgggaagacgaattcaaaatgatttgtaaaaatccttcaaaaaaagaaaaaaatctcacaaagagataagaatttgtggattgtgacaaatggcaactaatatatttaattttccttaaaagctgcttttgggtcaacattttcttattacttc

SEQ ID NO: 20084 - DNA, 1513 bp, Arabidopsis thaliana landsberg
ttggctccatgtagattccttgaaaaaattttgacataaattaaagtttggttagttgctaaatatataatattgcatacttggaatctaatttaattgcttaacttacctccttaggtaccttaagacccccatctacagcaatggttatgcctacatgaccttcatccaccttcttggtgatatccatactagttgcattttctagttcgataaatctactttttaatggtaaaccctttatctcaatcaccttacagagtatatataaaacataatgatcatgcatcaacacttacattggtatataaacatactttttcggtaggtgtggtatatataaacatacatacaaacaaataaaaaaattaagtatatgtctaaatatttacctattttcttccatcaaattttttttattccattgagaaatacatggtcaattgctttcttcatggaaccaacatccatatcctctacatccaactttttctgagcattatctctggtttcaatgtcacttttttcagcattactagctataacaattgtgttgataatcaatatgacgattcatgttgtaggtaaactccaatattttccggaaactagagcccaacaaaataaaattgaatcttagtaatcattcttaactaaataactttttacttgattatagtgtgtctagattttaaagttcaaatactcgattaaagtttaccacaacagttaaacaatcgtttggaattggatatgtaaagttaatatatattgattttttgtaattcatcaacatctttaatatttagtttgataactatgttataaaatgtgcatttattatattttttccattcaatttttgttccattagttagaccatttgtttaatatgtccatccatccatccccaccaatcacatttttcatttttctattgtagctcgatttactctcatcatttaagtgtaaatagttgacgtaaattaaaaagttgaaaaagttaaatgatcattcatctcatattttactatttgagatgaataagttgaaaaattgatgcaattcattcaactacaaaaactagaaaaatgaataaattctttttgtttttttaactgttcaagcccatttatttactatttcatagaaaaataagtgaaatgttgttaaaattctctctttttttttgtaactgaattttttcaatcatttaacgtcatgaaaccatttgcatactttggatgcagatagttgactttaaataagaaactaaaagggttgaatgaccattaatcttactttttatcatttgagttgaataagttagaaaatagattcaaccaaattttgaaaaataaacaagttattatgaaaaattgcttagagaaataagttgatgttcaattatttttgtgtaattcacaaatttccaagcatttggcatgtattttttaaaaacgaaaaccccgatcgtgggaccgcttaaataagaaataccttttacttaaaa

SEQ ID NO: 20085 - DNA, 831 bp, Arabidopsis thaliana landsberg
cgagacttactcgtctacaatgaaaccgccactagatcatcaccagtaccgtctcatgacgcctcgctccactcttcaacagcagctgaagttagctcccccaccgctgatttcaaaacgtggtatgatgaaaaaaaataatagcaataattacaaggtattaataccattgtcctgtatgaaaaaaataaaaaaaaataattacaaggtataattacgtgttctcaaagcaggtaatatcctccttgatgatgatataaatgcaaaaatcggcgactttggaatggcgagaattttcggaatggacaaacggaagccaatactaggagaatagttggaacaatagtaagttttccatatatttcctaaaggcacattacatccatgcttctatcaacttaagctttgagttttgtcacagtggctatatgtctcccgagtatgcaatgtatggccaattctccatgaaatcagatgtgtatagctacggggtcttggttctcgaaattataagtgtgacaaagaacaacaatgtctatcaaatggatggtactagtgctggcaatttggttacatatgtgagtatatatagagcaaatatatagagccttaattattattttactttatttaatagtgaccaaagttctaagtactaaaattttcactagacatgagtaatgggtcaccgttagagctagtggatccatcctttcgtgataactatcgaataagtgaagtttagacccgcccccatatcgctttactatgtgttcaaaaagaaaatgaagatcgtccaaccatgtcagctatagtccagatgctcaggac

SEQ ID NO: 20086 - DNA, 870 bp, Arabidopsis thaliana landsberg
ctttctctatatctaaatcaccagtgccaatatgaaccaccctaaggctcctctctatctagggttccagaaaccaccaaactccgcccaaaacaagaaaccacaaaaggttatgtgaagaaaccctaacccagaaagagattgttgcgtctcgtagattcaatcgctcaatcgaaacaaattggcctaaccaacccacaaggagagaaaaacgacaagctttgtgaaacgcgatagaaggaagaaacgatggattataagaagaaggaaacttgtagaagaaataattggaatcagataggaagatgatgaaattagggtttttgcgagtagaggcgagaaattgttttttgttaatttggttttctctcttctgtgtcaattttttgggaacgaaacgtatgaagaaacaatgagcctttttttcctctccttagaacaataatcaaaatttttatttaatttctgaatttgtttttgatttgtttaatctaatttgaatagttaaagtttaggtacaatataggcccaactaatgatcctagatgggcccataaacttttttcggtattgtttgttcattcgatgtgttagttcttacattgtaaagaggatgagttttgaccattttaatgtaagtaacgaaccattttaatgtaagtaacgaattttatacttaaattttataccttccgtatacttaaagaaggtcactgatgtttaaggtcctgttcttttgcctgtcgctggcgactgaaaccagcgacagcgatcaaaagttgttcgtttgcttgtcgctggttcagcgatcaaaaatagcgacagtcgacagggaccagcgaccgtaatttttggtcgttaagattttta

SEQ ID NO: 20087 - DNA, 666 bp, Arabidopsis thaliana landsberg
cggtagttgccctttagtctcacgtcgcagccagcttcagtagcttgtcccaagcttatgatgttgcttttgagatcgggtatgtaataaacatttgctagtgtctttggttctccatttttggtcaaaaacaatatcgatcctttgcctcatatgtcaattcgtgaatcatctccgaacttaacctttccagtgaccatctcatcgagtttgcagaaccaatcacgattcccagtcatatgattactagcaccattgtctaaataccaagctttgtcagattatgcttcataaatctctggattcatgtttccctcgttgagatacactacttcatgcatcataagagactccgcttcatcatcatcatcgtcttcagcctcttgttgcctttcttggagcttgattaacttcaatagtcggtctggacaattagaggcataatttatcacagcgataacaagtaaccttagagtgatctctctgcttataaccaactcttcctctgcctctaccccgaccacggatttttcctcttcctctgcctccttcttgagacatgtaatgagaacccaaatctgcatacattaatttaccttggtcttctagtgaatcatcgtcattccatactttgtcctcataggtctttattctccctaatatgtc

SEQ ID NO: 20088 - DNA, 306 bp, Arabidopsis thaliana landsberg
aactttgactgatctacttgtcaatctctaaggcttcatggcctcaagcgctttgcatagttgctcgatttgtgtcgcaaccttaggttgatgcatatttatgttgtttctgcatgtgcttttgtctttgtgtagtttatggcaggagaaacgtaaaacgcacctaacattccaaacctcagtccaatgatccaatccttatatgcgaaagatcaacgcacataagcacaacaatagcttagcggtctgcgccataccgaaaaggccgaaacttcctcaaaaataaaaaacgacgggcccaatcta

SEQ ID NO: 20089 - DNA, 1337 bp, Arabidopsis thaliana landsberg
aaaacaaaaaccaaacaaaaacagtccaacatgatgatcctatattgttaatgaaaatcaaagtgaaaccttgtgaattgatttgtgaaagttagagagtgatcactccttctcaactttgaccttcacagccacgtccttcttttcatactgaacgctgctcctcaaacttggtactccagtctccacgccttttcctttctcatccctatcctttccgctaggatctcctagttgtgcgtgttgagaagtgagtctgaattctaggtttgacttttccaagtcaatgggttcaacatatatcttcttagaggtggaggattcatcagcaataccatggaagaaggagtaccggagtctgatgtgtcgtggctattctctaacatgagttgtgcctttgggaaagaaatcgttcgcatatcagtttccaattgtcaatacacggccaactaaattttagataatgtttgatttagctaacctgatcagctgacacaatagaggctttattcaccatatcagcaaaatatggtatgtgttctttttcaaccttgcaaagaactttccaaactttgtagtcttcctttccatctgatatatgttcgtttcaaccttcaccaagaagagaaaggtcgttccaattaagtttttaactggccgtagcaaattctcagggtccacaacctaagaaggaaaaatgtatattacaatcagtgtaggatctattcagtttacaccgcttctgtttgtgttaataaacatagagaacctacctcatcgagtgatccattgagaatagatgcgactgactcgccaatgagttcagagcaaactgaatcaaataagagaaaccttgcctctccaagattgtccataacattagcgtaaagcataaacttgtaacacaaatttacacaaaatgagtaatgaaatagtttaaccaaaatgagtaatgaaatagtttaactaaaaccatggattgattgttattaccttgggacgacattagtgaccacagttttgcaagtggcacaccaaaaccttggtttttccccttgttattcacaccatggactccagcatcgatatggtttactttcttgttgcaagtcttacaactaatgtaatatcatgcccaatccgtgtcaattacatacacattacacaaaaccctaaactttccaatctaaaaaaagctatcacgttttttgaattatattaaagagatgacatgaagggttaaatagaattgcttatttgatagaggtgatataaatcatacctcaattgaacacttcaagtcagaaattgatttccttagataatcaaggaaatca

SEQ ID NO: 20090 - DNA, 1249 bp, Arabidopsis thaliana landsberg
ttctagttctttattgatttagattgtcattggaacaatcttcaacctcttttgtctattttggatgatgtattttcggaagtcgattctctttaggatgttattgtttaggttgattgtttgatttggagtcttagctatcctcatgatttggagttttatctatttcgatttgtcattttccttaccaattaacacaacacataacatatatatagatagattcacattacaaaacaaagacaaaacgacgtcgttttcttaacgggtgtgggattagtcgggtaaatcataatagcggtacaataaacgcggatttgtggttaatctcggtttaatgaccggttcaattggaaacgtatttttaaggatgaatctgaaagtacatgttgcaattttaagaattatcaaagtttatggtgaacatttcagaagcagaaagtatgggggaaaagctgagaatgcaattagtttatggctataaaatcagacaatccaagaatttttttaggatccttctctcatgattgcactgggtccaacaattatttgagccggttctgagaccaaactaaaatccaaattagttaacgcttaatttaccatttactattatggataaatatctattgcacactatttttttttgtactagtacatacttagcataaaattaaatactattataaattaaccgttggtcaactttttctttattgcattctccgaaaatttcataccatcatatataaactttataccaacatatcaatgtttgctccatatatactgtagtccgacatttttttactaaaatattgatatgcgcattgtttaatctgtattatatgtacctattcaaagtcataatataatttactttataatacaaatgtatatatcctagtttctcaactatgcttgtgaatgatgagtggaatttagggtgggtcagccgcattgtgggtgaactgtgatttttcaccattcatctagtaaaaggtggtacaaaaagacagtccaattaactaataaaaaaagaaaattcatacttactgtataagcggatcagattttgtgaagaaaaaagattgaaataccttgaacagtaaaactacatgtggtatagagtgtttggggtgcttttatattatttttttattaataaaaatgataatcagtaacaaaaataacgtgatataccaactttcttttttacctacttaagtgttaggaattctaatataaa

SEQ ID NO: 20091 - DNA, 939 bp, Arabidopsis thaliana landsberg
agctcatttcaccatacgtccgaaaccataccgacaccctcctcaaagaaatgtaattgtttgagcttgctgattcagaaaccaaaggaataggattcatggcctgcgcttctagcacagctaacaacttataataatcagaaagctcatcttgcaacgccgcacaaaacgcttgcccaacagttcccacatcctcagctggaaccgatccatactctcagttataaaagtcttaacctttctaaacaaccaaccaagctcagagagcatacgaaccataatcctcgtagctcgaggcaccttaacagactcctgcacggcataaccgtcgatttcactgttaaatttgacatatttcccatcaattccttggctagcatacaaaacatccctcactagaacctcctccgtcacttcattctcttccttaaccaaaatggcatactctctaaacgcaatatccctcaaattctcaggatctttactaaccaacaaaaccccattactccaatccttcttcttagcctctccacggctcaaaaccccattaccagtatcaccaatccccaaattaggtaacaaaaccgaggaatcaagaccatttatagccgatttacgatcttcagaaacaattttaagcaaataaacaagagcccatttgttattgacactgccaggtccagttttggaagcgaacttagtgtagagatcggcaaaagcgagtgcgtcggaggacttaccctgagtagcgagacggcgtttgagagactcagcgatagcggtggcgtcagggaggacggaaggagtaagacgactagagaggatacgaaaagcgtaacgaagggttttgaggaaggcgggagaattgggatcgagattaggggtttgagggttttgtgagacgagacgaagaacaagctcttgtactagatcagcagc

SEQ ID NO: 20092 - DNA, 2524 bp, Arabidopsis thaliana landsberg
aaaactcaaactcaagatgcagacgtgatgcatcaacactatggactatgcatcgcctcttggttaaaaaatcaagcgaataaatattaaattagaatatcttacctgcttcttaaattctataactgtctgacataaattactttccttttgttagataccgcttgattcaaacagtcatgctgagactctaaaatggttggcatttggtccacgtagttgcgcacagtcatataaaggatatatagtaaatgggcagcggtttcacacaatatcagtagatagaaaaagtcagaatagtggtgtttactatgaggctacagcaatctgcaggtctagcctaaggatacttcacaagtggtggatttggtatcatactatggggcagtaacatacattatcttgttggactacaatgtgttttatgtccctttattcaggtgtcaatgggcatttaagggtaatggagtgaaggaagaagatggtttcacgctcgttaacctgaatcatagtcaagttagtttttcaagagacccgtacatattagcctctctagcaaagcaagtgttttactctagggaagacgagtcataaagctggcatgttgctatgagaggtccttctagaagattcagtctgaaagagtttgacgctggcgatgcagacatcttttgcctgcaaatattgacatgagtgttgacttagatgaaacagaaaatgaaagaactgattgtgaagggatatatgtgtggttcttcttcattttcatgataagttagtctttgtttgaatagatgtcgcattttcatgattagttagactttgtttgaatagatgtctgatagggaattgtttgtttcacatatattatatgttgctcagcttattgtctgatagttgattgtttctttgtatattttatatatattaacattttttctgtttctttttcaaggtgatttgaaatggaatctggaaagaaaaagagaggaagaagacttaaacagaaagatgatgaggtagaatatgagggtacccgtgaacctgaagtagttgaaccaaaaacatcaccccaagtacaagctgatcctcaactagaactcaatgaagaagaggttgaaggtgaagtgacgcctaacgctaagaaaggtctgattgatgaggagcctgaaggtgagatagaattcattgaagattatgaaaatgttgagagaaagagtaagagacagcgaggaccaacacccatgaaagacattgccaaggatccaaataccagagtacatgtagagttcaatagcatgggagaaccttatggtaaagggtctgtttagatggcatcttacgttggagcattggtacgggaacatgtccctatcacatatgatcgttggacaaagataactgaagaaatcaggacacttctctggaaatctgtccaggtgacttcctaatgcaaaacctcaagatgtttaagttataaaatctgtaggtcttcaatttaccttgttattttttgttttggtggactatgattgcaggcaaggtttgagatagatgaagagtaccagaagactgcagtgcttaagcagatgggatgtctgtggaggtcatgaaaatccatctagtcacagatattagaaaagccaatactctccaagagaggatgaagctgcgacctaagaatgtttctccatttgagtggcgaaaactagtcaaaacaaaaaatagcaaatagtttaaggtaatcctttgtacttaactaagtttatttcatatataatatcttacattaaaacatttctttgttaggttgtaagtgatagctataaggaaagaaggagcaaacagattcctcacaccactagccgcaaaggaatggttagattagcagaagatatggtaattataccacaattatgttgtatcttttttctcattgactactttagaatacttatcaactgtaattttttttctctctgaatcagaaaaaggagagttcaaatccaagtgaagtgtcacggctaaatgtctggatcaagtcacgtaccagaaagcatggtacaccagtgaatacacatgcggctgcaaagattgtgagttacaaagttacaaaatattgtactattttttcatgctagaattagatcataacatgtgaatccgtatcttgtacttgacagagagaggcagctgagattgtcaaaagtgataagccttcatctacttgttttgaagcccaaaattaacatagctagctactttgacctgagggcaatgggtcgaaacataaataagaccaaattagcatgtttccaaataaagaacaattgtatggctgaaatggaagcaaagcatgctcatctcgaattgaaggtcaatgagttacaagatgtgattgacaaaatgaagaaccaggttagacacttctgtaattatactttaacccgatcccttataactctagatttgactttaaaataaaaatgtaacagagacaagagcttatgccacacccactgtt

SEQ ID NO: 20093 - DNA, 469 bp, Arabidopsis thaliana landsberg
  unsure (1)..(469): unsure at all n locations
tatgatctctgcaagttctctttactgatgtgcgtccatcccatttctgtctgtgcacaggtgttcctaagtatgctcgtgaaagctacatttttagatttgccattgtnnnnnnnnnnnnnnnnnnnnnnnnnnnnnngggtaatcgttacattctattattactatttgcacatgtatgtatcacagaataggaatttgtgctcaattcttttcagttcacatttctaaggtatcttgtgtgtctgtgcattaataggggttctgtgttgaggcaagaacattacggattcttttccagaactttgatatgtaaggctaaatacttctctttgtccttgtgatgtactcaatgatgcatgtttaggaaactcccgtctcgttctttcttcacactgcagttgaaaaagtttctaaatcttattggtttttcttgtgattctactaacttttactatggacttttggt

SEQ ID NO: 20094 - DNA, 341 bp, Arabidopsis thaliana landsberg
attaacaactttatttccgcctaccaactttacttgcttaattatactaacattttacataatctcggtcatatttgacttactaacttaaatattctctaactacaaaatatgtgaaatattccaatcatattccgtatttgcaaacataatatttcaaatattattaacgtgatgaacacattattcacaaatattaaactcggcaatatatgattgcattaatcaatttagattctattatccatatctaactaatctaactaaccttattctctaattcatttattcggaatatgccttttttatagtcctttattgagcttctaataaacaatata

SEQ ID NO: 20095 - DNA, 705 bp, Arabidopsis thaliana landsberg
cttgcaaattcgatatggaatttttttcttaagataataatcagaatttgacgtttttgtggaatcaacaggatacaccattccagcaggttggatagtgatgattataccttcagtggttcattttgatcctgaaatctatgaaaacccttttgagtttaatccatggagatgggaggtattgtacatttaatttagtcttcatatcattttggtcaactttacggaaaaaaagatccatttttaaattcgaaaaattttcataccaaacgtatttctccatttttctagctagatccaataattgcaaaaatatatgcatattgatattaactctggtgtacatatatgtatgacagttgcaagcactagcttggctgttttatacacttgaccgcctctcattatatatagatatattgatattaaatctgttgtgtaggggaaagagttgcgggctggatctaaaacgttcatggtgtttggaaccggacttagacaatgcgctggtgcagagtttgctaggcttcagatttcagtatttcttcatcatcttgttaccacttataatttctcgttgcaccaagactgcgaggtgcttcgtgtaccagctgctcacctccataatggcatatctccaaacatctccaagtgtcccaaagaatgacattaaacaaagaagccgccttatcgaaccataccatc

SEQ ID NO: 20096 - DNA, 1100 bp, Arabidopsis thaliana landsberg
cgcggggggttcattttttttgtgtggttttatggtgataatgtattttaaacatgtttttaatattttaaataaaagtacgtatttagcaattacggcaatatattttgatgtagaatcacacctttcgctacaccaaaggagaaactctttttttttgtatttaagtgatttgcacttttaagcgtatgtgtttattgatgaaggtgacgacatacgacatacatattgtgaacttaacacaatgcaatatctgaaaatatggcgatttcaattatgaaggtgtatatttttaaattgtatgcctgatacaaatactaattataatattacgtaataatctatagtatagtctgttttgtaaaaagtctaatgcttagctgggtcttatatttcataaatgttctacaaatttgttatctctattattaatttagaatgaagattttattttagtattgagtatagtgttttggatttttagaacaatgtttgagttgaatgttgtattttaattttggttatatattaaaattatgagtgttaagtgttaagattttattttaattaaatgatccgaactgtataaatagatttctagtatattatgaattaaaaagagtgagttggaaatatagtcacttttcaaaatataattgtgaatgtagtaacttcactattcaaaattagagaacgaggtcactttacttttgtgtaataagtcgacgtctaatagtagctcgtgtgggacaagggaatttttttggaaattaccacagagggctgttaatttcagcatctctctccatttttttattatatatattttttcttattttcttatttctttttgataactcctccaatctaataattgaaatacttatcaatataaatttattttctaaactaattcatatacataaaagtctatatatttttctctataatttgatatgcattttgttaataatttttaatatattacagacactttattagtagttggtacaattaattatgcgtacccacttttattttgtacgctgcacaaactgaacaaagtatataattgtaaagagagtagtcacttttcgctg

SEQ ID NO: 20097 - DNA, 562 bp, Arabidopsis thaliana landsberg
cagaggatcttgaattccaccgacaacccaagtttcctttgcgatatcattagagagtttgtaatagtttgtgttgtaattcatcactaccaaattcatcttcttctcttcctccattaatgatctcagatccttcttatttcccactctgtccttctcttcttcttcttcttctccgctctgttctactctgttatcaccttcctctgtttcttctttcttctcctctaaccaattcttaaccggtgcagatctacaccgcatcagcaacaacgcgttaggcggcggaaccgcagtttctacatccgaaaaaacgttttcctttccgtcgacacaatcttcattgttttgcttttcgtgtaaaaccataagccatttagagaaaactgtccctgaactttcatcttcatcttcttcttcatcctcctcttcctcttcctcgtcttcttcttcatcatcagagattatatctacaggaggaaacgcaccgaaacatcgaaaatcgaagtcgcggaggcaagtcaagaaccccatgacatctctcttaatcccaaagaaatta

SEQ ID NO: 20098 - DNA, 1862 bp, Arabidopsis thaliana landsberg
agaaagtatttaaatcagtcattttataaacaatcacaaggaaactatagcatttccttcgattctgacaattttttctggattgataaatgataatgattctatttgaggattccgcctggtcattggattagagatcgtttgaggttgacaagcttagtttggatttcaaaatgcatccccaaagtttgcttttgttacatggctgatggtgaaaaataggcttgcaacaggggaccgaatgagtaaatggaaacaaaatgtagactcgagcggtgtgttttgcaaaattcacatagagaccagagaccatttattttcccaatgtcccttttcaagcaaggtttgggaggagcttacacaagggattctcttaaatgacttctcggcaaaatggcaagatattatgaggctcgttgcaggaaaagacttagacataatgagcggttcattctcaagtatgtcctatagaacacaattcactccatatggcaagaaagaaatgatagaagacacgacgaactgtcttcgacaacggagaggattgttaagttgatagacaagaacactagaaatcgtttgagcacaatgagaaaagaaggagatgagaagtttgcaggtggtcttcaaatatagtttgcttcaaaattaaactacatttaaaggtctcttgtaaagtgataaaaaaaagtttaatttacacgttatttgtttttgaaattagattttttaaaacaaaatcaaagagttgaggatcgcactggccatcttctccaaaaagttgtattacattcttcacgttactacatattcaatatctcttttatacatgtagttagtactagtatctaacaacgaatcagaatattcaaaataatcgtgttatactactagttaatgctgaaaaacatttatctctcattttttgcacgtgtattgaaagatttatttcggtaaatctttagcttcatggtagtgaagaaaagaaatataagttttcatctgagttgttcaatacatattttgtaagcggcttcctcattttttaataagaactaccacatctggtagcagtagaaacgaaactcatgatatccatatgaatgataaatacatgttttttgtttatgttttttgggctcttcaaatcaagtagatagttttttggggactaccgcgtagacattgtttaaatacgtgaaatcaacatcacatatagcttataagtgccttctaacacccgtacattaaaattaacatccattgttatcttttattattattatttggtattagaaaagaaatgctgagaacaaaccttgtaataatatataaggcgaataattttcaaatatatatttcttttttgatatatgaaaaaataataattattttaccatcttgtatattcaaatatcataattagtctatattcaaaggtaaatattttatagtaggacaattatattttctgacaacaaaaagagatatccttccttatacggctattttgaagccctaaaaatttgaaaaccttttcactttttttgtttgtctccctcttcttcatcttatctctctctctaatcttttggctatcctcatcatcggaaatgacgcctgccacccagttcccatgcgaccccgaaggtgtatgcatgcgatgcaaatcgatgcctccgccggaggaatctctcacttgcggcacgtgcgtcacgccttggcacgtgtcctgccttttgtccccgcacgaaaccctaagtgctactttacagtggctttgtcctgattgctccggtgaaaccaatcctcttcctgtttccggtgttgcggctggatatggatctgttggttcagatctt

SEQ ID NO: 20099 - DNA, 1130 bp, Arabidopsis thaliana landsberg
tagtgatttttaactctttttacttttgtttattgactcttctatataaatgttcgtaaagcaaacaattagcttctaaaacttataaaggctatatgtattactaaaaaaaaattcaacaaatgcattgtgttcacaatcactttcaaatgaatctttttattctacatatatatgacaaatgacatttaatacctacataaagcttaacaaattacattaaaaaaaaacccgcgacttggcgctgtttcgccctagtctcgttaataacacatgaacttaaagatattttaagaaatattttcaattagtatataaggaatatacaaaattaaagataatttagccttatcaaacaagaatgttaaacatattacctatatttcttatatactattaagtataaattaagacatacaataaatttattagaaatgtttaaaacttaaatggtatgatatcttaatatatatataactcgtaaatgcatgttatatagaatgtgtaagattaaacttttcttttaaaaaatattgattactatatagaatttaaatatcgtaaaaaaaaatctttatttctcacacatgcctacttagactggtcttatctaataaaattattaaccgtctgcagatttagtgttatgagatatttaaaagatttatgaaaacaatcccaagttctgtaacaatgtaagactaaattcaattatggctcgatgtttcaaggtgttatgcattctaattgaagaatgagatgatattgaatccaaatgaaacttttcaaatgttattactatacaattgtttttttttattataatatgtagcataagctgaatttttttaaaataagttaattttttttatctattttaaaaataaattaaaattctatttttggtgtatacactattcttgaacattgttcgtttggaatcggagagtaaaatggaatgaatttttggcatgcaattggtttcggcgtctaaaacttctttgcaacaagccgaacctaaattaccgaatttttccgtgaaaatggattgagaaatctctgcagtgtattcatgaatatccatcacggatgaccaacatttacttatatcaagtaatcttggcatacca

SEQ ID NO: 20100 - DNA, 583 bp, Arabidopsis thaliana landsberg
atggcgttgtgtgctggtggtgagttgtttgataggattatagctcggggtcattactctgagagagctgctgttggtatcattaggtctattgtgagtgttgttcagatttgtcatttgaagggtgtgattcatcgagatctcaagcctgagaatttcttgttctcgagtaaggaggagaatgcaatgcttaaagtaaccgatttcgggttgtccgcgttcatcgaagaaggttagctatagaatctatagattgtcttgcagaagtctctttagtatctaaattcatcttacgagttcattgaatcgtgatgtcatatactctagaacaagaatagaatgttatgcataaaggaatccgatttaaaatgttctgtgttcattgaagaaagtgagctcgacattgatcatattcttagtgtattgatgatatttgcgtgcgtttgataggttttggatccaagtatgtttattaatgtttggattctataggattgtctaacacaaatctcttttagtatcaagtacttgttttcgagttacgatgagacttgtatgctcaaagcaatcgatttttggggtt

SEQ ID NO: 20101 - DNA, 523 bp, Arabidopsis thaliana landsberg
tctctcttcttcctctctctcgttcttctctcttcttccttccaacatcggcgacgacaactgaaatttttgttcccattatctgctgccgccgacgacaacaacaacaaccaaggtatgatatagggtttctaaagggtttctagccgccgtaattagtagatctagggtttcttacgggtttttagccgccgtaattagtagatctagggtttcttacgggtttttagccgccgtaattagaagatctagggtttcttacgggtttctctgttttgtagatgccctatagttactctcaaccatccacgtccgaagctagttggaatagtggagaggcgaatgccgatgcaaattgggaggttccagaaaaatgtttttgtggtaagcctgtaaaacttgaagtgtgcaaaactggttacaggcaaggcgacagagtctacaaatgcccaatgcttaaagtaagttattgtgttttcatttcattggaacaacaaagtacaagtgaattatatttatgaag

SEQ ID NO: 20102 - DNA, 585 bp, Arabidopsis thaliana landsberg
  unsure (1)..(585): unsure at all n locations
tcttctttttcctcatgatcatatacacacttaccaaaatccatggcaaattgttatgctccacgaaatacatgactcaacttcttcgcatcattttgctaaatatgtctaacacataatctatgttttgtatcagggaatacatttactattgtattcggcattgctgcacattggtctgtaaaaattgtttttgtttgttttccagaaattgctccaagaatagtctcgaaaaaccacttatatgactcactggtttcatcatataagagagcagcaccaannnnnnnnnnnnnnnnnnnnnnnnnnnnnnnnnnnnnnnnnnnnnnnnnnnnnnnnnattcattggtcttataagttgtgtcaaagcaaatgacatctccaaaaagattgtaatcacttatagaccgatcatctacccaaaatatattagtgatcatatcatcctcatcaagttgcattgaataaaaaaaacgaattaccctctttttctgaaagtattccaaaacagctccaacatttctctttttcatttttgccattttttttcccgatatgtaattttgataatctttctaaaaaaaa

SEQ ID NO: 20103 - DNA, 2132 bp, Arabidopsis thaliana landsberg
taggaattataaaaggagtttcaacggattcgcagcccggcttccggattcagaaagagagatactagctagtaagtgaactattaaatggaagaaattttttaaaatacttatcaaatctcaaagtacatttcttcgctctatgaaataattaattaactctatgtattgtgattgttttgctatttgttaggtatggacgaagttgtgtctgtgtttcctagcaagaatctaaatctccaaacaacaacgtcatggaatttcatgggcctcaaggaaggcaaacgtacaaagcgaaaccctctcatagagagcgatacaatcatcggtgtcattgacagtggaatctaccctgaatcggacagcttcagcggcaaaggctttggtcctcctcctaaaaaatggaaaggtgtttgcaaaggcggcacaaacttcacttgcaacaagtataaaacccttcaaagttataatactggtgtaaggatttgtcattttgtagttgaaatgaatgtgaacgatctgtttgttgtatatcagcaagcttattggagcacggtactacacacccaaactagaggggtttcctgagtccgcaagggacaacacgggacatggctcgcacacagcatccatagcggctggaaacgctgtgaagcatgtgagcttttacgggctcggtaatggaactgtgagaggtggcgttccagctgcaagaatagcggtttataaagcctgtagcgagatggggtgtaccactgaatctgtactatcggcgttcgatgatgcgatagcagacggtgttgacctcatcagcatctctctcggggcaaacttagtccgcacgtacgaaacggacccgatagcgattggggcttttcacgctatggtcaaaggtattctcactgtgcagtcagctggtaacggtggtccgaatccgggctcagtcatgagtgtagcaccatggatcttaactgttgcagcaagcaacaccaaccgtgggtttgtcaccaaagttgttctcggaaatggcaagacatttgtcgtaagtatcaagtaacactcccatttctgtcatatagtaatctttctctctttagttaccaatgaatcctctgttccttttccataacaggggaagtcagtgaatgcttacgaaatgaaaggaaaggattaccctctagtgtacggaaaatctgccgcttcctctgcttgcgacgcagaatccgcagggtaacttcctccctaccaaataaaacttaattttaacggtgacctagattgtttttttttttaaatcaaatttctaatgtaatgagatcaattattcttcaggctttgtgagctatcgtgtgtagacaaatcccgtgtgaagggaaagatcttagtgtgtggtggtccgggtggtttgaagatagttgaatcagttggagctgttggactcatttatagaacccctaaaccagacgtagccttcattcaccctttacctgccgctggtttactaacagaagactttgagtctcttgtctcttaccttgagtccactgagtaaattaacaatcatcttctctatgctttatacatcagctttagatttatccatctttattctgaaatagatttgtgtttgtcttctcagctctccacaagcgattgttctaaaaactgaagcaatctttaatcggacatctcctgttattgcttccttctcttctcgcggtccaaacaccattgcggttgatattctcaaggtaattatacaaaacaattttcatattgattctgtttataatttatttggtctgagagacagtggtggatgaattgcagccagatataacagcaccgggagtggagattcttgctgcatattcacctgctggtgaaccgtctcaagatgacaccagacatgtgaagtactctgttctttccggaacttcaatgtcttgtccgcacgttgcaggagtggctgcttatgtcaaaacgttcaaccctaaatggtctccttccatgattcaatctgccatcatgacaaccggtaagcgaaaaactatatccaatatttacaatacataacccacaagtaacctttgtcgctctgttcttatttggtttcttaacgaatggttgca

SEQ ID NO: 20104 - DNA, 453 bp, Arabidopsis thaliana landsberg
cgagacaaggttatatgttaatcctattttgagactattctatatttaaaaaaactccagaggggtttatttttctctcgttttgatgaaatcaatatgttaccacttgttatgttaggtgtttaccttgctatgtacttcgattgcaggcagtagggaaatgcactctctgcttaagcacccgtcagcacccaacggccactccttgtggtcatgtgttttgttggtaataaaccttcctctaccgtaattgcttattttgtcctgggcctgatctggaacgagttaacacctacaaaccttgataagtttcagaatccagagaatttcaatatcttgatgaccattggttgaaactgcttttgataagatgaactttgtatcgaacatttacttgaactacaaaacctaagatccatatgttgacaccggaacattgtgctcattttgaaa

SEQ ID NO: 20105 - DNA, 976 bp, Arabidopsis thaliana landsberg
ttgggtgtttatgctactctgtattatgttggtgtataatgcagcatcctctatgctcctggaaagaacagatggagacacagcctgccaagttaggaagaggaaggaagcaataagtctcaagatttgttttccgtttgtcttggtatcaagattttgatccatttttgtttgatattttgagatggtagggttgtcaagattcgttctaaagcttacgacttttttttacactttgatcgattaatcacttttggattagcctaaacccaaaagctaacctttttaacttggattttgaaagttggccaactccttatagcttgattagtaagaagactaaagatagtctttgaaaagagaaaaacacctggtcaattatgatggagacagagaagaaaaacgagatgattttcttaaccgatgatctatcagcaaatatcatatcgagattaccgcaaagaatcatcaccacttccaaactagtttgcaagcaatggaaatcactcgctgattctccgtattccagccaaagtaccatcaaaactcgcattcatgactgtcatgtacacacactcacaagaagaggtcgtgggttactatgcacgcaagatttggggacttccacaaaataaattaagtatatttagaaatgtaagaattgtgggacccactggtaggggcggttggggcgatacaatacgattcgagaataatatcagaccttagaacttaagctttagttgacaccctacatacaaatacattttgtgtcacaacgttagtgcaaaatataatattaaatctggtatctatcttatacattttgaacacaagaaaaagcacgtaggaacatccattgattgttatatgaagcaatatggtatttcatggggaaaaagcttaagaagagatcaaaatcctggcatttgattcaaggaagagtcttaattaatcaaagaactaatgacgagag

SEQ ID NO: 20106 - DNA, 1669 bp, Arabidopsis thaliana landsberg
acatggagcaactgaataagacagacaaagtaactgatcaaaacaaataggggttgctctctgatagaatcattacgtcaaggtcaaacactaaagacaatatataccatacttgacaaaacaacaaaaactagccacctctaaagaattttcttgatatgtaaaagattcgacttttagtgctggaatcatcaatcctgccataaacaaaggttccttgtatgcttcattaatatcggttgcccaaaattgactgaatcggttaaatcgaagagcagttgtaagtttctcactatggaatatcaagaggcctgaacgtttagaaattcggtttggttccattcggatacgtttttgcacaactgtactgttttgttcaacatttttggaagggtttctttttatttttattttttctaagacacaaaatctcacttctaagttctaaataccaaaaacttttatatatgaggaaaatgctaagtcacttcttttggaaattgagtttaccaatgaagaaggcaaatagagatgctaagagaatggggaaggcaataagaacaacagctacaagagccaaagagtcatatctgtagccaaaataatcttccaagaaatctgaaactttcttcttttctccaaatgctaatatctctttctccatatctccatactgcgatgtgagcaatccgttcaaaacccatgacgtcgggctcaagtaatacatccaaatccaccacctcggaatgttctgcatcatcaacaacaaaaactctcaaaatctcatatcttgatgctgtttctaactctttttctttctttcacataataagaatcgaacttcacaaacttggtgaagagaggtaagagaggacttacaggttttggcatgacataaccagcaaagagattgacgattgcgtaaaatgaagagcggagagtaaaagcaatgtgaacgtttggggtcaccacaactaaaagcatgccgaaatagttgaagataagcaaggagcagaaaattgagtagaagctccaaaacactttgtagaccgaccagtgatagccaaccataggatatacgattatcacatatacaatagactggaacaatgagtatggaatttcaaccaacacctgcaaacttaagccttaaagtcaaaaccaatggctgagttgttaattttcgttccttaatggtttgattgagaaaaagttttaacctgagcaagggaatacgcccatgagttgtacatacgggaaaatctttcgcggtagaagacatttcgttcggttgcaacgcaaaatatcactgttgagcaattgtttattccagagaatagaaccaccgtaaacattgagccaaagacgttgaatagatcttgctgattgtttctgcaaagaagagaggtaaaaaagtttaaatagctaaaccttttaagatcaaggaaatcacgcggttcaaagccgactcaaataagatgggggaagacacgaacatttccttagctttttgcaagaaaagaatgccacagagcatacaagtaaaacacatgaaaatgatgcgagtgagattgtaggaagggtttctccaataagagagatgttgtttccagaggcatgctttgaattgttcccaactcgtttgagcataacgtgatgacaaggttat

SEQ ID NO: 20107 - DNA, 381 bp, Arabidopsis thaliana landsberg
catttgcttgaagaagtatcataagaacttttgtgtgttgtagctttaacatatggatatcgtttccatgtgttttaggggttgaagcttgagctttgcacttcagatagagtcgggttactctcggatgtgactcgaatcttccgcgaaaacagtctcacagtaacaagagctgaagtgaaaacaaaaggagacaaagctcttaacacattctacgtgagggacgcttctggctaccaagttgataccaagaccatagaatccattagacaagtcatcggtcagacgatacttcaagtgaaaggcggaaacacagacgcgaaaccgagtcctcaagattcaccaacagggtttcttttcggggttttcaagtcgagatct

SEQ ID NO: 20108 - DNA, 959 bp, Arabidopsis thaliana landsberg
cgtttagaagtaaaacgtctaagttgatagatttgaaaaaataatttcatatattccatgtgacattcctttccagctttcactatccctaaacaacaatcccttgaagcacttttgttctgaataatttcagccaacacttcttctatacatctgtctgggacgtccatctttttactgcagtttagaagatattttttttgtttctttgaatatgtacgaccaacattatcgttataatcgtccgctgtcggtgaccttgcaatcatcgcattaaactcatcgtctgaaatgaggagtgacttgtcattatcgccttctttggccaaagttagatgagaaaacgatagcaaaaccatgatcgaagaaaataggatgaacatggttttattctccattttaaactattttgatcttttattcttaattgggttctttgtttatgttttaccaatgaggatttctgtgtgtatttatagtgtcgaatgttcattaacgttattatttagtaactctgtaatagtgaaaataacatttttctttagttatctctcaccaacaatattttattagttatcacataatttacatcttttgacggtttacaccggttaataaatattattcgtttaatacatttcaatttatgactatgaaataagttgaataaaaaatcttgagcatatcatagatagaaaaattaggatttaagtccctctatatgttcatttcaagcttcattgtagtacatttactgtttgtattcaaatgaatttgcaaagaaaataaagaaaacaaaatacaaaagttatgaagtaagttattcaaataactaccaaacttattttatgaaacccattgcttacagtaaacactaaatatgcaccgaaggtccatacttaactatttatgaacaagtcatgatcttccaaaaatagggtataaaagcttttactttt

SEQ ID NO: 20109 - DNA, 1084 bp, Arabidopsis thaliana landsberg
gcaggtcgactctagaggatccccggtaatacatgtatttgcattttcacaaaaagaagaatattttaagtttaaaaataattaaaacatacatttttcacgaaaaaacagaaaataaactatagtgcattgaaaaatcttaattaactaaagtgtcttttttaaagacatcataatttgtaaacatcaaaattaatatttttaattactttcaagttatatattaataattatagataaattttatacataatttgtccttttttgtacatttctcatattttatatgacttttttttctctctgaactgacttttttcctatgaagaaggttcatctatctttttttccaagacaattggtaatacatgcatttgcattttcacaaaaacaaatacttaatattttaagtttttttaatagtaaaacatactgttttcacaaaaaaaaaattgtgtgcataacttttaatcaactatgtctttctaaacacatcatactttgtaaacatcaaaattactattattaattattttgagcgatatattaataattataaagaagttttagtatataatttaatataaatattattttatattgaaaattaaaaccgaatatataatccacacatcgcgtggacaacttctagattacttttcgtagcaatatatgacttataaactagctttgattatttttaatgctaattactagatttgtgtttacatttaaattgttttcatatagtttactttctataatataattttgtaaaagtataaaatgcaaacgcataaggaaagctatattttcattcgcatttatgatattactttaattagtaaattactaattaatttattaaaaaacagatattaaacgtaactataagagcagtataaaaatgatccctataattctttctattattatctaagctgcaacttatcaaaataaatccatctaacaattaatcccctttctcttcatgcgtaccagtgtacggcccctagttttggaaaggacagatcatcgtatgtgttggttttatttctcaaagtttggtatagagtttaaacta

SEQ ID NO: 20110 - DNA, 503 bp, Arabidopsis thaliana landsberg
aacaaaagaaataaaagaatatttttatggtgtccataccagcttgtaatttttaataaacaaattgcaagaataataataattgacgaaaatgcaaaatacaaaaactattattttgcaaaaaataaaaaattatacctgagttgcagagtcgtctttcttctcgctccagtgagagcttctggtaaaaaaagaaaagaaaagaaaaagaacaacatcaatggcgtcccaaaaacattccacaaaccccaaacttttcaagtaaatctgaggaaaaaaaaacatctcaataaccagaagagagagagagagaaaaaaagaaagaaactcaaatttctcaagtaaatccaagagagagaaagagagaaggaaaaagatctatcttttttcctctgagagagagcaaaaatgggggaagtgataccaaaacatatcaaagatgtttggatcgggtggaacataagagcagcagtcattctaagtcttacccttcaagccattct

SEQ ID NO: 20111 - DNA, 482 bp, Arabidopsis thaliana landsberg
cctccgacactgaatgcgatgctgcaagtatctccacaatattttgaatgttgaagtacacatgtagctggtttgaataaatataagaaatattgcctacaaattaagaagtatcaacaaaatcatgttcaataacacaagaaccacaacccataaaatgatacttgttgttactgcataccttataggatcaccgtcgatgttgacttctcgttgagtctctagcaatgaatgagatgctgcagccgtctccatgttgtcctgaatgttgaagtacccaaaaagctggtcagaaaaaatataagaaatatttcctacaaattatgaagtaaccacaaaatcttgtccaataacacaagaaccgcaacccataaaatgatacttgttgttattgtacaccttcaaaggatcacgttcgatgttgacttctggttgagtctgtaacaatgaatgagatgctgcattgccctatggagaattgc

SEQ ID NO: 20112 - DNA, 675 bp, Arabidopsis thaliana landsberg
  unsure (1)..(675): unsure at all n locations
aattcttatttgcttacctttaaataccatgttatttttgactgagttttgcggattaacatataggatgttaaagtttacaaatatatcataaattaaaacacacaaataccctttcttgatttttttttccttcttcaaattcaaaaatatgaatagcattataacaaataattttgtaaaaaaataaattttaaaaaatgtaataatgtttatttccttagcttcattttcaatattcttctttcccttgtttaattataattaattggatttttgaaatataataaattttttgaaatacacctataaaagcaatttatttttgctgcataatttttttgaatgaaaaatgtataattagtctacattatttcaaaagtttgtgcaataatatattatggatttatttttaaaaatatccggttgaaagaaagaaaaaagaaaactcaaaatatttcgaaattagtatgtacaatttattgtttagatatttctaaatgtaaggcataatgataattaacttaaattaattatttttagtataatttatagtaaaaataaatctttatatttcaaaatactaaacccaaaattctaaaatngaattatttatgtatcacaattataatatttatcatgtatcagcaatttatgattttaaattttaatata

SEQ ID NO: 20113 - DNA, 1258 bp, Arabidopsis thaliana landsberg
cttcgagccaagatctggaccactcgttcgatctgtggctgccttccaacaaccggatccagtttaccctgccatagaaagagaaaaaccaaattttagtagaaaccttcaagcattaacatgacactctcttcaaaatgagtacacatttttagtacctcctctgctagtttagttaagttagtcccatactcttcaagtgttggcattttgctgtttccgctgcttcccccaccaacgcttgctgtgacttcattgttttccccgaccatacgtataacctaaaaatgatatatgtatctcaaaatgttataacgaaatggtttactaagacataacattaaccttagaatccagagttggtgcatttacctgtgtccgtatattactaggatctgcacccaaattctccaagacacgagctgccacaccctccccttcacgaagtagaccaagcaaaaggtgctctgaaccaatgtagttatgccctagatttcgaaatagcaaaacatttcccaaatggagaagaattagttagcttcatcagtcaagaaagcttatgtattgcacaacacataacaagctccaaggctaaatattcataatagaaatagacccataccaagttgtcgagcttcctctagtgacaactccagcacccgctttgcgcgaggagtaaatggaatctccactgccacgaatccactgcctctcccaattatcttttctacttccacgcgtgaatctttaagattgatccccatggatttaagaaccttggcggcaatcccagtcccttctccaattagacccaacagtatttgctcagtcccaacaaagttatggccaagtcttcgagctttctcttgagacagcattatgaccttaattgctttctcggtaaaacgctcaaacattgattagggtatgcatcggctagctttttatttccgggctgagattgaaagggtaaacttcaaaaggagaggccttgccattaaatccagtgcactgggagcccttaagttccctaaccctgagaaccttggaattctcgaaacaggtttcatattctaaacaggttaaaaagtttaagctattaaatgattgatcaagtataaaggatcttttttctaaattggatataatatttaactggatttttcaagtgattagtatcaaatatacaaatgctaacatttatagttacgtaatgggaaaaatgtcggaaaatgcgcaaactttaaattgagacgaa

SEQ ID NO: 20114 - DNA, 1873 bp, Arabidopsis thaliana landsberg
gaacaaaaaaaaatcatcctagaaaagaaaacaccaatggaaagaataagaacaacaccaaaaattgaattgatttctgttgggaaaaataaaaaaggcgagagagatagagacagaggccgagtgaaaagaagaatcgtctggccagtcccttttttgtaaagagaaagccaaaaaatccttgtaaaaaacagaaataatttttgtttttttttctaattcaaaatatatgaatattactagtatattcccatccgaacctattaattactagaaaaaccatggttcgtttccgaaccaaactacccgaaccacctttactctttatttgaaaatcaaataaaagaaaccctaatatttccagggatttcccaattcgaagagaaattttttgacttcttctctttaataaccgttttcgattttttgacttcttctccttagtaaccgtttcaaccgcaacattccctatttctttaaatttaatcgatcgttcttcttgctttcaccagtatttccgttctatttccgattcgaaatcagtcatgccgcctaagacgcgtggaggaggtcaagggaaaagaaaggagatagaagcgccggtgccagcgaagacagagaaagttaaggcgccggctgagaaagtgaaggagaaggtgccggcgaaaaaagcgaaggttcaggcgccggcgaagaaagagaaggttcaggcgtcggcgaagaaagagaaggttcaggcgccggcgaagaaagcgaaggttcaggcgccggcgaagtcgactgcgacggcacaaacgactgcgacggcgatggcaacgacagcggctccaacgacagcggctccagcgacatctgctccaacgacggagagcccgatgcttgatgattctacgttttatgatgctctgaagcatattccggctgaagaaactcaagagaatatgcaaactgatgaggtggaagatgaaaatgaaaaagaagaaggaagtgaagaagaagaatcagggagtagtagccaaaccttgggctccgattccgattcagaggagacggagacaaacaaagaactcgcgtgtgctaatcccgtggaagaggcggagagacaagatgacggcctagccgttatcgaggaggaggaggagaggagctccgcgagcgacgaggacgtcaatgtggaaaagtctgtggaggatgagggacacgaggacgagagagacgaggacgtgatagtccaagtggaaaaacccgtggaggagaggaccatagacgaggacatcgcaaatgtggtaagtattccatttcgtaataccgatctaattgggtaataatgcaattgtgaactgtggacagtactagtaacattgggaaatgctatgttgatatttaggtaatattggcggatgtggctaataccttagagtaatactacaattgtgatttatcgatagttagtactagtaactttgagaaatactacatagtaaaataggagtatctgtgtaatactgataattacggggaatacttctgagaaatacagagtaatactgtggcagtactatttacaattgagtgatatatgaatagtaggatttgtgtaatactggtaatttcgggaaatactttttggaaatacagagtaatactctggcagtactatttacaattgagtgatatatgaatgaatgtttgtttttttcaggatatggaggaagcgatggcaatgcagccacttggtatgtacttcccggcgttggagtataccaagaagatgaagttagcaactaggtgttatatctcggaggtgttgaagaccttcgctgacttggaacatcctctaacgaatgttgagaaaaattatgttatggagcat

SEQ ID NO: 20115 - DNA, 877 bp, Arabidopsis thaliana landsberg
tgaaccagtccttacggagaagcactcgagaaaccgctcgagccccttaaatatcacaatgccatcatcatttccaaaagtaaacctcatatcatagataatctcatcatgtttattgattagaatagagcgctagatgagatctaatccagaaataatccaacccaaataggtgatcaaggacaggataaataaaagactagtaaatccttaggtataaattatgtaaatgcggggagatgaattataaaatatgtaggacatagataggtcagaggacactcaccttcatcaaatagctgctcaaggtcttcaatctcgtagaactcgcaaagctggatcacttggtcgtcgaatctcgactgtcgattcctccaagctcgaaaacggatcgcagtctattcgcgacatgcagcaaatacgaacaggcacaagcaaacaaacatatatatgcataagaacattacaccatacaagataaaatgttataaaagcgagcaatataaaatagagagcgcttctacggttacgcgagaaaaagaaccatgatagacgaagctatggtcgagggattagcacgtttacgttaaacaagtactaattagaacatctaattcaacataattatattaattgatattaatcaaatgtaaattaatactactacttagttttgactaacttactattttaatagttgacaattaagcaactaacttaatgaatatgagcgattctaagcgagacgaattagcggagcgagacgaaatacgtaacgtgtggaacagaacgatcacggcgacctagcgcgcgcaccacgcatggcaagcacagacaacgtgatgacggcgaacccaacatgatagcgtgcaaacga

SEQ ID NO: 20116 - DNA, 739 bp, Arabidopsis thaliana landsberg
tgtctttgtcattttagtttcgcgaacaacttaggtccgacctgcagatgaacaatacatcatagaatgaaactttaggtgtatacagaaaaacaacactcacacacttacacatttgtcaacacaatgccagtaatcaaaatactgcccagtgcaatgtttgtggccagactcatcatcttggatcctcttgacacacgcctgaaccacccacaacaacaagatgttaaaactaagccacactaagaagccatgtgatgtgagatagataagcagcaccgaaagcaatcaactctctctctatgtcaaatgactcgtataatgcaaaacaagattatgaccagtgacagctcaagtcgtattcacctgatattcaagtagtggcttcacacattttggtttgcaagattcctcaaagtatattttctgatcaacaacatcttcttctgccctgtaattataaccatcgagtaggatggaaaatcaaaggttagataagcaaactaaggtaacgaataaaacgttcataactatgacatagcaattttgttgtcaaagtagtaggctgtttaagggatgaagctaagcttcccatttcacacacactgctcttcaagatttttttgtaaagcaagaaaacggagagagccattaagtaaatacccaacaaactgaattgaagaaaatgtgcttactactatgtgtcaagacgggaataccaatactatccggtagctta

SEQ ID NO: 20117 - DNA, 1828 bp, Arabidopsis thaliana landsberg
tatgagtctatggtactaaaattaaccaagtttaagagtagtagaaagacgagtgaaggaatcgacactacatgtcgttctaattgactgtagatagaactgtgtggcgtttcagcgttcgagaaagaaaccatttattattagtcaacaaaagccaaaaatcgaaaagcttcccaaaatccgaaagcgttcttcgaagagcacagagttcgttgacttattgaaggagatcggaagctttgagatggagaatggcgttttgccgcataggctcaagtacaacgtatttctcagcttcagaggcttcgacacccgcgaaattttctgtgagcttctctatgtcgctctcaacgcgaagcaaaagctcagggtcttccgtgacaacgagggaatgcaacgacgggatgagatcggtccaagtctcgacttagctatggatgactcagcggcttccgttatatatccactaactacgctaactcttcttggtgcctaaatgaattagctatgctctgcgattttagatcatctctgaaacgtcccgtcatacctatcttctatggagtcaatcccgaggatgtccgcaaacagagcggtgatttcgctaaggattttgaagaacacgccaaaacatttagcgaggtggagataaaacgatggaggcgagctatgaatttagtcggaaatatccctggatttgttttcacgtaggactctatatatttaatacatctctggatttgtgaatcagagtagaattgaaattttggatgtggatgcttgcgttttttgtttgaaattctgtggtggaggtttttggaacttttgcagaaaagctactgttgacgatgtcaaagctggcaaagacagaaagaaagtggatgaaatgatagggctggtggtgaaacgcgttttagctcaagtcaggaattcaccagagaatgttgcagactacactggtgggctggaatcatgtgtggaggatttgatgaagctggtcaactttaaacccacttttagtgttcagatcttgggaatttatggtatgggtggtattggcaagacgacccttgctaaatacttttataacaagatcattgccaacttcgagcatcgagcaatgatctatgacgatagagaacaatcatcaacccacgatggcttagacgatctcaaaagaactttcaaagttgctcgtgagaagaagattattgtggttttagatgatgttgatcacatagaccaggttcatgccctggttggtgaaacaagatggtatggtcaaggaacacttatagtaatcactactagagattctgagattctgagtaagctctcagtgaaccaacagtatgaggtcaagtgcttgactgagccgcaggcattgaagctctttagttatcattcactacgaaaagaagaaccaacaaagaatctgttggcgttatccaagaagattgtccagatatcaggactattgccgcttgcagttgaagtttttggatctcttttgtatgacaagaaggaggaaaaggattggcaaactcaactggataagctgaaaaagactcaaccaggcaatcttcaggatgttctggaactgagtttcaaatctttagacgatgaagaaaagaaagtattcctcgacattgcatgtctctttcttaaaatggagataaaaaaagacgaagttgtcattgtactgaaaggatgtgggttaaacgctgaggctgctctcagtgtccttagacagaaatctcttgttaagatcttggcaaacgatactctttggatgcatgatcagattagagacatgggtaggcagatg

SEQ ID NO: 20118 - DNA, 602 bp, Arabidopsis thaliana landsberg
  unsure (1)..(602): unsure at all n locations
tcaatacaatttaagtctagtttaggtttagtcctataatcctcaaattctccgcttctcttcgactctacgtcgattagaggagtctaggtcagcctgtcgagcctacacatcccctaggatctctcctccccgacagggtccctcccgggagcgagatccaggcgccgcggcgacttctgccgcccctgcgcacgcgcggaccgtccggcctatagacgcggaccgtccggccgtcagacaggaaaccctagtcctgcgccaggtcgcggaccgtccgcgcatgtgcagagagcaccgccgtcggttcttgttgagtgtttggcgcccgaaaaaggtgtcaacatggtgtttggtttaagtaataagctagtccatcatcttattatttcttactttttatttggtttgtgaaataaaataagttgatacatcaccaccccatttctcgtatttagttagtactaacacgatgaataaagtcatctgaccaaatttaagaagtggactcatcatgcactatatcatcttggatggagtgactntcgaacaaacattcctaaatattagggccagattgaacttgctgttatactatagat

SEQ ID NO: 20119 - DNA, 688 bp, Arabidopsis thaliana landsberg
atatagatatctagctagatcaaactctagaagaaaagaaaggccaggtattttctagactttactctcttcttactattgagttagtgtggttggtaaatcgatcaatgagtaatgaacagtctatgtggataggaagtggaccttatgttgtgattgataacagaaacaaggaaatttctaagtctcaggatgaccagagtgatgaaggtaatgttctggttaccttgtggactcctaattatttaaatgtatgaatgctttatgtttctgcttgatcattgttgatgcatctaggggatagcgatccagatgaggtgcaggaacctggaaatagcgattctccaaaggaaaacgatactaccaaaaggttgaaaatgacaattagaagcttggttttgtagttttttaggtcaaaagaagaagactaatatattctgatttctttgcaaatttacagcgaagcggattctgagccagatagtaaagcaccatctgctaatgtaagtccaagccaaaaatctaatctttttaaccagttgagatatctctatttctcaagttcgttgaagattaataaaatcttatttgttacttactgtaagatacttccatatagacttccttatggttcagtagcttactgatagatttctacaggggcacttagagaaagcatctgaaggag

SEQ ID NO: 20120 - DNA, 394 bp, Arabidopsis thaliana landsberg
  unsure (1)..(394): unsure at all n locations
tggcgtgccgcataattccagctggcatactgtatatcaactcaaggttttaatggaataaatgcctggatttatcaacgggagttatatttaggtgggttcatatgtttaaagttcttttttttttaatggtagggttttgaggattctcatctatatttaatcatttacttgtgtgaaaaatcgacaattcgcgaaaaccctctgctgaagaagnnnnnnnnnnnnnnnnnnnnnnnnnnngtattttccggcgacgagatttttccgataaacgacgtcatttcttcacaaggttagatcttttctattaaagatatatggtttatgtggtgtattttagttcagatctagggtttataatagtcaagatctaggctttattttagtcaag

SEQ ID NO: 20121 - DNA, 701 bp, Arabidopsis thaliana landsberg
caaattgtgtccaataccaatacaaatgtgtgtgtatataaagtacgagaaacacaaaaaccaagttaacaaacccaaagatccaaacattacaaaaaagtaaaaaataaatgaaaaatcttttagtctttatatttgtttttagtctttgcatgtttgatcatgtatcgggagccggaattaggatcgggaacgaacttaaattccaaaaactcctctggatgaggtgttattccaaagatgatgtattaggtccaaaaataataccaatcggagggcattttgtaacttattttagtgttaacatttggcgtacaacgcgttttatgtgtactttgaaacaatggcctaattacagacattatcagaattttacagcattcaagcttttcggtatggaagatcatggaggcgtatgggattggagagcaagaaaaaatggaatttatttaaagaagaaagaaggtggtaagtttattaaaaattcggttaatatgcataaagtatatgattggataaattaaaaaagaaagcaaactatctaaaaataatattatgattttaaaataaaacaaatatatatatatatatggataataaaaaacttctcaagttatattatgattagtaaaaaaaaatgtatcttgattcttgagatttttctctttcttttcttgtctaaagaatgtatcttgatctca

SEQ ID NO: 20122 - DNA, 2654 bp, Arabidopsis thaliana landsberg
  unsure (1)..(2654): unsure at all n locations
aaacctctcaatcagactcacaacagtagatttcccgctcccactttgtccaactaaagccatcgttgtaccactcgagataaacagagagaatccgcgaaatatttgctcatcgggtctcgctgggtaagtaaagtaaacatctttgagctcaatatctcccttaatgtcatccaaaactttaccatttgtactataagaatctatgttaggtcttctctcaattgtctcaaacatcttgtaagccgcggcttgtccagctgcaaatgcgcttaagcaaggcgatgtttgacctaacgacctaaggaaggaacaaaaagatatctcaaattagtttgcagggaagttaatgaaccaaagaggtattgctaatgaaaggtacttacatggatccagttaaaacagcgatgatgatattgagaacttgtcctcctgtgtagcctttatccaatatcaactttcctccataccatactgctaaagcgtagctacaaaagactacaagaaagagcgttccaagacccaatccagttgaaccaccttcaatgactcctgctttataagcagtgacaagatgtttattgtaattgcttatcgcttgtttctctcctgtaaatgatgcaacctgcaaaaatgtagatagtaagtctttgtggttttggtaattttggctaagtaaaagtgtataagtaagcctaattaccgttcttatagaaccaattgtttgctcaactacagtggcagctttggcgtaagcagtttgtccacgagaagctgttttagcaatgacgatagccagaagtgcaccagccattacaagtagaggaattgaagataacatgaccaacgttagaagccatcctcttacgaaagctatcacaaagcctcctacaaatgttgctagaagttgtatagcttttcccacctgacaaaaacgtcgtcgttttaacaaataaagtttcaaacattagaacgccatgttgacttttttttagtagcttaccttttctcccatggcatcttggattagcacagtgtcaccggacattcttccaacaacttctcctgtatttgtatcgatgtcgaaaaaggctatatcttgtcttaagattgtctttagatacaaactccttattctcgctgcttgtctctctccagaaatcatccagccagacaattctgaacattcatagacatcaaaaaagtttacactctttgttttcttgaaatcttttttcacaaagtttagatccttcgacagatccaatgaacttacggagaaaagcagctgcgaaagtaccgattccaagccatacaaacttcagagcaacctgtgtgagttaaataaaaaaaactagtaagaaagtcaaatcttgaaatgaatcccaattaagacaaaaaacattcgtttgatttactttggagactttgtctgttgtattagtctgattctctccaaaagcatcaatgagatctccgaacagtaaggtcataagagggaagccaagaccatttccaatagatccaagcgtcccgaggatcatcaagaggaaatcaaaggaatctgcaaaagcaaagagcttataaaacggcaccgttttggttttctcatgttcctcgtctttcttctctgttttcttcacttcttcttcttcttccttgtctcttttggtctcagaaacctcttctagtatatttggatctccatttaagccgctctctgaagccattagagtttcacagatacctcacgatcctaagcatttaaaagaacagaggagatatgtaataagtttctaaatctatgagctgatgagatctcaaagagagagtatatatctaaatagggaacataaaggtcaggccaagaaggaaaagaaacaaagacttttcaccaaccatgaaaacaccctaaagatctgtatattgttttttcaagaacatgtgaaaaaataacgaaacctgaagcaagatctgtcgtttacaatgaggaataaccgaagctacggcccagataagaacataaagtacagagtttccagtataaaaatgattaaagcagagaatataaaaatatatatatatacctcgaaaagcaacaagaagaaagtgattagggtttagcggcttcttggtgtcttgccgtataaacagcagttgaaaaatgtgcagagagctctctctctctctctctgcttatatatttttatataattgtaagtgaagtttggaaggactcatgtgagtttatatatgctctgtttatttcttgacgaacaagctgtgacttgtttgagagaaagagaaaatggatgccnnnnnnnnnnnnnnnnnnnnnnnnnnnnnnnnnnnnnnnnnnnnntttttgttgttgttgttagtaaagttaaattgtaaccatagcacaattggcgtagttataaaatagggaatcttgtgtatataaaatgaattatgcctttatgtttgtaatacaatataatacgtaagataacattttcaatattttatctgcccattattgtctaatgctgaccaagatgattaattatagcattaaaaaaatataaagaacgaattgatcacagcgatcgacgattagtctagctgttttgttcaactacaactctattattttacataaaagtttaata

SEQ ID NO: 20123 - DNA, 481 bp, Arabidopsis thaliana landsberg
aaggcatattcgaaggagacatgctacaatacgacaatttctttcaatggagtgataacattggatgagtattagaccaaaggataacttggctgatcttttgactaaaggtctagcgaaagagcaagtcgtattcacttcgaggggaatgggtttatagccaacacaatgagtcatcacttggtggaaaccttacctagcaacattggagatcccatggtttaggttcaagaggcaatcttgctgaggaagactcaagaaagagatacatactacttattcctatgaaattaaatgtatttccattgatgtttaaagggatgaatatttttcttaataacattaatatttttttaaaagtggaatagaatggactattcttaattaaggttacctatatgagagtggtgtcgccgttgcacctatgagaattgaaatgactgaattctatagagcttttacgaagtccggatatgttcat

SEQ ID NO: 20124 - DNA, 1535 bp, Arabidopsis thaliana landsberg
gcagtgatgagacaagtcgaagaagagtcagctgaagaaaagttgatactgatttcatgaaaagagttgcgagaagaaaagtaaagacattcacctaacgcttgcagttcagacaagtggacaacaacagagacagcgattaaaattatattttaaggtaactgaacggtacggcacgccacgtgaagattcacgtatacttgattctgcatactccacgtgtcaattgccttagaggccatagaattttgaaagcaaggcccaaggaatcaaaaatacatgtttttttcgaaatccatccaagtccaattcacacataaatattggtatggccacaattatatgattagatgtatcttaggctaaatctaaaaattaaattctgaaaaataaattaaaataaagtaaaaattaagatttgcttcttagctaaaaagtttttataaaaaaaaaaaatagccacatgtcatctttcaaaattttagtttaagtaattgttaagatacaagattaaaacccaatggattcttaaccattggggatggctttatacactatgaaaaatatgggattacaacaaatggaaggtttgattgataaacacaacttacaatagaaaaactaaattattacattccaaactactccctctgtcccataaagataaattttttaggaaaaatatttgtctcacaaagatagaagttttatatttccaatacaaattttaaaactgttttcccgttttacccttactaaataattagataaatatttattattatttttaaagtatattaaaaggttaaaattgtctttattttttaaagaaagtgaaatttctaaaaaattcatcttagtgggacgggagtatctcttaacattcaactggagtttgaagagaaacaatctaaagcgacatcaaaaccatggccatgaagaaactgctgtgcacaacgatgaatctaaagagtcgaaaacacctttcctccaaatcttgagaagtacaaccccttcaaaaaccaactttaaaatactacaatctggcaaaactggaatgcaacttatttaccgacaataaatgttggaaggaggtgttgcgactttcttttgtagttaacatgaggattcccaaaattctaagtcaacaatctacaatgaaaccgacatgtcccaattttcagataatttcaagaattccgcaatctccattgtgttatagaaatggttgtcaagtaattggaaggattggttgaaattttgattgaaaaaaaggtgtcattcaacataaaatcctaccaatacctgcaaatattaaacttctgatcttttgatggttgctaatacatgatataaaaaaacaggttcttaaaaccggatctgacatggactaattctcattgacaaaatctaagagtggagaaaaatattgatgggaagctcagaaggttgcacaatcatttcaaagattgaacaatatcataaggccagacatatatattagctacatcatcatcgcaaccaaagagaaaatg

SEQ ID NO: 20125 - DNA, 1113 bp, Arabidopsis thaliana landsberg
  unsure (1)..(1113): unsure at all n locations
atttataacaatggagatgaattgtgttgtttcattctgaagaaaacattgatgcttgagtgaaattgtagctatggagtgcatgatacagttgatacttgataatgaacatcaaaggttctgtttttagattcatttggtcctgtttcttatactgagattcttacctgcaggtgcatatctcattggctggagataaacatatgcgagttacttgggttacgaatgacaaatcgtctccttcatttgttgnnnnnnnnnnnnnnnnnnnnnnnnnctcttatcttggtcaaggagaaagcacctcctacagctatataatgtatagatcagggaagatacatcataccgtcattgggccattggaagcggatactgtttattattaccgttgtggtggagaaggacctgagttccatttgaaaacaccaccagctcagttcccgattacctttgcagtggcgggggatcttggacaaaccggttggactaagtcgactctagatcatattgatcaatgcaaatatgctgtgcatctacttccaggggatctttcgtatgcggactatatgcagcataagtgggacacgtttggggaactagttcagcctctggcaagtgtaaggccgtggatggtgacacagggaaaccatgagaaagagagtattccttttatagttgatgaatttgtgtctttcaactcgaggtggaagatgccgtatgaggaaagtgggtcaaattcaaatctttattattcctttgaggttgctggtgtccatgcgatcatgcttggctcatacacagattatgatcggtactcagatcaatacagctggttaaaggtaaggattattgcttgacatccatctgttatgtgtatctcccctttattgccacaataggtctaagtagttagtaaaatagtgcttggttgaattaatctttttccgtgagataatcttttaagatcagcagattctgttacacttattggatttaattttggtgttatctatgatatgtgtagcctgatctctcgaaggtggaccgagaaagaaaaccgtaaataatagtcctcttccatgtaccatggtataacagtaacaatgccca

SEQ ID NO: 20126 - DNA, 846 bp, Arabidopsis thaliana landsberg
cgaataaattatatgttacctactaagtgaacaagataaataaaacacacaaacttaaaaataactacgtcaatatcaacacgatattttagaaaattatataaaacttgtctacagctatgagtccacgatatcaagtaacagtaatattagcgttgactgaataaaatataagttacctagtaagagaacaagattaataagactgggaaaaaacacaaaatttaaagaatgtataatatttgtgttatcatgtaagagtacaagtaatatacaatatatgtattaatgatagaacctaatataaaacttgtctactgatatcagaccgcgatatcaagtaacactaatgttaacgacgacagaatagaatatgggttacatagtaagagggcaagattaataacagaagaaaaaacacaaactttaacgaatgtgtaaaacttgtgttaacaggtaatatatgtgctaataatcgtatgaatcaatgttagcatctacaacttgaattagtaacaactatataatagttgtgttatatgcatatttataagcaattataataatggatacatgctacggtgacttgcatgaaaatatatgataactttttacccaatagaaatcggttaataactaggttagtgggtaatgaaacatgaaaatattattataattgtccattgatattagaccgcgatatcaagtaacactaatattagcgaggacagaataaagtataagttacctagtaagaggtcaaccttcataagactcggaaaaaacacaaactttaaagaatgtaaaaaacttgtgttaacaggtttactgtactacatgtgagcg

SEQ ID NO: 20127 - DNA, 734 bp, Arabidopsis thaliana landsberg
tgagctcatcactggtcttagtgcataatcggttaggagtggctcaaatgattcgtttaatacaacgttcgatgacttgagatgaccgtgagggattgttagggttgttagctcgttgaacaagtaacctaaacccttagccactccttgtataatccttagccttgttggccaatccaatcccggttgatccacagaatgattcgctgaaacagagcatttttttagtcaaaactgataaagttacaattttaatcgaccaaaaaagttgaatgttacataccgtgaagatggcttgccaagctacgatttggcatgaactcagcgatcaagagcttctcttctctgcggtaatagtaagccacaataggcaacagattcggatgtttcaatctccctaaccgtctcatatgctcatgaaactcatctcttccaacattgttcatatgtttatacctcttcacgaccagcatctgtccgctatttatcccagttttataagaagagccaaagcttccgctcccaagaacttcagcagaggctctaagaagatcttgaaggtcaaatctttgaatgtcatcttgcaaaaacaagagtttattctgatccggtactgctcctcttctactagtgtaactcgttacagaatctgcagctttatccttgtccgtagattgatcgtagttgtatttctctgacctgtcctgacctgcggatggataagccgacaaact

SEQ ID NO: 20128 - DNA, 255 bp, Arabidopsis thaliana landsberg
aaaaatgtcataatatagtcgttactttaacgactacgtttctactctgttacgacaactcacaatagtggtaatgtaatcgtaaaataacaactatttgacgacgtattaaattttgacgactctcaatttacgactacatttattagtcgtaacggagtcgtaactacacgtttaacgactacattacgtctaatcttgtagtcgtaaaatagctgttttcttgtagtgctatcgccggatggatactattag

SEQ ID NO: 20129 - DNA, 636 bp, Arabidopsis thaliana landsberg
tgacttaggatgaccactataccctgctaacagagcaatcggcttacgtcggcgacgacttaagtcggtgcaacatgctcatgcttacttgacttagggcgaccactataccctgctaacggagcaatcggcttaagtcggcggcgacttaagtcggtgcaacatgctcacgcttacttgacttagggtgaccagtataccctgctattggagcaatcggcttaagtcggcaacggcttaagtcggtgcgacatgctcacgcttacttaacttagggtgatcactatgccctaccaatggagcgatcgacttacattggaaacgcctttagtcagcgcggcatacttgcattcacatgatttagggtgaccattgtaccctagtagcatcatgactagctaaaattaagaacaccttgaaaaaagaaaacatctcgcttgcaagtgccaggggtgtttccagcaccctgttcacggaatgatcaagttctaacataactatcacgtgcatacagaattcatattacatcttttatctaaagtgatgctaactcgataaataaagtgttttacaggaaatcactacgtcgaaacatctttgcagacagtatcttcgcaggagcacacgagaggaggg

SEQ ID NO: 20130 - DNA, 548 bp, Arabidopsis thaliana landsberg
  unsure (1)..(548): unsure at all n locations
tatattgacctatgcaatcctatggtcttgcagggtttcttacaaaatcctttaatactttcatgtacctgctacaaataaatattaagtcagactaccaaataaagcaaacaaacatgtcaactgaataccaaaagttacaaagcgaaaccttacctctcaaatggatacattcatttgaaatggataggtccacctaatcttgcttctctactaagatggacacacaagtgcaccattatatcaaaaaattatggaggaaagaatgtctcaaatatacacaaattttcaataacttcagtttccaatttagtaatctgcttcaaatcaataacccttaagcacaaatggttaaaaaaggcgcattagggtagaatggcattacgtggaccatttggnnnnnnnnnnnnnnnnnnnnnnnnnnnnnnnnnnnnnnnnnnnnacattggtaatcatgtgatttgagacccattgctttgcaatcctctaatgatatgctgtggaatgtattagacaatatatgtaacacccctacctcgtcaaagatc

SEQ ID NO: 20131 - DNA, 830 bp, Arabidopsis thaliana landsberg
  unsure (1)..(830): unsure at all n locations
agaaggaaggaaccacccagaagaggtgtttcgatgagagttgtgaaaaactatggcatgaatggtactctagatcagattttgaggttgaatcttgtcgtgaagtgccggagccagaagcgcctgtctcctattatgccaatataggctatcgtaaaccaggcaatagattaactgatgatttttgcagccatgnnnnnnnnnnnnnnnnnntgactcgagatatttcttttcgggaaaagcgaattatattaagcagagagaagtcatggagtattagtgggcaacatcaaaggaataccattgccaacgtcctccaaggcgtgaagataaggtcgaccattacactttgatatagtgactgcctaaagtctcatgtcaagcaaaaccgagacacaagttctttcacaaaaatccactagtagtacacgaaatgccttaagaagtgactcagagaacatcaatgtgacattaaccatatgattacatagctaagagagactcaagaatcagtaatctaagagtaggcgagctgaaacatggctctcgacgagacccactactatccaaccccaccctaacgtaccaaacaaaactcaggttatttctagacaatggttatgagtattttggtcctgaatcttttgagtttgtaggacgtgagagagattatgtacaatgggaactcaagaggaataagtactttaagtactattccattcctaaagaagagaagctccactattgtcttgaacaactcatgggaagcgcataacgttggtggaatcgagaaaagatagatngtggtataaggaactcaccactcaaac

SEQ ID NO: 20132 - DNA, 552 bp, Arabidopsis thaliana landsberg
atcgtcttccctagtaaagttgctgctattgtctttgtggcagcttttatgcccgacataagcaacccgcctgcttacgttttccaaaaggtacgtaaaaacgatgattattaacttcacggtgtgatctcttcaatgtgattctgatatctgcctgaaactagcagctggtcaaagacgttacacaagaggtatggatggatactgtgtttgggaaacctgatcgtcctctagagtttgctctttttggaccagagttcatggccaagtatttgtataacctatctcccctccaagtaagactccaagcctcataaaaactaaaatgggattgcttgtaaacctcagttaaacttttgttaattgttgttgtgttggtttaggattttgaattggcgaaaatgtcggtgagggtaagcccgttcatgacaaacaacctggcagggacaataagcttcagtgaggacaggtacggatccgttacacgtatatatattcgtttgcggagaggacgttgcgtgacctggggattaccacgcgtggatgatcaat

SEQ ID NO: 20133 - DNA, 2623 bp, Arabidopsis thaliana landsberg
tgttcatacgcttctgggtgaggattgagaagtttgatgatgtttttactctcttcatgctgttctctgtctgtagactctagctagggtaactgtttaatgcaaattgcttaccaaatcaacttgtctcaactctcaaggcaagaaaagcctatatagcttgcacgacttattatcttaaaagtagacttgaagcttgtacatccagatattgttctgcctttaagtagtataatactagaaaaagacagataagttgactatttgagttttaataaatgctggatgaatgtatactcatcagatgcttcttttaaaatttcagccaaagcaatagacgaatatgccagtctcagatcaaaggcagttgagtcaaatgagatggtgaacattgatcccaggctagaggcgattgttgaaagaatgcttggaaagtatgcaatgcttatacatttaatgctcttgttttcatagtgcttcaattcttcttacatggttttccttctgcagatgcatcagtgatgggaagtatcaacaagccatgggcattgcgatagaatgccggagattggataagttggaagaagctatcattaagagcgataatgttcagggaactttatcatattgcatcaatgtttctcattcctttgtcaaccgcagagagtacagacatgaggtgagactgatgttcttagacaatgtttaagtagaaaggtgttctaattctatcgactgattagaactgtatagttttgcctcatctggaagataatgtgaccatttagtttctatgttgcatcttccattaccatgcctgcaaacatgtatgctagcatcctctatgtcctaagctgtagccaaaagtcctgtttcagttttcgtgatacctatctgagatgtgtcaaggcctgaattaaaaaaatctcccttttctaggtcttttagtctaggctgtttagtttagtctttatttaaaaaaggtgatgacatacttgtctactctttcaggtgcttagtttacttgtaaaagtctaccagaagctgccctctcctgattatttgagcatttgtcaatgcctcatgtttttggatgaaccttttggtgttgcaagcatattggagaagcttcttcgctcagagaacaaggatgatgctttattggcattgcaaattgcatttgatcttgtagagaacgagcaccaggcctttctcttgagtgttagagatcgccttccagctcccaaaacacgtgctgtagaagcaactcaggctgttgaaacaactattgctcctaatgagaacccttcgggagatgttcagatggcagatgaaactccagctcagacaattgtgcatgagacggatccagttgatgctacatatgctgagaggctaacaaagattaagggaattttatctggagagacatctattcagctgacactgcagtttctttacagccacaacaagtaagttactgttgcagttttgatatcttcaagggatattttttcttctaaaaatcgcttattccaggaagtaatcatttgctccattgataattttgtctttctgtagatcggacctgctgatactgaagacaatcaaacagtctgtagagatgcggaacagtgtatgccacagtgctacaatatatgctaatgccattatgcatgctggaactccagtgaacactttccttagagagaatttggtaaattatttactttcactcaaatatttctgtatgtttgagtttaactgtctgtgtggcttagtgtatttaactttctttcatcattcttgttttttaatgccaggattggctaagcagggcaaccaattgggctaagttcagtgctaccgcgggattaggtgttattcacagaggtcacctgcaacagggtaggtcattgatggctccatacttgcctcagggaggagcaggtggtggtgggagtccttattccgaaggaggtgctttatatgctcttggccttattcatgctaaccatggcgagggaatcaagcaatttctacgtgatagcctacgcagcactaatgttgaggtgattaattaatatcttacttcaatatagtcttccgttatatcaccaaaaagatagtcttttgtttagaatgattttcattaaaaaaatatggttgcaggttattcaacacggagcttgtttaggtcttggtttggctgctcttgggacagctgatgaagacatatatgatgatatcaaaagtgtgctttacactgacagtgctgttgctggtgaagctgccggcataagcatgggtctattgttggttggaacagcaactgataaggcaagtgagatgctcgcttatgctcacgagactcagcatgagaagataataaggtaactaaagtctggaatatatttttggctatgtgtgtgggtgcatggtaatttatttcaatgttttaagtaaccaacatctggttttgtgtttaggggattggctctaggaatagctctcacagtatatggaagagaagagggagcagatactttgattgagcagatgactagagggcaggatcctatcatccgttatggtcccctccccgcattggcattggctaaca

SEQ ID NO: 20134 - DNA, 925 bp, Arabidopsis thaliana landsberg
ttatattaaatataaaaaagttattttattaattttatatattaaaaattattttttacattttaaataggatagagtatttttcaaataaaactcataaagaaagcatttttcaaatttactcaataaaactgatgtttttgtagcatacgccggaaaaatagtttgaaactcattcacttaaaccatttgaactatatcagttgaactcgttcgattgaaccagatgaactagatcagttgaactttttgaactagttgagttgaaccatttgaactagatcaattgaaccaatttcagttgtaccattttgttttgcaactatggattgatttggggagcaacacgattcaaattactacattgtactgactatcattgcaaatatctaaacaacccttttcgttttgttcacttactttcttcaatcgagacctattagatagagtagaacaaacaaggcgtttgtaaaaaaaaggagacgctgcgacggaggaaaaggcgacaggtgaaatatatgagtcgaccggcgatgatatctctaaacgaggaacatttctagagtgggcaaagtaaatattgagatatcgatctagatttcgatccaacaatatcgacggaggatgacgcagcaccggagaatcgacggctaccgaaatggatgagccggccagagatggtttttccagagtcgacagagccaattgaatttatacacaaaaaaatggtgaaaaaacaaaaaaaaaacatggtttccatcaaccagagaaaagcgtcgcaagatgaagaacaaggctatgtctgggatacacttgtagaatttgttgcacatgaaaaaattaatttgtgagttttgaatttatatttctcggatttatatgaacaattcaactagtttaacttggttcaacttattggattaga

SEQ ID NO: 20135 - DNA, 608 bp, Arabidopsis thaliana landsberg
  unsure (1)..(608): unsure at all n locations
gtctacgaatgtttttcgtttattatatattatgactattataagtaagagaatgccttttgcttagactcattattttataaaggaaacgtttacacctcttcggtttttgtttagcaagtcccggtgagatatggatgaggacgtcggcgatctgagccctattaaactttgttggtctatcctagttaagatcttaaacacatggcgagagtggttagatagagatcatcgttcggtttgtatggttttggctgatgtgcgggtatgcatggtttactaaatttcttacggatattgtaaaagtggttttgtttactgcttttttaatcaactatttatgaaatcttatgtataagatcatagaatagaggtcaagatcaaatataaagatatcgttcgatttgactccaaattcaaatatggtgattgggtagctattcatcactttcggctgaaacatgtgatagacgatagaagaaccaccaagcacgattaccagattcgttttgaagaattgactattctggacacgattccaccaaaagatactcttgaacacactcnttctgatgtagcatttcctgaggtcctgaatgatagtctag

SEQ ID NO: 20136 - DNA, 1998 bp, Arabidopsis thaliana landsberg
aaaaaagctgatctgttgatgtgctgggccttagcctgcttttgcaacgttcatgggtaaggcaagtaaaccttcctcctttgcctctctgatgctatgtgttattgagagcacctagaggggggggggggtgaataggtgatcctgtagaacttcaaaaacttaagccacaaaacttggttaattgttagcacagtaatttgccaagtggctagagaaggatatcaacacaacacaataaccaagagatatcaatcacagagatggcacagtggttatcccgtggttcggccaagaccaacgcttgcctactccacgttgtggcgtcccaacggacgagggttgcaatcaacccctctcaagcggtccaaagaccaacttgaataccacagtgttgctttgcttttcttaatcccgcttgcgaggaatctccacagcttggagcctctcgcccttacaaaagatgttcacaaagaatcacggagcaagggagggattagcaactcacacacgacacaaagatcacagcgaatacgcacacgcaaaacccagacttgagctcaagagactagcacactagaacagagctcaaatcactagaatgttgaacaagtgcgcaagaatgaagtgtgagtgatcaatgatgctcaaaggatgcttggtcttctcctccatgcgcctaggggtcccttttatagccccaaggcagctaggagccgttgagcacaaatctggaaagccattcttgccttctgtcatcgggggcaccggacagtccggtgacaccggacactgtccgtgcttgatttcgttctttaaatagagaagcggaccgttgcagacttggagccgttgggcaccggacatgtccgtgacaccggacagtccggtgcccccttctagccgttggctcggccacgtgtctcgcgcagatcgtgcggccgaccgttggcccggccgaccgttggctcaccggacagtccggtgaattatagccgtacgtcgccggtaaattcccgagagcggcgtctttgcccgagtcagcctggcgcaccggacactgtccgtcgaccaccggacagtccggtgcccagaccgaagcagccttatggctgttcacagccaactcttcttctttcttcttctctctgtttctttcacttagacaagtatattagtacacaaaaccaatgtactaaggcttagaaacatacctttacttgtgatttgcactttgttcatccatgggcatagattcacatttaagcacttgtgttggcactcaatcaccaaaatacttagaaatggcccaaatgcacatttccctttcaatctccccctttttggtgattgatgccaacacgaaccaatgcacacatgtaagtgcacgattgaactagtttgcatgggttagtgcaaaggttgcttggaattaaaccaatctttttcttctactagatatgcagaggatgctttcttttggaccacgcttgctccacgagtagtgtttttgcaaattctttggaacactccttgtagaatcctttctgcaaatagtcggaggtgtatgaataagattgaaagagacattttcagaatttgaaattttctccccctgtttaagatgcttttcctgtgactagaacaaaactccctctctcaaagaaattctcctcttagtgttcaagagggttttgatatatcatttttgaaatactactttctcccttttgaacacaataggataccaattgataaatacttttggaaaacactaagtttttgaaattgatggtggtgcggtccttttgctttgggctcatactttctccccctttggcatgaatcgccaaaaacggaatcattagagcccatagaattcctttctcctcctttgggcataaatgaatgagtgaagattataccaaagtaggagtccttttgttgtgctctctcccccaaggatagagagtggctcggagtgacgacgaaggatga

SEQ ID NO: 20137 - DNA, 1012 bp, Arabidopsis thaliana landsberg
gccacacaaacaactctaagagagctgagacagatatcacaaagagttaatatagttcaagactctttgttcccaaggcaaaaactttgcgacttaattcttctgaagtaactggaaaaaaagaagttatttacctttgttgaacaggagggataccttctttctcctcaacacgttccttaatccgatcaatagtatcggttggttcgatatcaatctcaatttccttccctgtgagagtcttcaccttaatcatagtcccacccctaagcctcaagaccaagtgaagagtcgactctttctgaatgttgtaatccgctaatgttctaccatcttcaagctgcttaccagcaaatatcaacctctgttgatcaggtggtattccctctttgtcctgttttcatcaaatcccatccattcataaaccaattagaagaagaccaaatcaaaagatcattaacaataatcttaatccaatcttcttaaactcagaaacaattaaccattctcaagcagttcacataccttcaagtgtaccataaaacataaacaaatacgaaattaagcaaacacatgaaggattaagagagcctttgtgcttactgttacacagaaatctaaataaatcttaacatcgatcgctagataatctcagatcgtaatcagaaacaagaatcggggaaagaaaacctaaaaatcaatcaaacaaagcaaaccaatctgtgtctccaacaatcaaacaaattcatagtgcaaaaccctagaatcctaagaaaagcacgaggaggtggaattgggagacggagaaagagagaaagagaaacctggattttggctttgacattgtcgatggtgtcgctgctttcaacctctagggttatggtttttccggtgagggttttgacgaagatctgcattttgtttttgttctttcttccgctgaaatggtgtttatgaatatattacggacgggaaaaagtattatatataaaaataaaattttggatatagt

SEQ ID NO: 20138 - DNA, 3444 bp, Arabidopsis thaliana landsberg
tagtgtgattaacaattaacaagccacacaaagaccttaaccaaaggttgtcaactacacaaccgttttaaatatttattcaacacacaaactatctaaccttgtcgttaccgactgtagttttgtcgcctcccatatcaatgtcgccctacaatagaagagatacggtcggaatttcgaagctaaagaaggagcaaaaactggatattttgtttgttatcagatatgtatgttaacaattaacaatctattttgtgttatcagatatcagatattttgttatcagataagtatgttaacaatcggatattttgtttgttatgagataagtatggtaacagaagagatacggtcaaaattgcgaagttaaagaagtatgttaacaattaacaatctttttggttgacaatcatttattttcgtttccaaagaaaatgtacgtgcgaagttacacgaatctaacataacaggtaagaaaaatattttcgaaataagttacaatctaacatgccgatgatcatccccctataacaaaattgaaaaccaaattaacaatattttttcacgctcggttacaaatttgttacccgataacagtgtgaataacaattaacaatccctacgaagacctagtccaacgttgtcaattacacaactgttttaaatatttattcaatagaagaactatctattccaggtcgtagttgtgtcatctcccatctcaacgacgccctacaacgcagacggaaatttgaaatcagaaaaaatacgaaccttgcggtttgaatattacatggtacgacaaatattaacaaagtaccactcatatccgctaatctgaaattccttctcatcatgaaaaagtgttccaccacccctccgatcgtccggtacatccaccaaattgtagaaagaaacaacgtcatctgcaacagatatatcttggtctccgtcaaaagaaggaagggtatattcagactgcatagatacaagttgactcgacagtggattgggggtttgatctccatcagcgatttcattgttggacttcggagtggaaactggattggaattttgttcaacattggcggcttcattgttagatttaggaccatcgtctgaagatacatcactttttgaattaccagcatcaacgactagattttccaaaaattagtcaaatacacctttgattatcctttccacttgcgcctttagtttctcatcagtcatgctagacaatggtatttctcatcaatcatgcgggacaataatatttgttgtctgacataatattaggctaaggataatataaaatttaaaatataatataggggtacaatagtatttacaaggtaagcagagaaaaggaaagagtagtataatgagtgacttaattttacaatcttcagagtacatatagtgatatacatttttggtaaaaaagtttaaatctattgtttattttcagtttcaattcttacaaaatctatcttacaaaaatattgtcttaacaaaatttacaaagatatcttatatttgtagccttaattttcttttaaatcttatattttattaactatattctttttaaaaagatataaaatacttcattcatatcaattactgtatacaaaattatcaatgatagtatagatacaaccaatggtttatgtaacgaataaatgataaagtaaattacactctgctttcttagtcaagtacttaatcgtcttcatcatttccgtcaatttggtgtgactttcttgcttgagaatcatcttctttttacagataaaataccggtaacgcatacgaaaatcataggcagtgatccattcgttacatcgctaaaccttcgaattgatcaaaactctcatatagaaagagatgtcattgatcttggtttccctaaaccccatttttgttgatatggtataaaccatcttctgattctcctattagcctccaactcctcctcaacatattgcctccatggtggtttccgtgccggtcgatggtgacatatcaaatccgataggatttgtgttaaacttcggaacgcccatagtagatcatactgacgcccgggaactatcgcataactaacatcagatgttagtatgaccaaacacacggctaacaaagccaaaagattcacgaggcaatcgccggacatagcaaaacaacggttgaatcgaaatcgccggtgactagacatacattccgagaacatgaaccgacatagaaatagtgtaacaacataagaaaccacaatagattcaccaaaaaacagtaaaacaccattccgacgtaatgacgaacatgatttcatcattgtcgctatcattctcgatttattgcataaaaacctaacaacaacaataacagaataaagaaatggaaaagagaaaacatagaacctaccgacaatggagagaccgccggtaggagatggggaaccgccggtgttggtactaatttccttaaagaaatttactttatttatacatgtatatataattcttcttttactgttatttgattttataacagtgaaaaacactgacatataatactcaatcgacgaagcaaaaaaatatgtttacaatgtttcacattacttaaaaattgagcaatggtttagagtcaaactcttataaagtttcaaatatcatagatatttaaacataatttataaaatatatattaataaaggatggtatctgcgtgtaaattcttagatataacaatgaaaatacaattctgaagtttaagtcgatattaaaaaaaaaaatatatattattaatattgaaatttataggaaaatgacaaaataatgtttaatttaatgggacaaggttatatgtaaggtagaaagaatttaaatatattaatacgggatgatatattacgggtgaatcctaaaattaagaatcaaaatacaattatacaatcttaaacactaaacaaaaccaacaatatttacaaatcaaatagaacttaaaatttcagttttattttaatatctgaactttataagaattaataagaagtttaaatattataaatatttattaaatatattaatatcagactgtatactacgaaaatcctagatataataatcaaactacaattatgaagtttgggtcgatatcaaaacttttgtaaaattttgaactttataagaatataacaaaatgatgtttaatttcactggacgaggttatatggttaaacaggtttaggttgacattaatacatgatgataaactacgggtgaatcctataatttacaatgaaattacaattatacaatctttaacattaaataaaacaaacaatattaacaaaacaaatacatttaacttaaattatataaaagaaagataaaaagtaatcgagaaataaattaaaagaagcggtttcatcaggagtag

SEQ ID NO: 20139 - DNA, 1260 bp, Arabidopsis thaliana landsberg
  unsure (1)..(1260): unsure at all n locations
gcaagtacctcctatgtgacctggtggagggggttcccattgtgttccaaaaagaaatttgactccactttgacgacttcaccatcatctgtatcagttgcatcatctgtttcgcatgttgtagcatttccatttcctacacttagtagccaagctgcaaactttgtttctaagtggtggagtctcatgtttttttctaaaacaaagacattgcatgcatcccataaataggactgacttatagcggcaagtacagcgtctgctcatgttccatgtggaataactggtagtatttgcctaaaatctcctccaagtagaatagtttttcctacaaatggcttttcgcttgccaaagagttttctgttgagagcaagtctctaagtgttctatcaagtgtctcgaacgtgtgtcgatgcgacattggtgcttcatcccatataatcaaatcagtcttgattagtaactcagctagcattgtccctttcttaatatcacaaatggaatcttctgtaacattcaaaggtatcttgaatcttgaatgtgctgttctgcccccaggcaaaagcaacgctgcgatgcctgatgaagccactggtaggacaattcatttttctgatcttagtttggagattatggtcttgtaaacaaatgtcttccccgttcctccagggccgtaaagaaagaagagttttcccatattgttgtagactgattccaaaactgaatcgtagactttgttttgctcgatatttagactgcttaaaagtttctcgtattcttccctctcttgtttttcattgtactgaagctcctgtctttacagactattccctaattgttttagaacgtttgaatcaggcttaggcatatctttgaactccgtgagtgttttttcatgttgatgcaagagtagctcaatctcaatcaaagtataatgatgcagctcatcgtctttgaatttcattctttgattcccaaaagggcgtcgatgctttgcaggtatgtcttctgacattgatttccaagagtgttcccacaaccgtgatgggtttgctacttcacaatagattagtagaaggacaaacagatgccgtagttgaatcggggttgcccattgatttgcttcatccatcgcatgatgccactctttatcgtcgtctagcaaccctctagcatgacatgatgccttaaaactgtcttttatttctccgtgaactgttttaactcatcgtagctntgtgccctngtacaacattgag

SEQ ID NO: 20140 - DNA, 1339 bp, Arabidopsis thaliana landsberg
  unsure (1)..(1339): unsure at all n locations
ctatcaacaactaggagttgcttcaattttcggttcactgattttatttctccttattcctttccaggtatttagcttcgctcggttgttttatctatttttaaattgtacaggttgtggtaatcacattggcttacatacaagcccgcatattctgtttcttataaattagactctgattgtaagaaaaatgcggaaacttactaaagaaggactccagtggactgacaaaagagtcggtatcatatatgagattttggcatccatggatattgtaaagtatgattgatattcctaattgtttctttttagcttttatgaatggtacattcttaatccaataatactactattttctcttggaattttccaactttgttagatgctatgcatgggagaagagcttcgagtcccggattcaaggaattagaaacgaagagctctcatggtttcgtaaagcgcagttactatcagctgtatgactccttatctttgaatttgaattgcctgtcatttcttgtatgcacttagttttgtatatgacttacgctagggtaaactcatagtaacctgtcttccacgtttaactatttattcctcttgcagtttaatagttttatactgaacagcaccccagttgttgtgaccttggtttcatttggggtttatgttctgcttggaggagatttgacaccagcaagggcattcacatctctntctctatttgcagttctaagatctcctctcagcacgctaccaaatcttataagtcaggttattttaacaatcatccccttttcagttatatttgatcattcatgtgtcaatagattcactcttcatcattagttatcgtcttttgctatttctctacttaggttgtcaacgcggatgtttcagtacaacgcattgaggaactacttctaagtgaagagagaattctagcacaaaacccacctcttcaaccaggaactccagccatttcaattaagaatggatacttttcatgggattcaaaggtgaatcctcaaaatatttcctcttgtttacattatgttggaatgcaatattagcttctgcaatgctcagtatacatgacattctgatcacagtgtttgctcgaatatttcccagactaccaagcccacattatccgatatcaatttggagatacccgtgggcaccttggttgccattgtacgtggaactggagaaggtaagacgtcacttatttcggcaatgctgggggagttatctcatgctgaaaccacaagcgttgttattagaggcgctgtagcttatgttcctcagtttcgtggatcttcaacgccactgtgag

SEQ ID NO: 20141 - DNA, 508 bp, Arabidopsis thaliana landsberg
  unsure (1)..(508): unsure at all n locations
agagagaaancgcctncctaacaatnngncaaaaatgtgtttacactcacanaccggagaattttgttaagcnccgngaanancaacaagagcgnnccattgaatctatgacccagnnaccctcaaaccccccagacacacaaacanatatgcatctgatcctaaaacaaactacaaattctcacaccatgtttctctcggatccaaaagattttccgagaacataaaagactgtttctagacaactaatactcaaaaagtttgtctccatctgcaagaatgatcctccaaaaaaaaatccctgcatcagaaagtcaactcactttaactcaaaaaacaacagcaaaacaacaacagatttcaaagatgtctcttcttaggtttccgttcagcagaatctcctgcagcaactgaactgctgtttgttttcatcattatcttcagtttatcctgccagaaaacaaatgtgttaaattggaattaagtgaatgatctttgattaataaaa

SEQ ID NO: 20142 - DNA, 570 bp, Arabidopsis thaliana landsberg
agaatggttagaagaagattcacacttgaaaactttggggtaccggaagctgttagatatgcataaagatggtgagaatccagaggagtatgaggatttggtcggaaacgcaaaggagcagaatatactcgatcacgtcattcaacagactgtccactcgaccgagctactcgatcacaaccttccctctgaggcgatctgacatccgacgactggtccgaactcaaggcaccaaaggtggacctgaaaccgctgccaaaagggttaaggtacgttttccttggacagaactctacttaccctgttgtcattagtgatgagccaaaaaccgatcaagttaatctgttattaactgaactaaaaaatataggagagctataggatattcactagatgatatcaaggggatctcacccaccctatgcacccatagaattcatttagaaaacgaatcttattctagtattgaacctcaaagaagattaaacccaaacctgaaagaagtggtaaagaaagagatacttaaactattagacgcgggtataatctaccctatatctgatagcactt

SEQ ID NO: 20143 - DNA, 546 bp, Arabidopsis thaliana landsberg
aaaacccaatagtgataccaaattctatacatatcatcatagaaaaatagaataatatatatttgttcaaaccaaaactttgattctgatgaatccaaataatcaattaaatagtttttgatggaaggatactaaaccctaagataatatatagggaacccaagagttttaatgtaaaacaatgatcaaatcacttaacatccttaatcaaaacaaacaattcattttaaaacgtatataataaaaagtatacgtaaatagtatattcacaaaatagaatagtatctctcaaaaatcttccaaaatcaaaatcgatttattggctatttctctttagaatttccaccatcgtaaaccctttatcgcttctagatctaagaaatccataacatgatcgtcaatttgcttgttcataattctcaattttattttccatggatttaaaaattaaaattctcatattaactttgatgggaaagtgaagattaatttgacataattgacgaaaagatttcaccggattttgctagtattctttggctgacg

SEQ ID NO: 20144 - DNA, 1063 bp, Arabidopsis thaliana landsberg
tttttgtaatctaagtgtcaaagagctcagaaactagatagatgtctctttggtcttgtgaagaatggttataaagataatgatagttttgtaagattattggctgaaatgggaggagaaatgacattgatgttgcaggaccatttaggtgaagtggtgtttgttgaactgccagaggacaatacttcagtgagcaaagagaaaagctttggagcagtggagagtgtgaaggcaacaagtgagatcttatcaccaatctcaggtgaaatcattgaggttaacaagaagctcacagaatcacctggcttggtacagttttaaagtcttaaggaaattaagtaagttaccactcatgtgacaacatataagcaatgatttggcaattgtgtgttgtttagatcaactcaagcccctatgaagatggttggatgatcaaagtgaaaccaagtagccccgcggagttggaatctttgatgggtccaaaggaatacaccaagttctgcgaggaggaagacgctgctcactacggattcttcgacttttatctttcccaaatgttcgcaactcagagcccaacacgagattccatgctctagtttctttcttgcatggctcaacggtacttaccactctcaacttgtatcagcgcgatactaatttgattaaaagatcatccatttagatgtatcagagcttttaactttatatgggaggggtcaaacaagcacacaataaaagaaacttcattgattttcaatcatatagttaaggaagaaacgttaacatataacaatggtcaacttttagaccaaaccaaaagtcttttgcataagaaagtaaagacttcttcaagctgtacattaacttcctatccacgacatacaccgttcggcagggtctgcgaaacagctacatccacatcctgtgaaggcgaccgtgactcgttctaggatatccaaatcatctcatctgtgagcgtgttcgcatcatctttgtttcctttggcactttcgtttgagatataggtgacaggcttcacatctgagttaggtataaccttgtc

SEQ ID NO: 20145 - DNA, 485 bp, Arabidopsis thaliana landsberg
cacgcgttcaaagcttaataagtttataaggactttttactatctcaacaacatagagaaaaaaagaggagatatgaaggagttgataagataagttgacaaaaccaacaaattaaaaaccacatgttctctgcattgttcaaaaaatttcaatatctaataccaataatagtcactggcatcatagagaaaagaggagacatgaacgagttcataagttgacaagaccatcaaaagcaacgatgtgttcaatgatatcgagatgtaatcatcatctgaaccaccattgacacactgatactatacgggtaatccgcagttgagtcatggggccgtctcaactctttgatcctcttcatacatcgcttttcaagattcccgacaaggttaatgttgaaacacttgcgtacatcaaggtgttcttccagatgaggacaaccgtcaagaatggcattcaagccagtgttggttagtccgttacccat

SEQ ID NO: 20146 - DNA, 297 bp, Arabidopsis thaliana landsberg
ggattggacctggggcgtgtattcttgccagaggtgtcctaatatgtcattcattcgaaatgtgctactagaaatgatgtgtggaacgggaaagaactcgaaggagtccctgaagagatagaagatataaagccatacgtggtaatatatggcaacataatacaacatttcagccacaaagagcactaccttagattccatgttaatggctttttccgggatggaaacaagcggtgcagtgcttgcacctaccccattggtctccaatccttctatgaatgtattgattgtgatttt

SEQ ID NO: 20147 - DNA, 552 bp, Arabidopsis thaliana landsberg
  unsure (1)..(552): unsure at all n locations
tgnnnnnnnnnnnnnnnnnnnnnnnnnnnnnnnnnnnnnnnnntagacaggagccttggaaacgacaaatcttaataaatgcccctgagatttgcgatctccttcgatatgagaaagtaagtcctctttcttcatttgctctttacaatctaaacaagtcgctttaatgacaatttgtttttgtatagggtactagctgtaatgtgtctggcatatcatttgatacatcaggaatcagtgaagtgactatatgtgatggcgctttcaaaagactgcatgatcttcgatttctccatgtttacaaaagtagagatgatgggaataacagagtgcacatacctgagaaagtggagtttccacctcgtctaaggttactgcattgggcagcatacccaagcaagagtcttcctcctacatttaatctggaatgtcttgtagaactcaatatgcgggaaagcctggtcgagaagctatgggaaggaacccaagtacgttggtgttgtacttaaaaatatatatatatgtgtacttcctcttaggttatatgatgct

SEQ ID NO: 20148 - DNA, 957 bp, Arabidopsis thaliana landsberg
  unsure (1)..(957): unsure at all n locations
aaccaaaatgattcggtttttaatataaatatggggagaaggaatcatgaatagaacaaatattataaaaactcatttcataacctaatttttaaaaaacattacatcaacattagtacaaaccgttttactgatgtaattttatgtcatttcagtggacagttnnnnnnnnnnnnnnnnnnnnnnnnnnnnnnnnnnnnntgtatatggcttgagtttttttaaagaaaagggcctgaaaaattgtatctaaatttataacagaataacacacattaatgtagagagcccccatataacatttcattgctacattgatgaaggacattatcttcatccattacctgtttgagtctttaagttcatcatctgcaacaaaaattatagtgcgaccatcatgagatttacgatgtattccacatcgccttctcatttttatatgcactgaaccaggacaaatcgtctccattatattttagaaaaaaaattaaccaatataacttcaaacatgtgtatcagttcacttaattagaattatatcttttgtgtacctagttatcgatgggaatgttcatccattcttaattatccaagctttctcaagagatgatatacatagagttcgcaaagctgtttacttctccactttcatcatgaatggcattctcctttggttgggacttgatcttcttatatatatatatatatatatatatatatatatatatatatatatatatatatatatataaattcaaaattcccaaataatatatagtggataattgtacttgatctttggtgtcattctcttcgttatccaaatcaaacatacattacatcctacgcctcccaaattatacaaaagcatataccccacattagtctttcattcctaggatacttgtaagataaaaaagcaaattatatagtaatcactagatcccggatatcatc

SEQ ID NO: 20149 - DNA, 894 bp, Arabidopsis thaliana landsberg
taatagggagtatttgctttttttcttttcttatcccaatgctcattaatctttctgagaggcggcacaatttacacacaaattggcaaactatggatactatgcaaatggtgatatccgcgaagtcgatattgtgacaattatgtcaaatcacttgaaaatgataaaaccatttatcaaaaagagatgaaacaatttaacaaagaaaaaatgagaaaggaaacaacaaaagcaacgctatggttcttttagtagtagcgattacagtaaccacagatttttctgctagtacttaatctagttatagaagccttcattatatccacggcaagatttgggtgattggcgacaaacagcttgaactcatcaccactagcaatcgtacttatattggttatgatagtagtgaaggcgggatcattgagggctttgtcaaaagggatttgggcgagctcaaggatgctaagagcattcgacgaattcaaagatgatataagctcgtttctgcataggtctcttagatgcggaatctcatatttgtcggctgcatgaaagagtgaccgagcatgtttcttgagactagcagaacaaatggagccatcaaccctatagatgaactccacgaaagcctccaattcttcgtgtttcatctccgagagggtgactgtctccatctgtttagatgaagccttgaactcgtctgattccaatatcttcttaaacacctctgatcttgccacctattcaatattccattcatgtcaacaatgaaaaacatcccaagtaagagacactctcaaaaacattgctacacaataagtaacttttccctataattggatgatgataaataaaagagaagaggaagtagagaaaccaagacaagcttgtggg

SEQ ID NO: 20150 - DNA, 790 bp, Arabidopsis thaliana landsberg
attctttgtggagacattctcagccatctcattaaggtcaaagcatcaagtggggatattcgcggtgtccgtattggaaatggagcaccggctataacgcatcttcaatttgcagacgattcattattcttttgtcaagctaatgtgaggaactgtcaagctcttaaagatgtgtttgatgtttacgaatattattccgggcagaaaataaatgttcagaaatcattaatcacttttgggtctcgtgtatacggttccactcaaactcgactaaaaacacttctgaacattccaaatcaaggaggaggaggtaaatatttgggtcttcccgaacaatttggtaggaaaaaaaaagaaatgttcaattatatcatagatcgtgttaaaaaaagaactgcctcatggagtgcaaaattcctctcgccagccggaaaggagatattgttaaaatcagttgccttggcaatgcccgtctacgcgatgtcctgtttcaaacttcctcaaagtattgtctctgagatagagtctcttctgatgaatttctggtgggaaaaagcttcaaataaaagaggaataccatgggttgcttggaagagactccaatattctaagaaggaaggagggctgggtttccgggatcttgcaaaatttaatgacgccctccttgcaaaacaagcatggcgaatcattcaatatcccaattctcttttcgcgcgggttatgaaggctcgatattttaaagataattcgataattgatgctaaaacaaggtctcaacaatcttacgtgt

SEQ ID NO: 20151 - DNA, 1031 bp, Arabidopsis thaliana landsberg
tagcctgaggcggccgtggagcccttcggggggccggccttcgaacctctgaccagtagtgggtgtagggcccacgcgatctgaggcgactgttgaacccctcggagggccagccttcgaacctttgatcagtagggggggctcggagcctggttccttcacagggaaggatccttttcggggtatccccctttcccggtccctgttgcaagagatagagaaagaggaaaaaaaggaaaaggatacgaaatcgaacgacgtggcgtaccttttttggcgaggttattacggcgaaggcgaagcgtcgcccgcttctcctgccagaagcgtcgcctgtcctgccgcagagttaatgcgatggggcgagtggttcgcggggcagccgttgcgcgtgcgcgagccgttcgaggaacgggcgtctcgcgttgagttttgaatctcgtggcgggttcgggcgaagtgttgaacgggtcttgcctgggccttcatatatttgagggagggatcggtggcggttttctactctgctgctcgcctcccacttaggttttcgcaacccaagggaatagccagagaaaggaaaccgtgcacctcatcctctccgccgccacctcttctgcttggtgatggctgatcgggtgaccataatctccccgcgcgatccgtggcccttttccacggtgacggcgagcgacctggaggagctggtcggcgaggggttgcttcgccccctcaccgataagcagcgaccagaatggattcctcccgagggcggacgacgctccgtccccaccgccggggtacgtcgtgagcttcgtctccttccacgagcggggattcggtgtgccgacgggccgctttatgcgggccatcctgttccactatggggtggagttgcatacctcaccccaactccatctcgcaggccgctatcttcgtagcggtgtgcgaagggtacttggggatcgcccccattgggatttgtggactcactcttcctcgcgacctttcgcttgtcgacgggggagaga

SEQ ID NO: 20152 - DNA, 1501 bp, Arabidopsis thaliana landsberg
gcatgatatgattattgaagctggtgcttatccttcacctcttggatatggtggatttcctaaaagtgtgtgtacttcagttaatgagtgtatgtgtcacggaataccagattctcgccagctacaggtcctcatgtgtgctttttactgctttaagctgaatagctttgaaggagttcatttgtttatcactaactattaagtcttaatgcagagcggggatataatcaacatcgatgtcacggtttacttggatgtaagtcatttgcgcttcttttgttaatttgcagacactttcactttgtttgatttctacatacaacttgaaacatcaacagggttaccatggagatacgtcgagaactttcttctgtggagaagttgacgaaggtttcaaacgacttgtgaaggtagtattcttcttcttcttcttctcttcactgtgttttgtcttcaagttcacaaaaaaatgaattctgttttaatatgctaactgttgtcggtttcttgttctgtaaggttacggaagaatgtttggagaaaggtattgcagtttgtaaagacggagcaagcttcaagaaaatcgggaaaagaatcaggttgcaaccaaaactattcttgatttcaatataaccgtgtagaaatgtactatttgaggacactgctagaccaaacaatctcaatgctttcaatttccaacagtgagcatgcggaaaagttcggctacaacgttgtggagcggtttgttgggcatggtgttggaccagtattccactccgaacctcttatatatcattaccgtaagtaatctcttccttagcaaaatcgttcttatgttaggaaacatcaatcaaaaacaatagttggctgcatatgcatatgaacctggacttacggttgaggaattttaatccaatttgcaggaaatgatgagcctggactaatggttgagggacaaacattcacaattggttagccattttttccccttccatgtcatggctttcatttgcttatgattaggtgattactatataataaaaaccgatgaatacattactgttgcagaaccgattcttaccattggaaccacggaatgtgtaacatggccagacaactggactactctgacagcagatggtggcgtcgctgctcagtttgagcataccattctgattactagaacgggttcagagattcttaccaaatgctaaaactattcacattgatcatttccatttcaccttttatttgctgatcctttaaggtccatagtataaattcattatctatgagaccatagtctagcgatttgtgttagttccatcagtttaagatctcaagatgagtttgctatggaaaattttcccacatgttcccacgagtcattctttagtccacaaattcccatttcccaacaattatatgagactttttaagtttccctgtctttttgtgtttaattcttagttattttagatgaagctagaaacccactttc

SEQ ID NO: 20153 - DNA, 593 bp, Arabidopsis thaliana landsberg
tttacaacataaaaaaaaattgtattgttttttaattttaataattgctttttacttgtaattactatggattgtaaagaaaaaactacactttttatagaattttggtaagaatttacaaatttgtacaattttattagtttatcgataaattaatatctctctaaattaatcaattttcttggtctcaatactattaatttatagaggttttaccgtactataaagtaacttttctttttatacaaaaatcttgatgggcgctagttaccggataactgctgagttttatcaaatagggtttattgaatcacaatcaataggctatttgttggatttcgaagtaggcatcatccatagtggtgagtcttatatatcaacgaactttttttgtttttgtttgcttacgttcttagagatatatatcaatcgatgtggttaacttgcctggtgaatgcaagaagagcaaatccgcaatctacgacattgtgatacacatccttgtgatagcctcgaatgttgcaacgttcatgtatgtgagaaactacagaatcctcatagctggagataaaatctatatgatcgagctcgag

SEQ ID NO: 20154 - DNA, 616 bp, Arabidopsis thaliana landsberg
atggcttattttgttgcttctttgatgattttatcacacagtcttagaccatataatttccatcagtttgattacgaggccgtggcagtcttggtggatgtgaaggcaaccagggatcggaccaagcgttgatcatcgagtcgtcgtctttgtaaatctcgaccttgtaacagtgatctccaagcgtatgacgtcttcttctctagggtagcatttaacacacaatctggattatgtagaacactacaaaatttattactctatttcacaactgaattgttttttggtatcacagttgatcatatattttcaaatagtttgttatacatagaaagaaatcttttaaaactagaatagtcctattattcaaattaaatattatttatttaatttaaataattaaattaatatattaaatttgttgaaataaagagagttcagatagacttgataagattttagattatttgttgtccaaacacgttgtgacacctgccccctctggcaaaagaaaaagataattagggtttacaaacccttgatttcttctatagagacgacacactatatatatatatatatacatatctatatataaacattgaagcatagcaag

SEQ ID NO: 20155 - DNA, 788 bp, Arabidopsis thaliana landsberg
  unsure (1)..(788): unsure at all n locations
cttctgatcgtcaaggaagtacctctgatcgttanaaggtctgttgtcgacaaacttgatgttcgcctcagggtccatgttgaagagtttgcagatgtctttggcaacatcattcactctcctctccttcttcgtcccaatattgtaaacatggccaacttctcccttgtgaagaacaacttcaaaagcctcagcaacgtcttcacagtagaggtagctcctgacatttgatccatctccatgaatgggaagaacctgccctctcattgccagcaaaatgaacttaggaatcaacttctcaggaaactgattcggtccatagacgttattcccacgagtggtaataacaggcaaaccataagatctaccataagccataacaagcatctcagcaccagctttcgtggcagagtaaggattcgtcggaagcagctgagaagcctcatggttaccaacaagagcatcctcatcagtttcaccataaacttcatcagtactaacatgaataaacctcctaatctgaccagtaactttacaagcctcaagaaggacatgagttccatagatattattcttagtaaactcgaaactgttaccgaaggaattgtcgacgtgagtctgagcagcgaaatgcatgatggtgtcaataccttcagtgatgagaagatgattcaccaagtcagcactagcgatatcacctttgacaaacttgaagttcggagagtgcttagaaggattgagattcttgagaattgaacaagaatcaagcttgtcaagcacaacgattt

SEQ ID NO: 20156 - DNA, 739 bp, Arabidopsis thaliana landsberg
acatgcatgtgtatccaaatggcaaatgattcgcagacttagacaataactatatataattttggtaaatacgataatacattaacactcaatagaaaaatggcacaatatatgacacaaacaatttcaatgatacgtacataagcattactaaaaataatgaaaacacaaaacattcaattttataatagttcataaatgcgatgaattgaagaacacaacgttctcattctaacagaagtagaaaggtctcttagtaatcaacgttcatagatagatagagttgattccggagaactaaaccggatccgtttatcactgagatgtgatagcggaagagaacttgagagcaacgctgttgacgcaatggcgttcgtcagttggtgttggaaaaccttcattttttaagacatgacctagatgtccatcacattttgtgcaagttatctcatatcttaatccagctctctcctcctgcaaaaatattgtttaaaaagtatgtcattgactatgattttgtaaagtagtgatttatattctagtgatgttgtggtattttcattcattcaattcaaattgcatgtgttttaaaaacaaatgttgttatttaataaatactaaaaatgtcatttttgagatatgtatttaatccaaatttttaaatgaaaagatattttgtaattttacaacatgcaattgttatatgaattatattacctaagatacaattggtatatat

SEQ ID NO: 20157 - DNA, 324 bp, Arabidopsis thaliana landsberg
atgctcaggagatgaaaacgtgttcaagcaatcaacaagaagccgtaagctgactccgaatctcggcctaccttgagctccatactcgtatttcgtgaatagctactcatataacacatcaaacagacttcggattcaatcgaattttaggggtttagaaaatttacgataaactcagaaatcgatacctcgcgttgaagataaactttggcttgaagacaacctgattcttcaacaatcaaaactattccgtgttcagataattctactaaagcatcctggaaacggagaagttttcagaaaatcaaagatgaaccctagatt

SEQ ID NO: 20158 - DNA, 550 bp, Arabidopsis thaliana landsberg
aatagatctgccctccatatgtatctgtagttggatctattatttgatgagtctggtttataggtgtgtaataagaatctgcctatttactaagatgaataattgaactcgttaagaaggcatatttaggttgacagtctctcggtttctccgctcactattagctatagatatagggagtttggcggcatgcccactagttattccatcattagagtttgagtttaagaatggtttgataacaacctagctttcattagatctactaaccaatagtttcctgagaataccctgttcctagctctttattaaatcgtttacaacccaatcaatctgctgttttcttaatttcattttcttactatttcactcataccctgctagcttaatcttgacatttaactcaacgtttgaaagaagaactccgtgaattcgatcctaaaatactgcaattgatctcttatttgagagagtagttctaggtaatttgaaccatatcaacgagtcaccaatatcatggggaaagtaggaagtccctttgtagctttgc

SEQ ID NO: 20159 - DNA, 676 bp, Arabidopsis thaliana landsberg
tggttcctgaaacataacactatcatctttagcttataggaactgccagtttcttcaacatcaacttatattaaagattcaaaaaagcgttacctatattaatagtggcctggcgagaaatgacctcaggagacagaggatgtagcacagttacatccaattttttaagatcttgctcagccaaacccttgttcctcgacattatcaaagattgaagcttctgctcctgcttaaaaccgagaatcaaatcagaaccctaaccctagttaatctgaaaaagactacttctcaggtttttctacatctgccctaatcaagtcgacacacagattctatacctgagctccgttacctaaatatcacaataatttcgtcgcaatctaaaaaaacattatgattacgattagattccccgaactaatcttcgtgcgatagaaatgggaacaattaggttgaacaaatattgaatccgtaggagatgtaattcgagatcgaaacgaacctgagcgatgcgaaagaacaacggagaaggtcaaatttgagagataaaaaagagtgagaaagcggcgcagcttgaagaagatgcacaaaatggtttttttttttctatccaagtccctaaagggtttttggtttccttagcgtaaccttttttttttttccctctggcaagttt

SEQ ID NO: 20160 - DNA, 3140 bp, Arabidopsis thaliana landsberg
aaacgtaaggggatttcccaatactgaagtagagtcataggtgatatggtaggcgcaagaaccttgaaaattgtaaagaaatcgatgaagttgtgtttgtaaaaattagttatgtcatgattaaaggtctaaagtaaaagacacataccatgactatagcgatcctgaaccatgttagaaatagcctggctagaatcgtacaggtgacaagtacttcgcacaaaccaatcaagttttaagctccaaactcgtccccctaacctgcccacgcctagtaccgtccctctcaatctcgatatccggcttgccaaccttttaccgggaaagggagttatgcgattcggacaaaaccttatatcatcaaccatacccattatttttagaaaacctttttatacatagtataatatgataaaaatcgcacaaacaatcataaaaggtttccggggatcccgtttcacaatacataatacacaatagtagtctttacatttatacccaacaatctacaccaagaacctattgtcccaacgaccctctatggtttttccccctaaggtcacctgcaacagaaatggtggaatcatgaatataagtactcaatgagttcggcgcctaatctcagaagctaaacaacccaacccataacaataaacgttagtcaagcaacaagcaacaaacaatcaatatgcattaataatgcaatataatggatgcacgggtaaatgataacaatgtaatcatatggccatgtgaacgatccttcccatcaaaccaagtgaacaatccgctagtagccaccaagtctacaagcgatgtaccacatgggactaccacgacatgtatccccgttgcatcgtcatgcaacactcggccccttgggagcgaccaagtctctctgagtcgaacaaaacagggaagcacactcgaacaccataaactctatatgcatgcaactaagctacgacaaagcgtacttaaagcatcaagcatacatgacgtaaattataattcttatcaattctacgatcaatcaacaatcacatcaacaagcacacaatcatcaaagcaagcacataaggtaactcatgtcccaccactgtgattaagcggatcggatgagagtgatgacttaacggaatgacaacgtcgatcgggaacttctggttgatctcggagacttcctcttccttcgaaaactgatcgtcgagtggttcaccgaaactgctactccattcggaattcagtcatccacctctaccgtcagctttaggagcggccgtcacttcaccagagatttcagagcactctctctctctcactatttctctttcgctcttggtgaaaatgacttaagctccaaagccttggttctttttatagaggaggagacttgacatatgacggacacatgtcgcgtcttgggtgacttaaaacccacaacgacacctttcctccgattggcttggagtttgcgtcgtccaaccctatgggacacgccaccttgtgattgggtcgaagtttgtgtcgcccaacgtatggcaacactccttctccatgattgactcgatgtttgtgcggccaaactcatcattacctcgttttgtccaaaagaggtaacttgcccatggattagctcataactgaaatcattgcctcgatatcgcccaaggaaggtaacttataccatgggcaatatctttcttttgattggggcagagatataatcattgcgtcgatcctgtaaataaggtggagtttctctctccgacatatgattacttttcttacgcttttgcctcgattttcggaatttatgcttcaaatatttctctaaattcgaccattccaagaatcatctaggccacaagttaggccgtcctcaaccattgtacgcccgcatggcagggtcacagcgttacccaattccatgaccaaaactgacttagtcaagtaagagaattttacttagtatttccaattataagtcttttcccaagaccttataaccccttggcatattccctttatgccaaaattggaaataactccgactcaaaatttcttaccacgaccgcccctatagtcaatgaccgggtcactacattcaccctctcattataattcgtcccgaattcccaatgagataaattgtcgacgttcttaacttggttagaactttcacttttttctgtggggatccagcacgccaatcttgaaggtcttctccttctcgattgaacttcgcgtgagcatgacaaggcaagtccgcgatcttttctctcgatccggttcctttcattccaccatgccatcttataactggtcgtctaattctcaaaaattctgttacttgagacttaaactactttagttatcttacatagatagactaaattccaacacttcaaaatttccgtaattttgaaagttcccttataaaataacaatccttgttcccatgatgatcaaacaactcatcacaaaattctcttgatgtacttccttgtacactcaagcatcacaacaattttcccgcatcacatcatcacgactccgtttaacatcacaaaacacaaggtatcaaatgacaagactctgttttcctcataaatatatctttcattcataccgttcttagaaaaggccggtttacacataaacttccttacaaaattctggtttacacataccctttcattacatctgcgggttttgaccgctaaacacttagtcatacgctctgccaaagcggttacaagccaaaaaagaaaaaaactaaatgcaaatgatcctaacatgcaacaataaagcacacaatgggttagggcccttaattacctcgccaagacccgacctttaaatactgctatcaatctcttatttgagagagaggttttaaggcaatttgaaccatatcacttcacatgaatcagaaacaaaagtgcttaaacaaaacataatgatcactttgtggctttttaatcaaattaaaatttattacagagtcttagattgattgataaaaacgtaaggggattaccaatactgaagtagagtcatcctgtaggcgcaagaaccatgagagttgtaacgaaatcgatgtttgtaaaaattagttttgtcatgcttaccggtcg

SEQ ID NO: 20161 - DNA, 704 bp, Arabidopsis thaliana landsberg
  unsure (1)..(704): unsure at all n locations
aactcggcgcagttatactacaacaattaaaaggtttaggttctaaggttgatgagtacctcatagttcgagatcagtatctccaagatccactcaggccactcttccattgttgtcagactgcttctattttccggatgactgcaagccaaaaaaagaagatcctgacatacaaacagaaaagagcgagatcagaaagtcattgaatgaagaggaactggacaggtgaacgctttcagaataaaaggtccagacaactaatcttaagttttattatatttcatgacagctgtttggaaacaaaaatggtcataatatttcctagtatagttatactaacccagggttcagaatatctcaagcatctttacaaggacatttgttccttgacacacagtcgggaaannnnnnnnnnnnnnnnnnnnnnnnnnnnnnnnnnnnnngtagagccttagatgcagatggtatagaccgcaggaggacnnnnnnnnnnnnnnnnnnnnnnnnnnnnnnnnnnnnatcgtaaaagttaaggccatcttctgttgacgaagcattgatctgcaagaaagtacatgtgatagcaatagttttaacttcacaccaaaatcttcaagagtaattgatatagaccaattatattgctggcatatgaatttgaaccgcacaatagcccgtagaaaatcatgataggtcaatatatg

SEQ ID NO: 20162 - DNA, 1483 bp, Arabidopsis thaliana landsberg
  unsure (1)..(1483): unsure at all n locations
aacaacatagtgattgtcaccaaattctctgaattcgactttggcgtttccgaattttgaccagccttgtgaaccattttgtagctcaggattcacgatgattcctccattgtactgtggtttataagggttctctaaacactacaccaacaaaataaaaaaaattaataagaacaagatcactttccaacgaacatgtatgaagaaagactaataaacagagaattgcttgcctctattgttgccgagtaatcataaggtacgaacgtttcttcacaccctagaatcgttgtcatacaaaaattaattcacttttttcattggtaataacagctagattcaaaagttgttttcgcattagttacaatcagaaaatatatatatggcaaagaaaatcagaactttagattcaaaaagaatgaaaatcataactttatagtagatttaacataataacaagaatatcgtaagataagatggagaacaatttgatagacagagaccgcagatggcaagaagaagcagcagaagtagcttcattgcggaactaaacaaattgtgttgctgatgatgattataaggatctccaatatattctacttatatattatggtctagatatgtttaattaacaaacaaaatcttcaacatagtttactttactttatgaaattttagcatcatggttttggaaaattagtcaattaatatatcgtccattaaccgttaatagaaacagcattactagatctaggaaagtttgcaacgactatcgtttttgcgcgggggccaaatatgtaaaccctaaatccacaaaaaatctcaaatccgcaaaaaccctagtaaagatttagcacttaagcaaatgaaacttgaatatttacctccaagcttgttgatactttatgcttctctccgaagccacaacagatcgcgatagttgagagaagtaacctaatgaacttagcaacacctctagttgaagcttccgagaattcataaatcgatcgacattccaaagtagttagagaaagttaaattcaatgttattgataaaagtcattacaatacagaggcttaaaaatttgagaacccaacaaattggtgctcataattaagcccttcttggtttccagagatacggctataaatatgtaccatgtctagaataataacaaaacagactatttgccaccattcttgactaaagaatcaaactagctcaattataatgtagttttatacttggcttcttaaacacgaaagacaaaagaagatggttgattctgtgaggaggagacatcagaagtcagcttaaagctgtgagaagcttttgaattggtgagaggatgagcaatcttgagatcgtagtcaccatggaagagagaagcttcaaagtatccatcagcatcagtgacacctgtggtttgtctggcgaagcctccncattcatggagaagtttgtccacaacgtcaccagtgg

SEQ ID NO: 20163 - DNA, 1485 bp, Arabidopsis thaliana landsberg
aaggaaaatcatatatctatacagatgaacttaacaaaaaaagttgaaaattaaagagaactttttactttttcttacccggtttccttcccacagcttatgaagtttgctgtaccgcatgtttagttcaacaaggtactccgtacaaaaattggaaggcatacatgtcaacggaaaatgatcccattctagtattttaagtttttgagatagataattcaaaccttgtggtaagtacaatttatcactctcgtcaccatagcggtagtagaatcttaagaatttaaggttaggcattccttcgaaagctctctcacttatatttaattcgcctaatagctcagatgagtagaaatgtatgcctataacacttttactaccctgaaaaaaagaccataaaaggtagagaactaacgatggttacttatcaaactaaatttaatttgtaggaagcaccaatgcaaagatagactaatcatagaactaaccgtgtcattagtgagtagttcacaaatatctctagtatcaaccaaaaattgacgcttcccaggttcacgaatgggttgatgcccgagcccatgacgaacaatttctttacccaattgttctagcaaattatgcatctttattcttcccccttcaatagatatgagagatttttcagttaaaacgtgaagtccttgcttcacattcagggacttctctgcaagatgctcttccactttttcaatccttttattgttgaaaaggcatgctatataaagaaataagtctttatcttcttcacacaaggcattgtaactaaactttaagatgctttgaatattggcatcaaggcgagtccttaacctcggtagggcatttatccactcatgtttagacattccccgaaaatgagagcccataactcttaaacccaatggtagtccacctaaaagttttgcaacttcccatgcaagctcttcgaaaccatctttaggaaatttttgtccaaaagcatacatacaaaatatttggcaagcttcatatgctgatggaaaatttacgttgtaaatatggttgatgccatcatgtgccttcaaaagtttccggtcttgtgttgtgatgataatccgacttccatgaccaaaccatcgactttcttttgcaatagcatctagttgtattgactggtcgatattatcaagaacaacaagcaccttcttgtctttcaatctatcttctacaactcctaggtgaggaatctcgatatctttgtggttggctagctgaacaataaactgtctctgtatggacaactttgtactgtagtcctgggaacacaatggtctatacatcaactttttgatatactacacaaaagcacttagttcaaaactgtcattaaactggataaataagactctggcaatggggggctgtccaaccccagacggacccaaaatccgtatcattctcactttataagatgataggcataacaac

SEQ ID NO: 20164 - DNA, 615 bp, Arabidopsis thaliana landsberg
ctcataaattcacttacaaagatctcttcatcgccacgaaaggtttcaagaacagtgaggtacttgggaaaggaggttttggaaaagttttcaaggggatcttaccgctgtctagtataccgatcgcggtgaagaagatttctcatgattcaagacaaggaatgagagagtttttggctgagattgctaccattggtagacttagacatccagatttagttcgtcttcttgggtactgcagacgcagaggagaactttacttggtgtatgactacatgcccaaagaaagcctccacaagtttctttataatcaaccagaacagagtcttgattggtcacaaagattcaagatcatcaaagatgttgcttctggtctctgctatttacaccaccagtgggttcaagtcattattcacagagacattaagccagcaaacgttcttcttgatgattctatgaacggaaagctcggtgattttggtctcgcaaagctctgtgaacacgggtttgatcctcaaacctctaacgtggctggtacgtttggatacatctcaccagagctttcaagaacagggaaggcaagcacaagttctgatgtattcgcgtttggaatac

SEQ ID NO: 20165 - DNA, 2585 bp, Arabidopsis thaliana landsberg
tggattgtatttcgctatgaattcctgagtatccttaaacattgtgggccaccacagacctgcttgtaaaatttgctaagcagtcttgaaggttgtgaaatgccctccataggtggatccatggcaatgtcccagtataccttgaacttccccttcagagacacacctcctaaatagcccatcactcctctttttatacaagtacggcttatcccaatagtaatggtggatgtctctaaagaatttttttttatatatgcatccaaactctgggggatcataccacttaccaaataattgactaaatctgcataccatggcaacttttcttcttcaactacatatgcttcttccagcatgtcctttgtgtcgaagcttttgttaacaaggtcgtagaacataagctgttcatcaggcataatgtcatctatcgggactgaatcttcaattctcatcctggagagatggtctgcaactccattctcaacatctttcttgtcaatgatttccatgtcaaactcttgaagcaacaatatccaccttagaagtcttggcttggtttccttcttggcatagatgtgccttagtgctgcatggtccgtgtagaccttcactttggaaccaaccaaatagcttctaaatttctcaaaaataaaaaccacaactaacaactccttttctatggttgcatatcttgtttgagcttcgtccattgttctactggcatagtagataacatgaagtttgccatcaatcctttggcccaagacagccccaactgcataatcagatgcatcacacatgatttcaaatgggtggtcccagttgggtgcttgactgataggggcagacaccagtgcttcctttatcaaatggaaagctttaagacaatcttcatcaaagttgaactcagtttccttgcacagcaatctagtgaggggtcgagcaatctttgaaaaatcttttatgaatctcctgtagaacccttcgtggcctagaaagcttttgatatccttaactattttaggggtttgcagctgaatcatgacatcgatttttgccttgtcgacctcaattcctttaccataaatcttatgccctagcacaattccttcctgaaccatgaggtgacacttctcccctttgagtaccaaattggtttcctcacacctttctagaaccctgcataaatttaacaaacatgaggagaaagaggatccatagactgaaaaatcgtccatgaatacctccattatctccttgatgaaatctgagaatatagaagtcatgcttcgctggaaagttccaggcgcattacacaaaccaaaaggcattctcctataagcaaaagttccataggggcaagtgaaagtagtcttttcctgatcattagggtgaatagcaatttgaaagaaaccactataaccatcaagaaaacagtaataaacatgattagctagcctctctaacatttgatcaatgaatggcaaaggaaaatgatcttttctagttgcagcattcaatttcctatagtcaatgcacattctatgtcctgttatcgtcctagtaggaatgagctcatcatgatcatttttaattacagtcatcccccctttcttaggaacacaatgaactggcgagacccaagtgctatcagaaataggatagataatatcagcatcaagcaatttaagaatttcttttttaaccacatctttcaaatttggatttaatctcctttggggttcaatactagtatatgattcattttcaagatggatcctatgagtacataaactaggtgaaatttctttaatatcagctaatgaatacccaattgccctcctatactttctaagctcatttaacaactggtttacttgttcatcacttactccattattaatattgacaggataagtatcatttggaccgagaaacgcatacctcagaccttttggaagaggcttaagttcaacctttggagctttgagttctgaccagtcatctgaacttatgttctctcatccatggttgagtatctcagtagagttctttttttcattgattaggctcatggtgcatcctgatactacttcttctgagggaacaatcaattccttaaactcttctgctccttccattagcatgtgggcgtctagatactttttgtacccttaagtttctaagtgtaggtacccttcttctctgtcgttggttaaggcacttgctaagtggtctccctctataagttcttccagtaattcgtcagccaatctatccatttctttgatccaaaagacttgtccattaattgttggtttcttcatagccttgttgatgtcgaaggtcattttcatctccttccccaggtttaggtcgatctttcccttcttaacatcgataatagctccttcagtagctaggaacggtcttcctaggatcagtgggtcttttggctcctcatccatctccagtattacaaaattagtggggatttctattgttccgactttaaaaggaaggtctttgaggactccatggcggattctgactaatctatcagctagtatcaagtggatgct

SEQ ID NO: 20166 - DNA, 1953 bp, Arabidopsis thaliana landsberg
agtaaaacttgtgtcaaattgagaaatctttttacaatctcaaccttcgattttaatttttttaaaatgcttaacattttcctcatactttacgataaattttatcaaacttaacaaaacatattagaattgttccttacctggaacaggtgctgccgtcttcggcaaaggagcttgggctacaaaatacaaaaggacaacaaaaatcacattatcaaatatgaactgacctggttacaaaatatatctacaatgtgtatgtttctttgctaaataaaactagcagcaacaataatgtggtggcaaagctgcaaataaatgatgtattcttttttatctatgatataaacatatatatgagacttgttttaaaagagataaatggcatttaaggcgacaacaacaacaatatttggctatctaatgttttaatgcatgtattctacaaaagttataaccaaaatgttaccggcagtttcggaacacaagttgggatcagtggtgagtccacaagttttggagaaaagagcattgaagtcggtgacattgaaagggatcaacaacattggacttttgatgaatccgcaaagacaagatagctgagttgtcaacgccgtctctacggctgtgcagcattcctgcgacggaggtcctcgctgagtaattgccggaagacaaacagccaaaccagccgcacagttcatagcttcgttgactgaaggactaggagccagcggaatatgaggtccctgtcctgaaacagtcgtagctgccactagcaatgtggctaggaggaagatcaaggtggtggtttgagccattattaatcgtgggagaatcgttttcttttgtttttgatgcttccttaattagtatgtatatacacaatcaaccgtgaaagttattgacttagtgatagggttatgtcagcttgtggtatatgtatacttctaattggcatagtttattcgtggacttttgtaacacaaagacatattctgttccaaatttgaaacagatatttatatctggcataataatataagtacatccagtgaactaattactaattcacggacattttattaggaaaggacccggcaaagaaaatgattgacaatatgaattgccctggaaaataataataaaaatatagaaagaaccatgatgcacgtcagaattcgaaattagaattagctaatgtaatcaactattattttttttcttaatataaaacctatgttcaaagtggttcatacggtcactatgaatctatgatagtttacttcgccggcattgaaaatgctgaatagtagtgaaaagttatttttaaaacatagttggtgcgatgaagaacaaattgacaaagaaatggtaatatctatctataataatctgccaatgctagaatatgtggagccgcaaaatggtggaaaccgccagaaaagtttgtaagagtttttacatttgtgttattgctgactaagcttcttagtttttttttatttagtgacaaaccattaaattttattaaatgacaaaaacgcatgctatggtttcgagtttacgggattacgggcttcggcccagaatctcctggtattcaaaaaaaaaaaaaaaaagacaaatgatatgctaagaaaaaataagaaaagtaaagagagatgttttttttttagtgagaaaataaaaagaaatgttaagataacattaaaaaggttattttaatagtatactattttattttattttgaacaacaactcttctattagaattaggtttccatacaagaggccaaaagagcagtttttgctaatgcattggcttgctgattgttttctctaggagtaaaattgaaagaacaacagatgaaattagatgataaaacttggtttagccgtttaaaagtataatattacaatacacatttaataggttaaattctttggttt

SEQ ID NO: 20167 - DNA, 428 bp, Arabidopsis thaliana landsberg
  unsure (1)..(428): unsure at all n locations
aagcatcccactgtagatgaagatgagtaacgagcagaagatgctttacaagctccaaaacatcttgtaaacggacatatggtagccgatcgtaggatatacaattatcgtacatagtagggactggagtagtgagtatggaacctcaattaggacctgcaaaacattaaattcctggattatgtagagagatatttgctagtggatgctatatccaagaaaattataaacagcctaagcgatttgctataagatctatttcttaaaagttgacatannnnnnnnnnnnnnnnnnnnntgttaacctgagaaaatgaatacgcccatgaggagtacatccgtgcaaacctttcacggtagaaaacnnnnnnnnnnnnnnnnnnnnnnnnnnnnnnnnnnnnnnnngttgttcattcccgggaagacta

SEQ ID NO: 20168 - DNA, 2310 bp, Arabidopsis thaliana landsberg
ccgacgaaagcccactatacatgcaaagcccacagctgcttttatatatctctcttcttcttcctctacaatctctctctacaacaaaatcagcgacagctcaaacgtcgatatttttctccggcttttctagggttttaattttctttccgatcagagattaatggcgactctagactccgacgttaccatgattcctgccggagaagcctccagcagcgtagccgcgtcgtcttccaacaagaaagctaagcgattcgaaattaagaagtggagcgccgttgctctctgggcttggggtaacctcgaaaatccttatacactatcttcaattggtctttcgatgtttcgatgtttgtgttacgatgttaatttttggttaggttaagagttttattgattgattgatctttgttttggttgcagatatcgttgttgacaactgtgcgatctgcagaaaccacatcatggatctttgtaagtcttaaaacaatcgattgattttggaatttgtaacgatgatgttgaatgtttatgcttatttcgtttttgtgttttggtttgttgttaggtatcgagtgtcaggctaatcaggccagtgccacaagtgaagagtgcactgtagcttggggtaagcatttttcttcttctatgatcatgatctcaatcgttgctttttgtttggaaacttgatttggtttataattgtagctatcgtaattgtgaatctagaaacacaaaactgtatgcgaaagtgttgtgtgaaacaattttagcatctctgagtgcgtgttttaaaacttgacattgaattttacttatgtggtagtatcactctgatagatgtctttgctttatttgagagcagaccctgttccttgttttgcagcaatctagattggtcgatgagtagtacagttgattagatttatggagttttaaagattttctgagagagagagagaccaaattgtagttattgtgtttacatgctttcatagtcttgcagttgattgtacgattgatgatgaattaaaaactcagaggacgaccaaaataactgcaataagtatttctgtattcatgattgctcaatgaaagatgaccacttggagggtgaatcttgttagctaggaagtattagagaaagtaggaagtattcctttaagatgtatgtgattgtgtgatgacctttttgaatcttttttctataatgtgacaactcaagtggatatacataaattatttagtgccttccctaacgaaagatactcaatatgtacttgcaggggtttgcaatcacgccttccactttcactgcatcagcagatggctaaagactcgtcaagtttgtccattgggtatgtgtttcttggttttaagcttcttgactagtatgcagtttttgtttgtttgctaatattgctgagttgtttcaacagataacagtgagtgggagtttcagaaatatggtcactaaatcaacaaatggttccagcaagcatgtgtctaatcgtgaagacatcaggttcatttggttaccaccgcatatgataactaaagattgttcaagtttttgccctttttttggtactgtattttacaatttgtggaaacagagatttactgttcagtgttcactaaacctattatggttgtgctttgggtgacgtctttgatttcaaaattaaaaagtaaaaatcctgcaaagagttttttactcgtaaaaaaacataggagctgggtaccaaacgctcttttgatcctcaattgtgttttccttcaatttagtagttccaaatactaaagtgaaatttctagtaaggctaactcgaaacccactaagattataaaccataagttttattaaatgggtctttcaacccctaaacaaacaatactagagcattattttgacaacacagattcttaagagaaacagtaaaaactgaccacttgaacacaacatcgaggatcagaagagcgtgtacatgggcgtcgtctcagtaaggatcgtataacccaaaatgctgatagattccaactggcttctggttctcattgtacgtctcaaatatatacgcatcaattctactatttggcctcttaggcgttcctttaccacttgcaacatgcttcacaaagttaccaatgtacgtatattgaagagccggtgtcgtcatgcctccattcccggcagagggccacccggtcttcgacaccaccaaaggtaaacctttcactccctctttctccattgcccacagaaaagcgtcgaaaattgcattaaacaagttggaatattttagt

SEQ ID NO: 20169 - DNA, 1075 bp, Arabidopsis thaliana landsberg
tcattaacctcaaaagtttttgattccaacatcaatgtttttaatttttcctattttcccaaataaacacaggactagcctaatttcaagggagaacaaaactagcattctccttaatcacatgtatatctatcacatacaatgttaaccaaacgaagcaaataattttgtgaaagaaaacacaactttcccagagcgctcctttaacttgatgaatcttaccaattgcgtatcaacggctcagatgtcatcaggcataatgacgcggatagcaaacacatccaacggtccaaaatcattaaattataaacacgcggatagatgataacaaccgtcgataaactcagatccaacgacacacaacttcctaaagttttgtaaaaaacacaagcactcctcctcttctcgtcgtctcatcctatataacaaactcaattttcatttcgatcaatcaacacaatttggtaaaatcaaatagtctttttactattttctaaggttcgaatttaatttcccaagagaaaaatgtcaggccgaggaaagggaggaaaaggattaggaaagggaggagccaagaggcatcggaaagttctccgagacaacatccaagggattaccaaacctgcgattcgtcgtctcgcgagaagaggaggcgtgaagcgtatcagtggtttgatctatgaagagactcgcggcgttctcaagatctttctcgagaacgtgattcgtgacgccgttacttacaccgagcacgctcgccggaaaactgttacggcgatggacgtcgtttacgctctcaagagacaaggacgaactttgtatggattcggcggctaaatcgttcggattgcaatttcggattttgtaaactctttaatttcaagttctagggatttcagatttgtaatttctcagttaaacgatgaatgaattgaaaaaggaattatcttcgagtttaatttttaataatatacagtaatcaaaacttgatttaactaatcctctgtttattacgaaatcattctaataatcgtaacgccactttcgcgtttagggtgatcctctagagtcgacc

SEQ ID NO: 20170 - DNA, 2136 bp, Arabidopsis thaliana landsberg
tccaatccccagcatgcgaaaggccaagttactggtatggtttgtagctgttgtgctggcatgtgctgtcgctttgacaggtattgcggaacgtcgcatctctgaactaactcggctgcatcattcttcgcgtcggccaatagaatcatgacctgaaaaccttcccgactaatgttctggatgctgcgtgtattccacactgccctgcatggacttcctccagaagttgcttcccggtggacgggagaacgcacttcatgaggacgcctgacgcgcccctcctgtataatacctccccaatgagtgtatagtgagctaattgtctggcaatgcgctctgccgagttcttgtcatctggctcttcttcattctttatatacttaataatcggttgcctccagtcatcagagtctgactcgggttggtctatgatgttgcactcttccctttgatccatcgagatgctcggctgaaggatttcttgcacgaagaccccgggcgggacttgagctcgaccagatccgagcttcgacagtatatcagccgccgcgttccgatctctttctatatgatgaaactccagaccttcgaatttatcttctagctttcggacggcagcgcagtatctccccattgaatcattcgaacaatcccattccttgtttatctgactgatgactaccagagaatccccatatacggggggtctcttgatgtccagtgatatggcaatgttcagtccatgaatcaaagcttcgtactctgctgcattgttggacactgggaataacaattgaagagcatatttgagttgttcacctccaggtgcaataaagaggatccctgcacctgctccctgcagcttcaacgagccatcaaaatacattcgccatacttctgcagcttccgggttatcgggcacttgttgctcggtccattctaatacgaagtcaactagtgcttgagtcttgattgcagtgcgaggtcgaaactcaatgtcgtgagctcccagctcacaggcccacttggctattcttctgatggtttctttgttgtgaagaatatcccctattggaaatctagtgactactatgactttgtgatcgtcaaagtagtgacgaagcttgcgtgcagttagaagtattgcatacaataatttttgaacttgaggatatttcttcttcgagggacccagacttcactgatgaaatagactggatgctgtactgggtatgcatgtccttcttctgctcgcttgactaccaacgcggtgctcaccacgtgagtcgtgcaagagatatatagcagcaaatcttcagccggctgagtcgggtagtcgccggggcggtttcaatactggcggtgttgtcaggaatttcttcagtgcgtctagagcttcttgtgcctctgaagtccattgaaacttatccacctttttcagtaatttataaaatggcagacctttttctcccagtctggatatgaatctgctcagggctgccatacatccagtgagtcgctgaaccttcttctgtgaccgaggagcttccatcttcatgatagcctcgatcttttctggattggcttcaattccccggtggctgataataaacccgagcaactttcctgctggtactccaaagacacatttttcgagattaagcttccatcggtatcgtcgtagctattgaagaccagctgtaaatcttcaataaaatttgattatttttttgtcttgatcaccacatcatccacgtaagcttccacacgcttgccccagtggtcggctaagcatgtctgaatagccctctgataagtcgctccagcgtttttgaggccgaatgacatggaggtatagcagaaggctccgaacgtggtgatgaatgatgttttttcctcgtcttcttttgccaagataatctgatgatacccagagtagcaatccaagaaagacaacatagaacttccggcggttgagtccacacctggtctatcctaggaagcccgaaggatccttcagacagtatttgttgagatccgtatagtcgacacacatgcgccaatccactttattctttttgagtacaagatcagggttagctaacactcagaatgtaacactctctaatgaaccag

SEQ ID NO: 20171 - DNA, 1074 bp, Arabidopsis thaliana landsberg
ttgcatatgtcaacccgccaccggggttcttaagaccatatcaggttcacgcgaaccgagagcacagatacaccaccgtccagcctcttgctacggagggtacacgctactctcgccaccgctccacacccattccatgttatcttattctagccttactgtgcccgaggcaagtcttacccatgacgaggcatgtgaccagttaaagggtccccggtcagcaggcctacatcgagacggtccttaatcgactcagacggagacactacaccgagactcctttctcgtgcaagtcacccgcccagtctcggcttaatcatttcaaacccaaagtttggtacctggcagaggtacatcttttccgatgttgaacccatcacggccgtgatggatccaccatcaagttttatttttgaaaacatcccatccacttttagcgcatcatcttttgtaaaaacaaaacattttgttttctaaagcaaggctaagcatcaaaatcttttgtaaaacgggtgatcaaggaaggtaatcaaattcaaggaaggtaatgcaggaattgttttagcaatcaactcctatcacctaatgcatcaagcaagtgagaaagatgtcaaaaatatcaagggaggtggcaaatgcaccggggcttgccttcgttcacaggtgagtcgggttcggatccacagatatcgaagtacaagcagttgcctgcttgcgaatccgaaggtggtggtgtcctttcttcggtgacttctatttcttcttcacgttctaatcataaccatacataggtataagaatggatgccatgggatgctcatgaggatgcaaagataatataaacttattatctatgtcttgaatacaactttccttcacggaactccgagaacttagggtttccggagtcggtaaaggagttcaaagggcagggggtggttttgggttctagttatcaaacatggtccaaatcaattcaaactctacccaaggcttctaaatattgttttaagttcccataaaaagtttgggcatttttggacttaccaattattttctaaaaatccataactg

SEQ ID NO: 20172 - DNA, 579 bp, Arabidopsis thaliana landsberg
  unsure (1)..(579): unsure at all n locations
gaagcccgtggggaggaggttggagctggtagatgaagactccgaggaagatatggcttcaccagaggaagttgatcaaacggagaaaggaggcgatgatgatttggaatcggagaagtgtgcaactcgaaatgagtactacaagctgctgaagggcaatgagtttttaggaactcggtaccgtcatcccgagaccatggagagactccgcatctatgatgatgtagactacatcactacaagaatatggtgcatttgtagcgcccgaaaaacgctatttaattatactatagcgttattagaagtgctctatcatcgtccgtcattataggtcagagacatattgtactgcttttttgttctgctatcattatttcatttattacagcgctttatctgctgcaatcttttattatttaatagcgattagtttctgatataaataactattatacatagcatatttaatatgctacatataattagacaatagcatttagttaattgcaaatttatatattatggcattttttattatgcaatatttcttcaataattccagntcataaattaattttt

SEQ ID NO: 20173 - DNA, 1432 bp, Arabidopsis thaliana landsberg
acaatataatatatataatattggtgatgagattgagttccgaacttatacgactgcagtaactttttttcctttatacaataatgattaatctaccaatgattagtagtaatatcatatgtttactttaatcactttttcacatttgccagaagaaacaaccttttatggttacgccatgtgggtctcttgttagttgtttctaccgcatataattattatatttaaataagcatttatgacgaaatctgatctgataagtgctgcaaattccttgattcgaattgtcacattacacatactaaatccttatcagtatgactttgtaaatgttgtcctagtttcaatatttctcttttgcgtatttatttacccatgatgatccttaatgatgtagtattggaactatagaagatcacgtcatgtggtcgcgtgagatttgaaatacgtggctcaaccctatccgatttttaaaactaaaccatgtttttacatagttgttgattgtcaatccggtccgatttcaaatggctgggctttaaactaattgttggacacgagacaaagaacccaatgggccgagcccaatttttaaacagttccaaaacttgaattatagtttagtgagaaaaaaaagagttaatgcgagctttgaatgtgtcaatcgaatcttatctaccactgattaaagaagttgaagaaattctggtgagagacgaagatgtgtgtgagtgtgagctcgaagccctatccgacgaaatgtatccgacgagtttcgatcctaaatctgttcttgaagaatctgaatatccccaattgtcgtgaatctcaggaacatcttcgtctctgttcaggtacctgagcaccattctcatcagcggccgagattccggtttgtggtgacaacagagcaaaccgacggcgagagctagccttgcctctccttcgtcgtaaccagatccgagtctcgggtcgatcgcactgaggatctcaccgctcgcttgtagctccataacccagtcggctataaagaaggtcccagagtccgtcggtttcctcccggagacgatctctaacagcaaaacgccaaacgcgaaaacgtcggaagctgatgaggagtttccgttgcgggctagctccggcgccatatatccaatcgtgccgacgactacggtggtgcacgattgagatccgcgttcgtaaagcctcgcgagtccaaagtctcccaatctaggattcatatcggagtcaatcagaacattgctaggtttcacgtctctgtgaatcacgatctgttcccattcttcgtggagatacaacaaaccagacgcgattcctttagcgatttgaaaacgcgcgttccacgacaaaacggctccgcttcttctgggtttactggaaagcagcgagtccaagcttacgttgggaatat

SEQ ID NO: 20174 - DNA, 260 bp, Arabidopsis thaliana landsberg
  unsure (1)..(260): unsure at all n locations
gtgcttatatggagcatattattgttgtttgcttaagaacaagttataagagtgatgctgatgaaatgttttgggggcatttcttgtggtgataatagctgtggatatatcagacacagacagcgaagaatcagaggtcagtggttctgatggagaggacacctcgtggatatcttggttctgcaaccttcgtgggaacgagttcttctgtgaagttgatgatgaattaccatccagggatgagctttnnaacttgtgtg

SEQ ID NO: 20175 - DNA, 474 bp, Arabidopsis thaliana landsberg
ggctagtgtcttctcatttccagtctctgttctatcggaagatgactatattattgtcctctcatatgtgaactccacaaagtacttagcaactttctctgttttattatatttcttacaaaaactcacatcttaaagctcaaaacgtttttttttgttttggctagaaaccccaaagcagctgttctgaaaagtgagacaatctttaaccagaaagctcctgtcgtggcttcctactcttctcgtggcccaaacccactcattcatgatattttgaaggtatatacagaaaagcagaaaaattaaattactcgtattggtcattctaacaattctgcgttggattgaatgtgaattggtattacagccggatataacagcgccaggatcagagattcttgctgcttattctccttatgtcccaccaagcgaatcagatacaagacatgttaagtacacagttattagcggaac

SEQ ID NO: 20176 - DNA, 2914 bp, Arabidopsis thaliana landsberg
acgaatccatagagtgccaagagagattatatgagtaatgaatgataggcagagattttgagcatttacaacataacatggagtatatgaaaataattaatgaatcacaagacaatctcaagctgtccgaattcaaagtcaacgatcatcttacccccgtagcttgcggatcgtgcctaggagttttaatttagactaatcagacgtttcttaatgagggttagattggcgttggcctatgcaacgtgcacttttttactttaaaaaccatttgaaattaggcgtgggctgagtcagaataactgattcaaagcaaagtactctctggaaatatctaatataagtggtaccggcaaagggaagatataaaattgtcaaccgaattacttgtgcatgatcaaaatttatactgtacttactttcaactaaggttgtggactatttagagaacaaagaaaaacagagaagaaacagaagacaagaacaaaactttgttttattgaaactgaaacttgttggtttctcgacaactttgcattgagacaacacgttgccattatatagttttcttcatgacaaaaccgacccgatcgtaacagttgtgtcttatccaacaagtcacaactcttactcacaccctttcatagcaagtcatggttaactcaaacactttacacacgaactaacatatatctatcataagatttaatcatggactcgaattctaacaagaaagagtttgacttttagataatcacagttcttataaaactcaaatatccaatttttaaacagaaattgggttaacaagaagagaatttgcataattgagaattcagtcgataaattcaaacctttcccaatagaaaacaaaaatcaggccacaacttaagaagaaaaaactaaccaccatgactgagatatcatctatgatcaagcttcaaagcgagaagaagcgtgaaggaaaagagcaaacaatgcgctgaattagagacttctagactcttcaacgtacaactcattactcttctctgcaccaatattcatagtaacttcaagtttgaaacacatcatggcttatatcaaaatccatctcaatttcacagtaagagagccaaaacaaaaacctagaaatcttcctcaaaactcataactaataaaaattaaaactaacaaaccaattcgaatgtaaaagtataattttcttctccaagttttgcttaggtgtcaggtttggagagacatggattttagtttaattgtattgattcaacaatattgctaatattacaaagaaaaaaaaaatcattaaaatatacattgataactttaattgaacagagtaaagtcgtgtactcaaaactcaattgggatggagacagagaataagaagaagaaggagatgatttgattttcttaacagatgatctatgggcaattaaacttgcgagattaccactaacaatcatcaccacttcaaaactagtttgcaagcaatggaaatcgctcgtagaatctccgtttttccgcaaacttttcaacacccaccatcaaaactctcattcttcatggtcaatcctctgcagagtcctacctgaagtagtcgtggctcactacgaatgcgaaacttggggtcttccacgatctctaagttcttacatctcttctttcataacccacaaattcaatactcaattcccaaacgttacactcgccgtggcttacactcatgttggattgattttgatcagctctggcaacaaattactaacttactatgtggctaatccgatctcaagacaatgtgtcgaaatccctcagcctcctccaacagttggttattttttaacctctgggcttgtcacaaaacttgaggatcacgtcgttttaggttacaaagttgttttgatggatacaagtaacttggacgatgtcataagtttactgatatattcatccgagacagggttatggagtttcaaaaccctccaatctcatctcactttgtctggtctgatagattacaaccctgttagcttgtatggaaacctttactggataggctacaacaacgactatggagaggttgttgtgttccatgatttctacgcgactggcacggaatctgatcgatgccaagttacacctttccctgacggtggaacgaaaccaccaaatttaaaatgagtttgcacaacatctcaaggatatatcatgtacatgaacatcttctcccaagacaaagatgatgcacatgtagagcataagttacgtgtatggaggctaaagagccgggaatgggaaatagtatctgaaatatctctagcttgtagtgagactggttttgattacattccgctggcaataaacccttttgatgctaatacaatgtacatgtggtgcaagatgcattcatgtttggggtctactaatttgcgtaaagacaagttcgggcttcacaacagcttggaatgttgcaaagattatcaaactctgagttttgctggggattgtaacatgttggaagacctttatcacttatacttttccatgttcgttctcccgcgttggctacaccaaatcccttcttcgccttcatgagcgaggtgaagagtcgtttcaagaggaacaacgagttggagaatggtgtttgatttgttttcttgtctaatttaagatagaaaatatggttgtggctatatttttagttttaaaattgcataaactgtacatctctaatgcacaatctatggctcaagtatccatcattatctctaatgcgcaatcttaatgaagctagacaagcatccattagctaacgaaatctagaaatagagaagcgcaaaattacatcgattaaaatctagtcccacaagctccatcatcgattggtgtataagcatagcatccacac

SEQ ID NO: 20177 - DNA, 622 bp, Arabidopsis thaliana landsberg
aggtccaaaattctgaaatataagatttgtaaagaggtattaagtgtaagtgcttatctggttatgactattgcagtggacgcgatcattggctcctgaaggaggaagacattgacagatactcgcgcacgttgccaaaatgtattgtccgtaagctcgacgacaatggacagtttccccttttggttagtgatatctcttcatccaatactgatactagttttctcatgtcaattgagaatatcggatcattcataacttacacttcaactatctcttttacatctcatattaggaggacggtgtagatcttgctactatcatcaagtgtacttgtttttatcgccgtgggaagtctcacgatcacattacggattacattatgcctaccacatttgagttaaaacaacaagtagacgatcaccggtaagctctgagttatattaaacaaaatcagaatatcaagtaaaaagttataggggatactgaatgatatattccgcggtgcagattgctaatggatggtacttctcctgtaatgctgtcaactctagaagacggaacagttgtaaggagcctcgaaggattaccttcagagggacctgttttgtacgtggcctga

SEQ ID NO: 20178 - DNA, 336 bp, Arabidopsis thaliana landsberg
taatactcctatatctaaaactaattgtttgttttataattagggaaaaatattattttatacgcgaacttttaaaaagtagtcaatcaatacgtaaattttgacatctgccaaattaaacataaaaaacacgttgaccagccattttatcagcagcatatcgttgtcctacccaatatcctgggacgatagtattgtgtgaagatgaaccccttacctcaatccgggggaggtgtcgctttaacgtgagggttttgcatcaggggatttggtggtggatagatccagacgatgggtcacagttagactgttaacctggtgcggaatcggtcctgt

SEQ ID NO: 20179 - DNA, 1210 bp, Arabidopsis thaliana landsberg
  unsure (1)..(1210): unsure at all n locations
ctctgttttattntttgggtcaaagtcttcaaggagaggactgtttccagacactaaataanagtgtaagccaaggcaaaagcaatgaaaaagaggaatctgataatatttacaatggtccaagaggacaaaaatgatattatccattcttttttactgatttccctgttcaaacgttgtttatctcaccctcaggtacccgaacgatgtctatgatcgtcaatggattgcgttcttttggagggagtggacccagatatcaaccagtagcgatgtgggaacttccaacaattatgaactaccaaaagccgcacttgcaactgcagccatacctactaatgccagtgcgccgctgacgattgtatggactaattcagataatcctgatgcccaatattacgtgtatagacactttgctgagatccaagacctgcagaataatgaaactagggaattcaacatgctatggaatggagatgttatgtctgctaaccctgtgattcctaataagctagatataagtactttctacagcgagtctccaaggacttgcgatggaggggactgtacttttcagctgaaaagaaccaatagatcaactcttccacctctacttaacgctcttgaagtcttcacagctatccagtttccgcagtctgaaacaaatgaaactgacggtatgtttcaaccttatgcatataatgtctaattctatttaatgtttctctctgacatattagaaattatttatgtcagtggctgctatcagaaacattgaagccacctatgaattgagtagaataaactggcaaggtgatccatgtgtccctctacatcttaggtgggacgctttaaactgcagcaacacggatgcctccacaccaccaagaatcacttctttgtaagtcatgagttcactagtacacatgcacgcacagtcactcttcaaatccgttggtaatcatgatcattaacaactttgaatgtggtnnnnnnnnnnnnnnnnnnaacttgtcttcgagtggtttaactggaaacatagcagctgccattcaaaaccttacgcaactagaaaaactgttagtatgtccattgttaggtgtaagcaaaaattgttctatatatgcgaagaaatcagatgtaataatagcatagataattctctctttgctaacattagggacttgtcgaataacaacttgaccggaga

SEQ ID NO: 20180 - DNA, 500 bp, Arabidopsis thaliana landsberg
  unsure (1)..(500): unsure at all n locations
accttcttgtccctaacttcatcatcctactcatacaaactgttgttccccatttcgatcagagactcctcagtgacctgcaattacatagagagtgaatgaagaaagtgggaagctacaaaatggggaaaacaataaaaattgaatcatacatcacgatcttgntcaacagcatgaacatcagccaggagatgggattgacgaggaatccacacattatcccagtctaatataactgtatcgtccgaagggtctgtaagaggaagtgccagagcaggaatgttcctataggctaagagttgtaaagcaagagggaagccacgcaagcgaaaagacctctgttgtaggtnnnnnnnnnnnnnnnnnnnnnctgtttcaagattagacccaactgtcctcgaagggattagtgacttgatggttttgagaaaagactcccgggcacatggaaatttaagaaaagaatcaatgtcctccaacatttcaacatacttgtatgt

SEQ ID NO: 20181 - DNA, 1102 bp, Arabidopsis thaliana landsberg
atcatttcctatgattgatccttgataatggtcagctagctagttacaaattttattatattaacaaaaagattatatattagtgttaaacattatatattttctaattatatttagaaaatgtttgataatatttcaaattaaataaatctaataataatttataatatcctcaacaaaagaagattaaaaaaacaatggaaaaaactaaactggaatcaattaggaattaattagaataatacacaaaagtgttagaatatatagtctaattgtcaagaaatatacaattttaatttggtcaatatcgacacaaagaaataggtaatgaagcatgaggtattgatcgaataaaaaacaattggtccagagtccattcatcagtttggttttctaacaattgatagtggttatatcaaaccttgtattcatacattttgtactagttgaagtaaagagttaggcgattgtgatatcactaatgaacaagtctaaattccgtgtcgaagatccaccaggtgccaacgccaatctcgccacgcgctttagctccgccgctctccttcttatatccacggcagcgggtccctccgtcacggcctcaatgcatctttctacttcttcgaccttaagctctccatcgacactgtcattcctcatccttactccgattccaaacacatccacaagcagtctcgcatcaagcggctgatctatccaagtcggatacgccaccacgggaacaccagtcaccaccgtctcgatcgtcgagttccatccacaatgcgtgatgaagcaagaaatcgccatgtggctcaatatcttttcttgttgaccccattcagttacaacccctttaccttctttaaccatctcctgcaaaacctggacgttttcgcctttctccttcggccgtatcacccaaagaaatggaactcctctgttttttaatgccgttgctatggtctcaacttgattctccaatgatttgagtacgcctccgaaagatatgtaaacaactgaagaccatcttacagtcaagccactccatacaataatcatcaactttccacatatctagggttttttcttcatcatttcc

SEQ ID NO: 20182 - DNA, 809 bp, Arabidopsis thaliana landsberg
aggcaagcttcgtctgatttttttaataaatcttagctgattagactctatcattgtaaaagcgttaactatgaattgttgaagtaaacgttttgagcgaaggaggatgtgcttctcatcttttctctcttgtaaacggtagtcaaaccactgcctcatactaacatcttcatgcttcttctttccttttggagttttggtaggagttttttattccaagcctatacccatcctctccttttggaaataacaatggatactgaagagctagatatgaaacgtgacattcatgtattctccttaactttccagacttcatctgtagaactatatctcttttatgtagattgtcgtcgaaatctccaggtatcaatgcagcaacttgagctacagatggaaggttatacactctgtcatatgtctcgcggttagatataatcctcatatgaaaatttgcctcttctttctctatgttgagtctatcacgggcaatcctaaaaatttgcaacatgagggtttatcttgtccaacatctttagcaaagctgaaactgtttctttcttaaacttttgtttcccaccttccatcccgccattattacctgtgctgcaattttgtatatttacaaaagacatttaataagtatgatgtattagctgctcgtaaaataaatctttttcataaagttcatttataacactatcccttgcctcagtgcttcaattcgcttgtctacttcattacagttcctgaaaaaggagaaatttgataatcccaggtttggttcacgcgccttcaagtaatgtttt

SEQ ID NO: 20183 - DNA, 3997 bp, Arabidopsis thaliana landsberg
cgatccagaagctgccagccctaacttgaaccacactccaagcttaccagtcaggtatttatactcaatatttatgatgcccaatcccgtttatcacttatgttatagttattctcatgaaggttctttatctttaatttctgcagtacaaaacccttgccggaactaccaatcacggagacgacctcgtccattcatcaatcagtaaaccaaccagatacgaccaaacaggccaaagtaacggtgggacgtctttactctatgatccgtccggattggaaatacggattatgtgggacgttaggttcctttattgcgggatctcaaatgccgcttttcgcgcttggtatcgcacaggctttagtatcttattacatggactgggagacaactcaaaacgaggtcaaaagaatctctatcctcttctgttgtggctccgtcatcactgtcatcgtacataccattgagcataccacctttggtattatgggtgagcgtctcactctccgagtccgacaaaagatgttttcaggtacgcacaaacacaaaaccgcagtctagctaaatcctacgattagttgtctttacattggttgatttaaatatgtgattgttttcttctttgtttagcgatcttgaggaatgaaatcgggtggtttgataaggttgataacactagttcgatgttggcatcgcggcttgaaagtgatgcgactttgcttagaaccatcgtggtcgatagatcgacaattctacttgagaatttaggtcttgttgtgactgctttcatcatttcttttatactcaactggcgtctcactcttgttgtcttggccacataccccttgattataagcggtcatatcagcgaggtaaaacgcagctttttgcgtttttacatacttttttttggtcgtcaagtaagttcttactcttttcttcttggttgcatttgttagaaaattttcatgcaaggctatggaggaaacttgagtaaagcgtatttaaaggctaacatgttggctggagagtctattagcaacatccgaaccgtggtcgccttttgtgcagaggagaaggttttagacctttattctaaagagcttctagaaccttcagaacgttctttcaggcgtggacagatggccgggattttgtacggtgtttctcaattcttcatcttctcctcctacggccttgccctctggtatatatataaactgtttcacacaaagtataaatttgtgtagattgaaacgttattgaagctttaaatgttttaataggtacggatcgattttgatggagaaaggattatcaagtttcgaatctgtgatgaaaacattcatggttttgatagtaacggcgttagtgatgggtgaagtgttggctctagccccatatcttcttaaaggaaaccagatggttgtttcggttttcgagctattggatcgaagaacacaggttgttggtgatactggtgaggagctgagtaatgtggaaggcactatagagctcaaaggtgttcatttcagttatccttcacggcctgatgtgactattttcagcgatttcaatctactagttccttctggcaaaagcatggcgcttgtgggacaaagcggatctggaaaaagttcggttctttcgcttgttctccggttctacgatcctacagccggaataatcatgatagacggtgagtgctagctcttgacagaatttcttctatcacaaataactctgatcacaggtttcttgcatcacaagaactttgtttatggacttatggttgagtgagctaattctgttttcaatcaataaaattttattgcagggcaagacatcaagaaactgaagttgaaatcactgcgaagacacattggtctggttcaacaagaaccggctctgtttgcaacgactatctatgagaacatcttgtatggtaaagaaggagcttctgaatctgaagtcatggaagcagctaagcttgcaaatgctcacagtttcatcagctctctccctgaaggttactcaaccaaagtcggtgaacgtggcattcagatgtcaggcggccagagacagagaattgctatagctagagccgtcctcaagaacccagagattctgcttcttgatgaagccacaagcgccttagatgttgaatcagagcgtgtggtaagctttcaatagcgtttagagcttggatcaagattttcggcaaagatttacaagtttataccaatgaattgcaggtacaacaggcaaagatttacaagtttatactaatgaattgcaggtacaacaagcattggatcggctaatgagagaccgaaccacggtggtggtggctcaccggctatcgacgatcaagaactcagatatgataagtgtaatacaagacggtaagatcatagagcaaggcagccacaatatcctcgttgagaacaagaatggtccctactctaaacttatcagtcttcagcagcggcagcgccatcatccttaagagttattattgaattatcaaaactcttggttttttttttttcttttctaaatatcgatcctacatttatattatatgattatgtaactcatatttgattatgctattcattcttgattcattgttcaaggaaccggtctcaaaacagaacctctaacactgtaggaaatatcaaaatcaaataaaatagaggggaaaaaaaagtaacgattatttattgaatctgaagaaaacgttaggggaaagagaatcgaacaacagaagttttcaagaaattgcaagtatcttatagcttgagtaatcttaaccacagtaaataaaggctctaaaacacagacaaagttttggtcatagaaggtactgagagaagcttatgctgctgctgtgatgtactggattgcctccttgcagatacctgtcatggttgcttctgggccatagacctcgatggggacaccgatatcatctccaagggctcgcattttagcaagtcccttttggtagtttggtcctcctctcctcacaaatatatgcatccttgctgctttcagctttgcttcctgttgagaaatataatcacagtatgacaagatgttttgcttttgatcctctttactcagtaatgaatctgatagacgttcgaggtttcttaagttaccttttctttaagagcgcggattatgccattgaaagtagcagcaacgtcagtgaagttggcaattccgcccccgatgacaagggctctgctttttccatccgggtttgctgtagcacactgcagtatattgtattgttattgttcagtcacatgaaagaaagtcttatggaagaaaataagtaaatttttcttacatcaataacgactctggcgtactgcaaaacctcatcttctttgggtgctccactgtattcagcatagttgccaagttcagatgcatacccgagatctccaacctagataagaaattttagtgatggacttgaaaagggaaaattttgcagaaaaatgcaggagattctcggtgttcatataaaaacatacggtatcagcatagatgacacttgcacctcctccagctaccatagtccaaattcttcccttgggattcagaacagtgaacttcaaagaggcacttgtctgcatatacaaaagggtcataagtcatagagaaactggtgtttccagaagcgtcaattactctacgcttattggtatgataccttctcatctagaccgtggatgaagctctctgttgaactcatcactcttccaaatggcatgggaaattcaatgtcgccccacctgcaaaacgtaagaggttaatcataccgcccaaactcttgacttatcatgacttcttaaagctcttgacttcggaacagttgaaaaaagtggaagagtcaaaacttacttcttaaagtttttgaaagcagcggtgtcatcaagctcacccctcatatccagaggataaggctttccatcaaccc

SEQ ID NO: 20184 - DNA, 967 bp, Arabidopsis thaliana landsberg
gagaaagctatgtggttgctccttgtgttgtttttgttctgtaagattttcacttgtagcattcgggacggggtgatgggtttgacggttaagcattttgaaaaatttgaagtttccaagcatactcttactgattgtcacctagtggaaacacctcagattatctgtttttgtgaatgtgatgaactcaatcaaatcctggaatttctaaaaaagatcaagtgtgaaagggatgatggtacagatctcgtttgcagagtagtggagagtttctactgtgctacacaagttaaagaaaagctcgactttgaccctcagttttcagttcttctccttgataagaggctgctgcaatgcaaaatttctcgattcgatgatgaagggacaatcagtgtctttgatcccaatgttcactatgccaatgcgcatgcccagggaggttatatcttatcctggttagtcgacaactcttcagaagataagatttttcgatttcccacgcctatcaggatgcataatcttgatatttgggtcgctgttctgaaagccgtttggttgacatgtatgactttggcaactaaatatgcaaagaagtggaagctcctagattatgatgcagctcttactgccgccaaaaatttgtgtattagcgaagatgtaaagaggaggaatctacagaaagatcaatggaccagttatgcatctcttctatgcgatacatgtgaagagcatttaaggagagacgctggaaaatccctgaatgcgaaattattcttgtgtgtagtacaagatgttttcaaaggagcatcatttccgacattaattttctcaattgcatcaatgttatacgtgagcataaagatcttagtgatgatattgtgatccagtccatagaccttttgaattagtgcgcacaaaaaggttattttctatctgattttaataacaacagaaattaaaaatcgtt

SEQ ID NO: 20185 - DNA, 756 bp, Arabidopsis thaliana landsberg
aatcgaagtcgattagggttttgccaccagatttagggtttctaacgaatagattgcatcccacgttagctatagattcaccagtaaccataaaagctgagaagcttgaagctgtctttagatcgagaccggccacgattgtcattatcggaacatataaacctccaccgccgattccaccggcgcttgagattgatgaagctaggaaagagagtaagccggcgatgatcgttgatgttgttagttcgattcttggttggttgaattttgttgaaaaatcgaggtatgagcttgttttgttgaggagttgatcgacgggagaaagaattgaaggttcttgttctgcgattgatggagtcaagaagatgatgaaggagagaattatagggacgaaattgtttctcatttttttgtttgggggttttggttaactttttaaaagtttgggagattttaggagatgttgggatttttatgtatgttatttctgtttataacactttatatatagccatataggagagtgtgtgatgcttggattgtcaagtagaaaggaaaaataaatatttaatagaaatagacatagaaatagaaagaagaagatctaaagagacaaatgaacaattggcaagtggtgagaaaattgaatattcaacattaaaacttgtgtggggcattatgtaatttgcttcccccattacctaattactttctcattacttggtaaaatattatatgtaaaatcagaaattactt

SEQ ID NO: 20186 - DNA, 1244 bp, Arabidopsis thaliana landsberg
tcaaacattcaaatcaatggattatcattagtaggctgcattggacttagccttgtgttgtacgttatacttgctcggcaagtcttgtctaggcctttgagtagtttaccttcgtgtttacgttgtaaaaccatctatcattaacacagaacattcaacattctttataatcgagtcaagtttcaaatggtatcattcatcagagcagttcttctgagacctaaaatacgagtctattgtcgtcttgatttcgaacattgaaatcctttcttaaatcaatggtgtgcctaattttttcttctcacagtatgtcttttacattgaatggtagtattggcatttacatattcggtaaatttactttcatataatgttttgtttattatgagtacaaagagaaatcttgataagcttgagaaattaagtgatgatcatcccattcgtctctgcacgtctctggattggcttccttcctaacaccattcgccaaacacatctctttcctccattcctctgtttctgagcaaccgcattgtgaagccaaccaattatcatactcaaactgcaaacaacaaaaaatgtcattgatgtgtttctgttcagctttggtttatttttttaattttatgtgcggaaacttgggatgtttaacctgagtattgcccatacgatgagtatatcgctttggaatcccttggacttcaagtgtggagtaaaaggttttgatttccatgatcatatcttccttggaaggaagcgggatccaacccgataaaacacccgcgatccacttgctttgcagctcaaacatagggaatggtaacacctgaaatctaatttgttatgacttaaaatgttgaggggaaatgtgaaaaagtaataagagctatttataggtatgtaacctgccatggtataccgatgaaggaaagccaaggtgcaaatgctggagggaagacgtctttgtacaatggcccaacacggttatcatctacagtgacaattccattggtatcaagaaacggaaaatgatacttatacctacgaaaagtaaagcgctttgtcaaataaccacaccatgcatgatatatgagaaactaaacagaaactaaactaaagaaagaatgtatacccagtgcaatgcataataatatcaaccgaaatcgtcttcccgttctgataaacaacagagccatcctcatgaacactctcaatctgcatgacatttaagaaaacataaaatt

SEQ ID NO: 20187 - DNA, 1046 bp, Arabidopsis thaliana landsberg
ctagaggatccccctgccatctttatggcgttctccttgtttacgaaggccgccctctcggcctcctccctcgccagaatttccgcggtgggttcggagagtgctttattcttctctcgctcggcgtcctgcacccgggattccgcctcggccaacttgctaaccacctccatgttgattcgcctggccgaatcatacgaatgcaccagtcggttcatcgaggcgacgacctaaacaagtaaaggataggattataggattgaaacccaagacaaaccatgaataaggaaacattacccgcaagaagtgagaccccgtctcggcgtacttccccgactctagaagagtatctggaggagggagaaaaggacccacgcatcccccgaggaggttgaccgaggcgacacgatcttcaaagatcgagagctctttctccacatcgatgcccgaggtcttcttcttcttgttctttttctttttggacgatgaatcgtccacccaaacacatttacccaccgctttatcgctcgctggcagcgcaacgaccgcctcgggcgcatgcgcaactgaaggcggatcggcttcctgagcttcattaggcaccgtctcaaccggcgcaattgcatcaggaagacttcctcgtcctgggtcgcctcgggagcgacccgcagtgaaatcagccccgcttcgttaagacgtttctctccgccaaacgcctctctttatcttctttcggcttcgtgtagaccttcctcagagtaagtatggttgactgcatatccacgaagaattgagtgcgatgatctgaatacttagagctggaagggcaaggaacaccgtgaaacaatcgaaacgcttggtgaatttgatctcggaaaaagtgcttcaaccagtcgcacttcctagctgataatgcgtgataggccaaaatgaagtcctctggaatcggttcgaggaatcagattagtgcgttctgcaaccaagaaaaacacaattagcacattcataaaagtcacttcgggcacaaacaatattttagtcacaac

SEQ ID NO: 20188 - DNA, 447 bp, Arabidopsis thaliana landsberg
taaccgaaattagtgctgagtaaaaaaatttagagaaaattaaggaagttttcgttcacatagttggcactgcgttttatgaaagaggctaataacattttctaacctggaaacgaacagtgttaccaaaaactattttgagaacttggttagagcgctggagaatgggctatcggatgtgaactcgcatgatgcatatgatcgaacttcaagttcaaagagcttaggggggaagactaagggatcgagttctaaagccagcagctccgattcaagccattggccttgtgaatattgcacttacgtaaatccaaggtcgaccaccatttgccaaatgtgtgaacatggccggtgaaatgccataaactggcattaaagactgtattagtaatgcttcttcgcttttggtcataattaattttcatgagtcgtcgtaatctttgatgt

SEQ ID NO: 20189 - DNA, 523 bp, Arabidopsis thaliana landsberg
  unsure (1)..(523): unsure at all n locations
aaactacacaaagcctgaaaatgagagaagttacacacttatccaaaatagttatagattcatcatttaccaatcctcactccagattaactaactaataaatcgtactcgtttcgcaggaacgacttggatctttgtcggatggttgttcatctcagggggagaagagttacagaggtcctgagatgtttgacgtagttgttatgggtttggcctttgcgtaatgatatgttggccttgggttgcatggcttgagatgagttgcatcacatcattaacataaagatcctctgcaaggtccaccaaggcgtaaactctaagatgattctccaaaccttggatttcaacgctttggagagtgtttcttttgggattgaagtataaaacataaaaaggtttggatgtatatctcattgagaaaacaatttcaccggtagcaatcactccaaggattaaatgattcttgggattaaacacagccaaatccnctaaagtgtagacatgtttcgaccattcatgtttc

SEQ ID NO: 20190 - DNA, 524 bp, Arabidopsis thaliana landsberg
ttcatagcccaatttaacccaactggacgatttttggtcatttactacaaagcgttatttttcatcttcttggggaccaaaagtttcagtctttgacaatgaaatttgtgaaaaatgtaactgattgttatgtaaaggtcggtaaccatggggatctagggtctagagaaaacaacggactcgggactaagtggatacaaatcgtaagcagattcacaggacgaagtaatcgacacgagataatcggaaggtaaagacgatgaccctatctccgccgttttcttaaacctcaattcatcaccgtacgctccagggtctgatatgatatcttctatctcagtctctccttcaagcatcttcacaacttctgacattgttggtcgtaatgttggagacttgctggagcataaaagagaaacctttatcattctctctgcctccatcacatcgaacactccttcaagcttcggatccagaatctcagcaaagctccttcttttgaagacaaatgcctggatttgaaa

SEQ ID NO: 20191 - DNA, 664 bp, Arabidopsis thaliana landsberg
aaaccgtattaatatgtttttcccgccaaaaccgcaaaatcatgttttcctcgtcaaaaccgtaaaatcatgtttttccgccaaaacaataaaatcatgttttcacaaatccgtaaaatcattttttcccgccaaaactgtaaactcatgttttcccgctaaaattgcaaaatcgtattttatcgtcaaaaccgtaaaatcgtgtattctcggcgaaaatgcaaaattatattttcccgccaaaaccgtaaaatcgtatttttccgtcaaaaccgtaaaatcatattttcccgccaatatgtttggtattaataatgggtaatgatgttgaatatttgtcattagttaaaatgaaagcatgggtattttagtcatttttatctaaatgaaaatgtggatgaactacaaaatgattaaacaaataaaaatctatttaaatgtatcatttagattaaattataaataataaaataaacatcattcaaatgtatcattcaaatgactgatgtaaataaatcatttgaatggaaatgataaatgatgaaacaattagggcctaacacttcaaaaacaaacagtaaataatgaatctacggatacttaaagataacttaaaacaaagagatatcagttttaattgaaaattaattgaagttttaaaaac

SEQ ID NO: 20192 - DNA, 844 bp, Arabidopsis thaliana landsberg
  unsure (1)..(844): unsure at all n locations
tttagattagatcactgtgtttggtttcttttatgctccaatgcagttaggttcgcgaatttttcttatactgataacgcttttttggtttgacagcccatgagtatggtattgcctggtgttgttggattcaaacttgccggaaaaatgcgtaatggtgtaacagctactgatttggttctaacagtgactcaaatgctgaggaagcatggcgttgttggaaagtttgttgagttttatggtaattatatccttgtgagctcttaagtgttttgctcttttataatagacatgtgtttgttggagcattataagtctacttttttcttcttaggtaatggcatgagtgggctgtccctagctgacagggcgacaattgccaatatgtctcccgagtatggtgcaaccatgggcttcttccctgtggatcatgttactctacaatatctcaaattgactggaagaagcgatgagacagtgagtgtttgactttaatcttccttctatatatattcagatatctggtctgatacaatactttcatggcaggtggctatgattgaagcatatcttcgggctaacaantatgtttgttgactacaatgaggtaaattagccttatactttctttctttttttggttcttaatctctttcaggtttttatttgacttggcttgtgaataaatttcagcctcagcaaagccgggtttactcgtcatatctagaactgaatctggatgatgttgaaccttgcatttctggaccaagcggtatgggttctgttgngttttggtatcgcgaagttattgtctgaataatggtcatgaccatatattgaatct

SEQ ID NO: 20193 - DNA, 714 bp, Arabidopsis thaliana landsberg
aaaccctctcaaatcacttgtacatcttttaaaacctttttcaaatctcttgtaaatctatttcccgccaaaaaaagttacaagaatttctaaaagcatcttttttgctgtcaaaaaatttgttacgaaaaaaatttggcaggaattttttttttggcgggaatatatttttgggggaattagctaaataaccaaatcctggaaagatattaaatatctagcaccataagttgccgaattcagagagtaacacatcaggtgtgtgaagttacaagccaatccctaacacaatggtgggttatttctgaaacgcgcgtgaggggaaatagaagattaattctttcagctgacgtggacgctggaaaagcttgtaaaaaatgttctatagcaccgcttcagaattgtcccatccataacataacctacagtgtataagcttagtttgaacaaaatactccccccaaaaatatcagaggagaatatgctctgctttctatttaataacagttaatgctataccatttgcgcagagatctcaaactgtaaacagaacagtatggatggtggtgaaaatagcagttaataaggagaatccaacggaaaaggtataaaaccatcgctttccagtttctgttttactttctgcagattccttttaatatttaacccttttaaagtcaaacaacgacttttccttttcgaatcaaatacttt

SEQ ID NO: 20194 - DNA, 740 bp, Arabidopsis thaliana landsberg
aaacgggtcgggttacaattaaaattagagtgaaattagagtgttattgttctaatttacgggtaattttactaatggggtcggttgatttcaaattgattttaatccttccatataaatacgcttccatataaatacacgtcaaacatcccaaaaaatcgtttcagtaaaaatcggagctaatacccgtttatggtatatttatgatatatgattaatgatcaatatctactaatgacactctactattatggtaattaacactatattcgggcaacatccctatgtatatggtaactaacattacattcgaataacaactttatattcgcctaccaatataacttgcttaaagatactaacattttacataatctcggatcatatcctaacttactaacttaaatattctctaactacataatattctaaatattccaaaattattccaataatattcagtatgtgggaacaaaatattttaaatattactaacgtgatgaacacattattcacaaagatcaatatcggcaagatatgattacaccatttaatttagattctattatccatatctaactaaccttattcttaaaatctatgattcgaaattttttctatacaaagttgattattgacctactactaaacactataaatatatctcttataacaaattagaaaacgtcctaaaatattaaaccattttcgtctagagcaaaacatagcttcctaacaat

SEQ ID NO: 20195 - DNA, 857 bp, Arabidopsis thaliana landsberg
tactactctttcatacgaaaaagcactctgacatgcaattggattggttaccatggattagtgttgtatttgtaattagacaagtaatctagtattatgttatattattatctaccatttcttggtcggattaatgggctattatcatgttattgtaccttcatctttttttcagaattatgtatttatagagggagtggatgacaagtatttattatatatcatacaaactttaaagacaaaaattccaagcatttgtggtccagtcgtaggagaagatttcgggaagggtgaaacttctagatctgagtttgatcttccctgaaaacaaaaatcacatttgtttgggaagtctgtcagttgggtctttgcccaattggtttacctggtaatcagaaaggaaggcggcctgactaccccctggcattagtcggaaagcattctaaactcgggacagacagtgtggtagtccttcggggacaagttcactctgaagtatttcagtacgtttctaccgaagctgaccggatcagccgatagggaaaaaaaaactttaaaaacaaataatgtagacgttatatatggatggaaacttcaagaaatctaaaaaataaaaattgaaaaggagaaaataggagtcgcacaaataacatatctaaagaaataaatgtatctaagttttttgaaatctttgaataatattcgaaatatgtggagagagatagtcctgctaagacataaagaaatggacacttcaaagggctctttcgagttgctgcatattaagtatgccttatttgggccctccttatcacataactactctttctttttccacaacgacaaaacgcctcccc

SEQ ID NO: 20196 - DNA, 1155 bp, Arabidopsis thaliana landsberg
atactccaagcctggtacaatatcattctctttttcctttttgttgtctttttcagcttttttcttctattttattttaagatgcataatagtcattctcgaaacggtacaatatttgtggcctggtaagataagtatccacaacttaacatttatcaaaattttatgaaagtaattcaaatatatattctgttggattttattcatatgaagtactagttgaattattctaaaatagttataaatttaggaataaaaaacaagagaacctcaaatattgataaaagaacctaaaatgtgacaactacttttgcaaaagtcacgtcgaccgcttgtaatatagcagcaggtccataacctatttggaacccatgaaattaaaacttaatattcttattagagcaagatgcaaaatttaaacttatgcatattgatatatctcgatttttactgattttagatatgatcttggtatagcttttagagtctttttgttatttttagaatcttttttagttttttttcaggtttttacacgtttgggatgcatttggagattatggagcattctggagcaaaatcgagaagttatgctgcaaaaataattcagagaccaaaattggtgttggtgtcgatcgacactatccctggagtcggtcaacaccaatatctaaaggaaattcaattttgactctctttgaagttttgaagatttgtagattcgtctcatacattttccttattttcaaagaagcctctacacgtttttaggaacttatatatagatttttaaggccattgtttagacctaagcttgagaggccaatctcgcttttttactttgttcttgggagcaaaaccctatgaaattctttttctagaagatctttctaaactataaactcttctaaatttcttataagatttattattcaatcatgttatttgcttcaatcttcatgtgtgagtagttctcttgttgggtttagggtttctcattagggatttagaagaattagtagatcgataaccttttaggattatctttagagttcttcatcttaattgtttctaatgttagatctagggtaactaactagaatttgatcataggttaataagtaaaatccgagaggccgtttattactggactat

SEQ ID NO: 20197 - DNA, 695 bp, Arabidopsis thaliana landsberg
gtttagttacaatctaggaaaacagtgaaaagtacatctatgtgtataatagttgaacagtacaactatgtttattattccagctcgcataccgtatgcgggttttatttaagtgggtcccaaaattaaagttagaattaggtgggtccctaagttaaaacatttctttaatggtagagtttcttctattttatcatttatttgtgtgaaattagaaaattcgtgaaaaccctttgttgaagacgacggcggcgattcttttgcagcgacaagtattttccggcaatgaggattttctggaaaacgacgtcatttcttcacaacgttaggtcttttctattcaagatttagggtttatgtggtttattctactcaagatctagggtttatgtggtcctcaagatctactattttgtagacaagatctactattttgtagacaagatttagggatttggagataagtatttgatagttttcatttgaatgatccatattaaccatttaaactcatattttacagtcatgctatctcttttaacgaaagctcgaactcttttcctagtgagaaatctgagaatttcgactaccagtctgctttacgcgacggtaattggggcattcccactaagtgctactgtggaagacacgttgaaaatggtaatgtggttggtgggattcaccatgcaatacca

SEQ ID NO: 20198 - DNA, 1019 bp, Arabidopsis thaliana landsberg
  unsure (1)..(1019): unsure at all n locations
gaacaatatatatccgctttaaaattttgaatcacaacatatgctgatttttgtttttttaattctctattatatgatgattcaaataaattaaacaaaaattatagaaaaaaaataattttaaatctcaaccaaaatcttctaaatatctatattattaattatccaagataatatggatagtagataattttactttgatcactttttaatttattgcattaatattagggtatctaatgccaacttgccatcattttactttgaccattttttaatttattagtatataatatattttggggtagtagaaagagatcaacatgtttaattcattgtaaaaattttaattaccttttcctgaaatgtttcataagttttccaacggtttttcgtgggcaaactgtctgttggagattcgtttttaacgaattttggagcgaaaccatctaatcaattaatccttgttttgttgcatgaaagggtctaatctgctttgcttttttcaccnnnatggatcttcaatactttttgttcacaactctattcaatcttgaaagcatcaattttttagattgtaaatgaaattacttttaaaatccgattttgtttcgtaatttttcaagcttcttgtatttcaacaaattttgtacatcaagttattatttttttaatatctaatgagtttttgtgcctaaaatctctttagatcactttttgcaacaactttttgtgtccaatatattactacaattttttagatctgccatgtatttctttaacttttgatggattattttttatgcaagcatgtaatttagaggaacaatatctttggatcttaacgagcttttgctttcaatccatctgttcaaatatttatttatgttgatttgaaattattttcttcatagaaattttttgatatcctctattcaaaatatcttttttgaaaattttaaattgctatcagatcangggatacatggctgacgttttgatttggataaaaacttttc

SEQ ID NO: 20199 - DNA, 692 bp, Arabidopsis thaliana landsberg
gtggctgcaaagttaaagggaaaataggctgtcctatatgtggaaaaaatacagattctatgtggttgaagtaaagcaggaagcatgtgtatatgtgccatagaaagggattggcaccaacacagagatatagagataagaaaacatggtttgatgggaagactgaacatgggagaaaggggagaattttaactggtcatgaagtctatcaaaacctgaaaaactacagaaacgattttggaaatgttaaaggttctgggagaacgagaaaaaacactgtctatattgatccagtctttgagagtgatgattcgtctagtgaatccgaggaagatgacgaagtagaagttgacgaggatgagttatcaagggtggaagaaacgatctatcttattcaagctgccttattgggaggtatgtatagcttaatataatttcagaattgataaacggatatgtgtttaatgtgaaaccttataattgtatttgtattctctataggatctcccggtaaggcataacttggatgtaatacatgtagagaaaaaatgtgacttcaagcattgtctctacattgttacattgtggaaaatcaacagttggtcttaatgcccgtaaagacctccaaaatcttgggataaggaaggatttgcatcctacaacacaaggaaagagaacttaccttccggcag

SEQ ID NO: 20200 - DNA, 1505 bp, Arabidopsis thaliana landsberg
gaagataaaagattgatcatgctctacgaccttgatgagctccgcctagaagcatatgagagctctacaatttataaggaaaggtccaagtcgtttcgcgataaaagaataagttggagagattttcaagttggtgatcaagtcttgctgttcaattctcgctagaagctttttcctgaaaaactcaagtctaggtggtctggccccttcagtggcactgtagtaagtccatatggagctatcacgttgtctggaaaaggtgacgacttcacggttaatggccaaagactaaagaaatatatggcagaccaaacaattccagaaggaacttctgttccactggaagagccacccaacgcccaataagcgtgaggagtcaagctagagactctaaacaagctcacttggcaggaaatcccatgactatctttgtatataattttaactttcttattgctttctaacttactttggtggtgttttaatctcaggaaagtaagcgacaaaaatcaactacagggtgaatagtgatttatagtgtgaatagtgatttatagggtgaatagtggagtcactcgatcacaaagtcaggacggttttcaaactttgcgatcgagtggtttatttcccgcgaagcaatagttcgaaaattttgataacggagctgaacgaaggaacgaaaacgtgcagtgacccgtttaaattcaacgcgtgatcgagtacatggagtgggcgaaatcaggccatcacttcccaatgataaaaccggtgaagcccaccttgtcccccatgacaaaaatgtcaacaaaccaataattctcaccacccacctctcatcacgtttttgccaagggaagagctctcctcacctacctaaggggtgcatctaccctcctcctctccctataaataccaagctcctcatccaatgttaatcacacctcacaacaacatctccttctctctcatactcgatcgcaagcttctctctctttaagagttgccttcactcgatcacaagtctctccacccttggaagcctacttcactagatcgcaagctcccgagaaacagctcttacctctttcactcgatcgcaagcccccgagacgtctccacgtttgtttctctccctcacttactcgatcacaacaactccgagttcctgtccacctcttttactcaatcgcagtattgttgaagttcaggaagtcactactctcacttctcccccttagatttgataactaacatactaaagtttagttgtgagtcctgatcaattccaggaacaatgacctcatacagttacgattcatcaatggatgctgattttaacattgacgaggcggagtcatggttaacaagaccagagagagaagcggaggaataccaacgtttccgagaagaaacggagcgagcagctgccaatgacaggagaagagaagagatagctagagggaagaggtcaatgacggaaagttatgagctaaaaatgaagagat

SEQ ID NO: 20201 - DNA, 520 bp, Arabidopsis thaliana landsberg
  unsure (1)..(520): unsure at all n locations
gtgtaaaacaaaaaagttccttacttgttcattcgtcgtctctcttaaaatgtcgtcaaactttatagtggaatcgtgtagcgttgattcagaagaaggggtgaagcnnnnnnnnnnnnnnnnnnaacccagaaacgaaggagaagaagtcagcgacgatgagaatctggtgatagtattggtccacccgttctcgctcttgggtggttgtcaagctctgctcaaaggcatagcttctgaattggcctctaagggtttcaagtctgtcactttcgatacgagaggtgccggaaaatccaccggaagagctactcttaccggctttgctgaggtcaaggatgtggtcgctgtttgtcggtggctttgtcagaatgttgatgctcataggatcctgctcgtgggttcttctgctggtaaggtttcttctatgccattcaagttttgattttgttgctcctttcgttgctgatctgggtttagtttgaatttgattgcaagttaaagtctgatgttttgatct

SEQ ID NO: 20202 - DNA, 1356 bp, Arabidopsis thaliana landsberg
aaaatattattatagttgtgattctctgtttcgcaagagttgggagtagggaatgtgaagtagtagtggtggcccaagttatgtttccaaacgccagtaacgaccaaatctaggcatgtagatttcattgggtcacgtggatgcatcaaatttaacgcgccgcatttacttttcaacgaatggcacagtttcaactacctcgagaaaaatccaaaaccaaaaaagctatttggaatctttaaaatctttttacaaatttcttctattatagtattgctttgttgtactatatttcacgacctttcatgaatattttaaatataaatagaagtggtaggcgcatatctttttatattcaaaagattcatatccaatgacacaactaatcaatgttcaaccgaccttagtagccaagttccgttatggtcaatacgagaggttgaagagtgattaagctcaattataccagatttaccacaacgactaatatccttccttatcttcacttttgaactctactttgcagacaatatatgctctctgtcgtcaaagcccataagatatctcactaaaacgttcaaactcactctacgtataagatcatataccacacgtagacaaaaattgaacctactcaggctgatctttgtttcaagttttatttttaacaaatttataaagaaaatatacgacatgtatcttagtaaccattgtgtagagatatatcagattgtgatttgaagaggtggtcctgatgtttgaaacacaacactctcagctttaggcaatagtttaactaagatggatggtaatttttacaaataacatgcacgtacgatttgtttaactatttctcgacaacctaaaccaaataggatataatatatgatcgtgttaattaagtaagataatatatatatatatatatatatatatatgtaccaaataacctaaaatttgattgttttagggctaatcggcagattctttcataacatcgttgagaaaaaaggacacggtgattaaacattataaattcggaatattacctgattaggaggcaaaaacgttggttgatacacgtgcattacccaatcggatgtggatccattgatgtttttatacgattggaaaaccaaaacttgtttctcaccaattttaacaccattactagttatccactagtcaatgattggtgagtaggatacagtttctttacaataaccagaattcgtgtgcaatatttgttcgttatattcatcacaactaaagaagaaccatacgcatattatcagcccactcgctctttgatttggctatgattattattaaaaaaaaaaaccctatatgatgaat

SEQ ID NO: 20203 - DNA, 2339 bp, Arabidopsis thaliana landsberg
  unsure (1)..(2339): unsure at all n locations
aaaaactcccatttgtctaaggtttgttccaagaactttaatttgcctatgaataagttctttttttttttttaagttgtgtagaagttaggtttctcagcaaaattcaattaaaaatttcagatgacaaaacaaagaaaagtttgtattaaaaaaaaaaaataataattatgtgtattggctaaaaaatcctacaccttttgtttctatcaaacatttattaaatttcaagaaaaatttttaaatactattggtttagaactataagaaattgtacatcacaaaaagtaatacatttatacttaacttttactatgtttttttatgtgtgttaaaattttagaaaatatcttattataaagaaagagattaataattaagttcatttttaattggttgatgttaaaaggtatcaattatggattttctatttttttggatggcatttgtggattttatccatttttgaatagtttatagatattgtcgtttttcaaactacaaaaatataatttaacatgtattttattcgttatatttgagtttagtcggttgcgctttgtttttaaaatttagtatttgatgtaaaatatatattttttccaaaacaattctaaaaatgtatattcttaaatgttaaaaatagtaaattcataaaattttggtaaaataataattttaaaacatttagataaaaaaagggcaaaatcaacgactctctataaaaagtaaacttctagtagtagttaattttttttttaatcnnnnnnnnnnnnnnnnnggtcggaccctaaaaatatgttctggatataattatctagaaagaaaaatgtataaaatgtatgtacgtcaaaaagtcttggaccaaaattggcggagagagaacctggggacggacaaaaaagtgacaatttgctccgacattaaagataatcaatgaaatcagatacaattaaatgaacttaactaacaataaataaatgaagagagatagtgatgtatgtataatcgtaaacgcatagagtaaggaggacacatggagccacccttgtggtgtccgacaattacttttaataatccatctttctaatgaacttttaacaattccattattatccttagattacttgcaatggaagtgttgaataaattatacagatgttgaataaattatacaactatttaatcaatgcattgagcctgttaaaaaataaaaaaaacctacatagattttaagcgttgaataaaatttttttgtgtcaccattttattagaaagtgtgtttcacacacacgaagagcaagtaaaaagttttatatatatttttttatctcaacctattatatagcaaatattttttttttcttaaaaacatttatatgaaaattcataacttttgaagctctataaaaaaaaattttgttaatttcattcgcacacatacaaaaaaacaccaaatctatcctaatttcttattatcctctaataaactcttgtttttcttctaaatttgattttagaagttgtttttattatcctctttaatttaatataattttagttgatattttaatctatcaagaattattattaatatgcaatcacaagaaaataaatatataagtaaatataaattataaaataataattgtagggtagagtgttgaattctattaaacaagtggttaaaaattatgtgggtgttaaataataatgtggaagaaagagaagatgatgtgcaatgttaaaaaattataaaaagggttattgaataaatttgtcattgcccataaccttagagatgaaatggttgattagtcttcaagtacgtgtcaaatattgcattaaaatatgttagcaagaaataaatcaatttgtttagagtaatcatgaatgatgaagttagtgatgccggaacacgcgaatgaggtgtagaaatgttctctttttataaaattttaatgcaaatttgcaactccacctaactttttttcatttttaattcatcaaaagacaaaaccttttatttgtctcctacccttttttgagccataccgatacgtcttcaaccacaaaaaaaatcaaatgtcgaaatttctcccggaagaattagccattgagatactagtgaggctatcgatgaaggatcttgctcgattcagatgcgtctgcaagacatggagagatcttatcaacgaccctggattcacagaaacgtaccgagacatgtctccggcaaagttcgtgtcgttttacgacaagaacttttacaagcttaaagttagagacaagcatccggttattaccaacaagctcgatttccctttggctcagtcaat

SEQ ID NO: 20204 - DNA, 1638 bp, Arabidopsis thaliana landsberg
agagaagttagtatttagaggtggctgatttacaatctgcgtggatttatttgtccatttttagtcttttgttgatacatgtatttactgaaacgggagactccagtacattaatccttgtgaattcttactgtaattttcgatcaaaactaaataaaataaacaaattaagcactgtgttatgcagaagaacaagggtttaacccgcggtttaccgcgggtctcggttttatatagttttaattaagtatttgattatattttatactgtaaatttataaaaaaaaaaaatcttttattttaaacttctataaataatgtttaggatttttattggttagttgttatttagtgattagaataatatgttttaatatgtttaaatatgttgatgtaatttaaatataagtaaagtagtaacaaaaatgtaaaatagtaaaaacggtgtaattttttttgtgattataagtttttttttattattatttttgtgattataattctttttggaatgaaatatgctcatatttagataccaaaatgaagtagtgataccaatattgttgaacggttaagattgtctactttggatgctaaacatgattaggtatttgaattcgtgaataagtgactattatttctaacccacccgaaattaaaaatatggatcatataagctttaatagattgaattgaccaaattatttttaatggctatatacaaaatccaaaattgaaattgaaattgaggccaaaattatctatttttcaatttgtacttcttttttaacaataagggatttcatttatttgtcaagttggattggatttaagttacaatttgcttagatattatcgaaaccggttttcaattaactttgactaggtttaaccgaattggtcaatttccacgtcattctgccacgtgacaatcgcattctgggaacactcgatctcaatcctatgtggcaaaactgagaatcaagaaaccacgtgtcaacatattagtagttaaaaccatatccgagtaatctaagtaacaacgtgaatcagataaggtattctttgtcacataaccaaacaccaaaaattataactcaacacttcactaatcaattattcaaagcagataaaaaaaaaatggctcaagcagtgacttcgatggctggcttacgtggagcatctcaggctgtccttgaaggaagtttacagatcaacggctcaaaccgtttgaacatctcaagagtctcggttgggtctcagagaaccggacttgtgatcagggctcagcagaacgtgtcagtaccagaaagtagtcgccggtcagtgattggactcgtggcggctggtttagccggtggttcattcgttaaagctgttttcgccgaagctattccgatcaaagttggtggtcctccacttccttccggtggcctacgtaagtaaaactaatttaatcaaatttcacataatgactaatactatttttttggttaaggagataacaaaacgaaattattgtgttatagcttgcatggttataatttaggtttttatcaaacgtatctttaatcacttttgtaagataaaagttttagtaattagattatagagaccggttctgcttgattgattatg

SEQ ID NO: 20205 - DNA, 1247 bp, Arabidopsis thaliana landsberg
tcaaaaagataataattctctacaaggtctgcatttgtttttttcaaaagatttaactgtgaatcgttgagtatatttcattcaagcctgcaagaaatttcacaatctttgcacaatctttgcagcattcatagttcagacaagttttaacacaagtagcgtgataacatcgtatttttgcccacttttactttatttttattaggttttccatggagatatcaaaagttaaaggacacttcatgacatatttcgagtatttgagcttcaaggaagatttatgagttttcatgcaaaaaggagtagaagtcgaccaaaatccgtttcaagacagtttatgtgcctcagatgtttgacatccggacaaggtctttccgatattggcatgagagtatcttggtgtcattagaaatctagaagagtcaagcttaacctaaaagtcgaatcgaagcaatccatgaagccgtttagaagttatggtccaaagagtgaagacatgtcctaaattcgcggttttgaaaatgatcaatttaaaaacgccggctatggtgacttggacccgggggtcccctcgaatttacaccaaccactagggcgcacaaccactccttcccttcctcttgctgccgacttccagcatccctacgaagcccaagaacttggcccatcatttactaatcaacggaaaaatgtttctaccctttgaccatatgaagtctaggggaaaccctagaaccaccaacaaaatcaggctgcctcctgcgcctcccactgcctaaaagtcgcccctctcttggtcttcattagttctctcttttctgttcaatttctattctctacttgaaaatggaagaagatttatcaagctttggatttccaaagaagatctctaaacccttttctatactcactcttttttatgcaatttcttattcatatgatgttgtgttctttgaatatgtgtgagtagatctctagttaagttttaggggggtttcgaagggcgttcatgggcactttagaactgatttacgttggtggtttatatggttttgtttgatcgtttacactattctttttagttgagtttaatcgtaatgcatgtatgtccggaacgccacgtagtacatgagcttaggtattttatacttcgtagaatcttgtatatttgccttaacaaactcaacggttatctaagaaactttaaccgttgcacgcccgctgagtgatagggacttcaggactag

SEQ ID NO: 20206 - DNA, 1094 bp, Arabidopsis thaliana landsberg
  unsure (1)..(1094): unsure at all n locations
taaaccaatttcaaaccggatataagtgcccccaatagaaataaataccacttcaagaatccccaaaatcatagaaccctaatttctagtattcttaaccatttccaaaattgagctaaaaaatgagtaattcattagcagctacaagtggaacttcaaatgtctgtcagagaagaagagttgagagtgtgccgaaattgtgttggtgtggagctagtatctcggccttaatatccaagtcagctacgaatccatacagacgttactatcgttgtgcttatgctgcaggacataaggtaatgtgaatgaaaatttgtttgattataacaaattcatatgctaattaattgatttttaagctgatcgatgataaccacactttcaaataggttgacgaagcaatgattgatgagatcaaaagattggctagaagaacggatgctcttaaacaaacaatgtcctagtttattgcagtaagtataaatcaggagaaagttgtttttgataagatgcaaattaagctagataatgaaattgtgaagagggtagatgacaaactgttggaatcgaaagccagcatgaaaaagatgtcaattgctgtcattgtatgttgcatacttatcattggtttgaacaaagtgataggatgaatcgagtgagtgatcggctgtgtaagttattgttgtttgatattatgcttgttggaaataacttattttggcgatgtggatacactataaaacctataaataaaaccaaaaataaagcccggaacatatatctagtggaaaaaatttgattaaaattttttatatgttgtactttaataaattgatatagtagaacataatagatatttaaaaactgaatattgtgtacgttgaaactatgtaatgctgatcatgtggataaccaaaatacgttcaaagaaaacaagccatcaaactacgagtctctaagtaagtgagaaatataaatgtaaaatactcttttaatttaatataattaatcgaaaattagcctttaatatagtttaagtttcgcatttcataagcgatcaacatancgtgtaaaaaaataaaataanaatgaac

SEQ ID NO: 20207 - DNA, 565 bp, Arabidopsis thaliana landsberg
  unsure (1)..(565): unsure at all n locations
atgtaacacaactattatacagttgttaccaatttaagttgtatattctaacattgattcatatgattattagcacatatattatcccgtaatcagtaatgttcattttattggataatgttgtatcatacttttcttataatgtgtgtgtaccattgcctcataagatttattgatttccattgtaacatgtttgttacgctccggttacgaatattgacttagctgggtttagctatttaacatcgtaaacaaaagtactaaacaatattatagcatttaaccgaaggtttaacataatttatcacatgcatacaaggaggtttgatgggaatcgcccccgatcgtaatattacattcttaggatcagattccgtacgtatatacagcgaaaatttcctgatccttctgcattatttatcatacattctcagtttccaactttcatggcaccatcctttcaaacctccctttactcataaaacttctttcagtcgccaaaaaaccactccgagttgtagctatnnnnnnnnnnnnnnnnnnnnnnnnnnnnnnnnnnnnnnnn

SEQ ID NO: 20208 - DNA, 754 bp, Arabidopsis thaliana landsberg
agacatccaagaatgtaagtagtgggttttttttctccctttaaatagctgagatttcgcagaaacacaataaatgtaataaacttatcttctgttttcttccttcttcttttctttccggcctggtaaattacaggtcaaggataatcgttaagaatgttcccaaatatgtgacagaggatcaactacgaggtatcttttcggaaaaaggagaaatcacagacgtgaaattgaagcgtttaaggtaatactagcattcttcccctactacgtacgtacaagttaagaatcaaaattatgtttaaaaagttaacaatgttaaaaggcatgaatattacagtacaaattttctgaaaaaatagtattgtatcgttttccgagtatttaactttgcttaaacccttgctgattcaacttcttatctggcaatgcttgctattgttcatttgggcttctctcccttctacttcttcgcttgaatttctcattttacaagatcggcaaaaaaacttacgtgaacaaatatttgtttttgtattgtttcagtaaaagaaaatagaaaattaatgagtagaatagtatatggttggagtcttggaggctgttccatgggcttgaatttaaccatagattatcttatatgcagaaagaagtagaaccatatatatttactggcacaccttcacagaaactatataaacctaaatcaaatacgatataggaggaagatgaagttaatggcttgaattggaac

SEQ ID NO: 20209 - DNA, 1766 bp, Arabidopsis thaliana landsberg
gttgattgtttttttctaagctagattttgctttctatcttctatttaacaacctggttagtttatcattttatataaactaaaataatcacatcaacaagcgaagcagaagaaaggagattttaactttgagacatatctcagtcaacatgaatggtttacctttacaactcctagacgagattctcttcagaatggaacctaaatctctggcaatgatacaatgcacgaatagatttttccgatcttatatatccgacccaaaatttgaaaaatactcttcttgggccaaaccaagtttgtttcatctttccagctatggcgccacttacatcttttgccaacctttggtctcttcaagagattctatgtcaccagaaaatgaagtgaatctgtctagagagccatgttacatttttggctcctgctcgggccttcccctactatatattggtggcctctttgtcgtaaatcccctcacaaagaggtttcgacttttggatcactctggctcaaagcttctgcctataatagttggtggtgatcgtaacgttgctggtagggaaagagggatgtgcgtcggattcacggtaaatggaaatcgaacaactaagagattcaagatagtctgcatacatgagatgggaacggtgtattcattcgcgctcaacgatggatattcatggagattatcggaaacaaccgtcaccgctagctcaaaaagtaatctcacggtgcaaatgaaacatgtatactttaacaacactcttcattggttgagaaacgatgggagcatcataacgttcaatcccgagacagagcaagcacgcttgattccttccatatttcatcaagaaccagatatgaaattgttgtttgcagcagacaataacattaatcgcttgatcttaatatcggggacgaaagaagaaatttcagtttacacactactcgacaattctgaatggaccgtcaccagccagatcaagaacgtatctatgaaggaaagtgaacttgtatgctggaacattgttgtgtacgacggcaagcatctagtggtgagggagatgaaagattcattaaacggtgtggttcatgtgtacgacatggaagttaaaagttgggaagttatagggtcaaccaaatcttggtccagtcgcgtccgagacttctataaatttacaccatccttgttctttgtcgaggaggatgagcagcagaaggtgacagtagcttctaatgacaaacgcattccctatctaactgcgattatgggactcattgatacaaccaagtaaacaatctcatgtataacattatgaaccaaatatctacaagtatcatgcactatcttgaattcattcactaccaaaagcttttgatgtataaacaatgggaaaatattctccgagcattattaatttatgcactaccatcaattcaattcccatttataagcttttgatgagctttttaaacgaacctgaaacactagtgtagataaaagaatatgagacatgtatctcttactcttagtatcaccagaaatctccacaggaacaaattccgtctttaaaatgatgaaacctatttgtatctctaatgaaaatctctttacctgcgtaactcgatataaatttaatgactgcatggcaatcgccgcatatcctaaggttctttatgacctgaagaggggtgccgtctggtgtgttaagaagaccgaaaactactgctagtttctaatgtgtccccatacatctgctctt

SEQ ID NO: 20210 - DNA, 974 bp, Arabidopsis thaliana landsberg
gaatagtccaaatgcaaaaagatagctcaaattttttgagttccagatagtttctttcagctagatatgtggcatagaaaattaataaaaattacctatcacttataagatcttcctctctaaaactactaattattgtgttccacaactgtgcaaatcttgcagcttctttctctttgttcacaggtacctgaagtaaattttcagtacaagcaatcaatgagaagaattgtacgtgatagcagttcactcgttcaacaaaccttatcctccgtaaagttatgagataacgttgcccttattcccttcttcttttgctggttctttccatctggaattaagcggtcattaaaagctccaggcagtgattcaaaccgtgatctgagcattcccagtgtccgaatctgtaacaagtgaaaaacgcaaggatttagagaacatcaataacaattacaagggaaacctcaagttcaacaaataacttagcttcaatcagaatatcttaaaaatgcatacctctccaaggcgggggaatgcaccgtagatacctccaaataatgtggaaaatatagcataccaaatctgtctatccataagatatacctgcagcaagatgtagccgagatcaaattagcaacagcacaaagcaggggaagacgtgcagacatgttcgacttgaccatgcttaccagaataatgggggcccagagggcgataacgacaccaatattgtttttggctgcacaaatcaagtagagatggtgtgagaataaatgataaattttcattccagcaatcatgtagtgtatgtgaaagtgcattaccacgaggaaagaactcatgccactgaaaatttgtcacacgggccttcataatggcttgtgttggggcaactaaaggccagatctgtgagcaatgccaatttatcagacttcagttgtggcaatcatggagaaatcagtcaattcaatccc

SEQ ID NO: 20211 - DNA, 3346 bp, Arabidopsis thaliana landsberg
taacaggtggatccaggtcagacccaagcgtcgaaaaactactccctctaaaccaagatcatattagtgatgtaagataatatagtatttgttggacctactgcgcagaccaatggttatgttttttttcaaccaaatccattctgcaggacgcatcggagagagttcttgcaacacattctggtttagatctgccaaaagaacacaactccgaagaactgcaaacgaatgccaatgaaacagatgttgatggcaaaatgcaggtattttcataaatacaaacacaacaaatcaaagccaaagcctttctttaaccatcgaaaatacatattctattttcctctttgtatatttaacacaacaaattcattctacaattactttcaggactcattggatagggagcctgcatcacattctgatatagatctgctaatagatcagagctctgaagaacagcaggcgaaggtatttctttaaaattatgtctgaactaattatggtctttaaaaaggatgtcaaccttatgtctgaaataaattttgctgcagcaagttaattatttatattggacagaagcttgtggatacattataatttgcagataatatttgctaatgtttttctcaccatatttttgtgtactacaacactcaagacaccatggaggcggctgcagcatcttattcattgttagggtttgcaaagctcgcaaaaaagaaggtcaaccttatgtctatacttaattaggctctcttgttcactttaaattggataggagtttgtggatacgctataatattttcttatgtttttctcaccatcttattggtacttctacattttggtcactttggagtcggttgcagatctcagtcattgtcacaaacgccaccagaagtcaacttcgatggtgaccctatgaaggtaaacagtaacaacaaggctgtgttattcgacatgattatttggttactaaataatttgtaggatattattcttataataggtctcctcattttatatttgcgaaagatagtctaatacattttcaaaatcaatctcattattgcaggctatggtaatatattcccatccaatttatgatacaaattccaaacctgacaaacaatcagaatcttctcccactccaacggatgtttcatcaaatatttgaaatcagtccatctctgcaaaaaatatgttgtttagatatcacattcaataattatttcatacagataactacttatcctttttgacatatcctatcaagatcaaattacttattctcgagacattggtggacatgatcttgatgataatcaggtatgctctaaacaagataatcacaacttctttaatactatgcactaatggtcctactttcaaaccttatgatggttttcttctttgcactaatattatattataatgtacaggaagaaggttatgttgctgtttcaaattcatctccagcgcgagaaagagagaaaccaattctgtccgaagcagaagtttttcttgtagcagagttgttatcaaaatcaaaatcgggctcatatgaacttttactttcaatgagtaaataagattttgcactatttcacaataccctctccgctgcaccgaatacgtatggttatacattcattttatttatgtccactacagttataatcttgttataagcttatgctgttttttctcctcgcagtgagcatctcacttcgtgtggattcttaatttcaaactcattccttctaacatttgccaagtctacaaactggatttcaactctagtataaaatcaataaattttttacaaatattacctttaaaatctttagtgtgaaagtctgatctcttattgtttgtttacctagcatatgaaggtgttggtgtccttgctttctcaaaagcttgcggcaacacttacaaaccaacgtgccgcttttgttcacccatggttcgcaaaccatctacaaggaaaattaaaaagcttcaaggctgccaaaatcaagtcacgcgtcaagtggtccgaacccatgaaacagttcatcatagggcccaacactgaatggttcacagacattgataccatttacttgcctatgatacgggattcgaaacactgggtaggacttgcaataaatctgggagtctggtccgttgaaattcttgatccaaatatagatctttatgaggaagatgaggttcgacgtttcattgaaccttttgttacaatcttgccatacctcatccaaaggtcctgtaagcccgaatgttctcagaatcatggtctttagcctttttattggaagcgattagatggcttatataagaatttgcgatctggtgactgtggcccagtggcaatgaagttccttgagattcaggcaagtgataatcccccagagaacatggcgaaaataacagataaacacgttgactcttttaggcgtaaagatgccatgaacatttatgaggagtttgtctgccccctctatgcatctacctttaataacaagtgatcactctctctgctttttgtaatattaaccatcttaactttcattttgaatattatcactctgtaagctattttctgaacgtgtgtgttctatttggctttgttgaatagtaaacataatctaattgttgttgtctgaattatgtctatcttttttttctcattactcccaaaaggaacaatctctattttatatgttatacatggatttcatgtgatatgcggctttgtaatggatagagcttgatagtattattgtgttccatccatatatttatatccataagttatacgatatgtagattattattctatactaattatataataaaggtttgtttcttacttagtagaatggtccaaatcttaaatggtaatgtagaataattggaaaactaaaaccaaaaaaaagaaaggagctaatacataaaaaacaaaggttcttaatggttcaaaaaaaaaaaagacaacattaaaatcgaacttcacatatttggacaagttttgtgtgctgcacttttgcatcagcagcaccttgcattcatagctcgcactcggggctgagcctagtaagctccatcaatttgtacccatcctctgtcctctccataaggctccacccataaaggtgccctgtagcattcttcaacgaaattctcatatgctattcctttgtacaatacagcagtcaaggcatgggtattgtttgcttcaagacatttattgaagaaatgctaatagatcgagtgtggcattgaccaccacatgaaataccgagatttgtcaagtcgaacacaacgtaatgttttctct

SEQ ID NO: 20212 - DNA, 1548 bp, Arabidopsis thaliana landsberg
atttgtaacaagtgaagcaataaagaagcccattgtgtagtgtctccgcacggtgcacaactcattaacttgtttttaaggataaaaatagtagtgtaatggagtctttccccaaagaatggtttaacttgcagaagttggccagcttgtgttccaatggagagctaattggtcagggatagaacacgaaggctcttggcacgacccggtatggcaaaatatgtcaattccccgatacagacaggcggtgtatgtccatctacaagaacgctatgattggatacaatgagacttattttggcgagtgggcaagaagagttttgggtaagtttagcataagagagatgaaagagcttgcagagtgcaaccacagtaatagttcaatattagatgtatgtagttgatattcaatgtaaaatctacattataaccatatgacaatttgatgaggcagggtcagttctaagtcttatggatttgttttgttgatacaacaaacatgtattcaaaactaatagcaacaaaatggtaaccatatcaaccgtttcctattcttaataatgaaaccatcaggggtaaatctataaaaagaaaattcagtcaaatgatatgcaaattgtactcgttatctctattgagtttcctcctatataactcaaatccatcagagaaataagtaatcaaataaaaaacacactacaactaattgaagagctcttttattaaacactatggcctcatctaaaatgttcttagtcgcttctctcctcatggctctgatgttctcctctatgatcacttcaagccgcgctgcacaacaatttacgaagaaacaaacgttaaaaccgaagttttttagaccgtgtttccctcaatttccgagacccggctttccgaacaatccagcattacccagttttcctcagttcccaagacccggttttccaactaatcccatgcctttccctaaattccctagacccggttttccgagcaatcctacacccgagtttcctcagtttccggggcaaagttttccaaaattcccattctcatctcctttctctcaatatccgaagcccgcaatgcctggatcgcccgttacggccctctctgctcccccctctctccctggaactccaacttccatcccttaagttgtctcctccaaacttaatggcatatgtgaagattatcatcaacataagctaactaactatatactggtggctgtaagattgatgagtattgactgtaacattattcggttttacaatttgtaacatagctatactattgcaaagtcataaatctaataaattgcattcaattatgttggtgtattaaacttttcttatctctgtaatgcatgcctccgatctcactacagtggcaaaatgattatatcttaaagaaacaccaaccagttcattgcacaaatgtggaatttaaacgaaacaactgaaagataaaccccccattagtccctgcctcaataagacagaagaagaaaaatgacttcaacacacaagtggaacaaacacatga

SEQ ID NO: 20213 - DNA, 296 bp, Arabidopsis thaliana landsberg
agccagaaccgtgtgatgtcgtcaggatcatgcctagacagtcttcattttggtttaatcacagcgtgtccatgggactcacgtataaaaagtgaattcttccaccaaacaactttcaatattccgctcacgcaagtcaaaagtttcatcaacgacatcaaatctcttgtcaagatagagtcgaaatctttgtgcgtgctggagctatacgatggtattctaatgcgttatgtcacatcttctccggcgtatctcgggaaagaaacagaggctttggactttgacctcacgtatta

SEQ ID NO: 20214 - DNA, 244 bp, Arabidopsis thaliana landsberg
  unsure (1)..(244): unsure at all n locations
cttgtccctgtagctgctattgtagcatttgtttcatgtnnnnnnnnnnnnnnnnnnnnnnnnnnnnttgttgaatgcaaaccccggtggtggttgctgttggtagttcccctgaaattgctgcttggaacaaaaccttgattatagggaacaaaaggtttgttttgaccttgttgttgctgtggaggatacacttgatcatgtggattagcaacgttagtgctgcggtaagagaggttggggt

SEQ ID NO: 20215 - DNA, 767 bp, Arabidopsis thaliana landsberg
tgaggtaggtatgttagaatatgtcctacatcgaaactttaataatttgtcgagcaatcaataaatatatggtaaacctccacttttaagctagcttttgggtgtgagttaggcccatactgatactctcagtctctcattacattaaattctacttagtttttgtatccaatatatttaaagtttatatccaagacatcactaaactcaaggaaaatttaacaactagaaaattattacaccttatcatgaattctttccagcctcagtaataaaacaaatgtcgttacagagagtcaatttttgaactggttttagattttgctcatacatccaatacaatgaccttcacatgtcctagtgatgacatgtgatataagtcactgggtctcacatccacgcaatctaaattatttctttaattctagcataaagatcctatcctggttaccaatgggtttcaaatacccaactgttgtttgaactgtcaaaatagtgtcatcctttagatccctaaataaatataatggatggactactcgaccgttaaaaaattcaatagataaatcgaaccatatttgatccgaattaccttttgctatcttaagctctcttttttgttttttttttggcattttggacctttaaatttaacaaataatcatacttataaattatctaagaacaaagctgttatagataaatcatttatgagtagttaacatattcatgacaatgatgtaaaaatatttatacataatcaatgt

SEQ ID NO: 20216 - DNA, 524 bp, Arabidopsis thaliana landsberg
gactcttgagctgcaataggcttcttaacccttttaaaaaaattcaaattccaacaagataacaaagattatgattctgcttctttgtccccttcatcagttcctccatcttctttgtctcgaacttggaagcaccaagtcttcccgagcttccatgggggagatgttcgaaaaacctttcttagtcacgtcctagaggcgttcagaggaaagggaattgacccatttattgataatagtatcgagaggagtaagtcaatcggtcctgagctcgtagaagctatcagaggatcaaggattgcgattgtcttgctctcgaggaactatgcttcttcgtcgtggtgcatgaacgagttggtggagattatgaagtgcaaggaagacttgggtcaaatagtgataaccattttctatgaagttgatccaactcatataaagaaacagaccggagattttgggaagggttttcaaagaaacttgcaaaggtaaaacaaaggaagagataaagagatggagaaaagctt

SEQ ID NO: 20217 - DNA, 1036 bp, Arabidopsis thaliana landsberg
catagaacaggcatactaaaaatcattaatatatagtattattgctacacctatttagttatgtcggtggatatctaaggtataatatgcactctggggggattttgaaaattttgaccaactaattattacaaaagatcattaatactaaatgaaactcatgatttggggcaagtctttaaaacatagttttcctgcccacatttgaaaagtaaaataaagatcctcttttgttatttgagggttgtcttttttttttttttttttttttgaatcaatgtaaaatttattcaaaaaagtccttggttacaatatatgcagctttaagcataacgtttttttgagtttcagaaaattttaaaaccaaggaaaaacagaggtataaaggatttcaaaacagagcctttgttaggctctcgagtggaaccaaacccggagggcgtcggccatgtttgatggttggagctggtgaatgaaggagattctacgtacgccacataattttaccattttcaacgattgcgttgtttcccaaattatgaattggaactttggtagcatcgcaatatatacgacgtttgggtttggcccatgctgccatgcatagcaatagttttaaatacatgtggttggtaatatagaaaatggtttgaaagaccacaaactttgatcagtgatcgattcggtggggccacaaataacaatgttttcgccacatggtcatactttacgttttcgatgagaaaatatttaaacagtttgttcgtcaaatttcaattaactagaacaaaattcataaactagagagacagaataattcgagagagctagagtgagggtaactagaaagatagtaactgattttgtatctaataattaattcattaattttaaaatcaatgataaatcactttgatggttgtggccttgtgggtaattataattaacacgtgccattttttatcaaggcatctttaaacattttgtttgtttctatagcagttttcttctcactattcaaaaacgtaaaacccta

SEQ ID NO: 20218 - DNA, 854 bp, Arabidopsis thaliana landsberg
actcttctttctcaacccacaacacaaacaacaccatttatgccaacacttacaggttttgcctgggggtttcttcttctttggtgcatcaaaaccataaagagcctgtcttctaaacacacaacctgtcccgacatatatcggtccttgtatcccatcaagacctttcatgttaatctgtttccacaccaaaacaatatcaaatgagaaaagaggaaaagcactaaaacataaacagaaacaaagcaaaagagataaggacacatacatcaaagaacacaacgttacggtttgagtatctatcatgtctatcaatcccatcaaatctctgcggaaactgaacataacaaactttctttcccgattgcgggtccatcatgaaacacatagattctctaattgctttgctgttgttgatgtagtgatcacaatcgacattaagaaggtaaggagcgtttgatagaacagcagagactcggatcttcaagaagaagtaagatgagttttagtttatgagaagtcagggctccgaaaagagagattcataaataaagaaacacattatacttaccaaggaattcatagctccagctttcttgtggtgatcaaatccaggccgcttctcacgagaaacatacactagacgtggtaactcattaccatccgtatcacgaactccactatgacccaagaacacctgtcatttacaaaatctcttaaaaaggcttcggtctgaagatatattgagaactagagtgctcattccaatttaacagatccaggaaaacaaagtgaagaggacaaaaaccgctttttttttgcctattcaatcaaactcatcattacctgaatca

SEQ ID NO: 20219 - DNA, 1771 bp, Arabidopsis thaliana landsberg
aacaccacgtctttgttggctttgagttttagcgtatacgcgttttactggtttttacattttcaatagttgactaatctctattttcaattttgttttcgggaaagttcgaggattcttcaaaatttattgtttatatgaatctgtttctgattaaacgttgaacatcattttctttttgggtttatcctctgtgattaatctctttgtttgtttctctatcaatagtagcaatgtcgctggttcgaacagtgacgatcgttctttttataatcgcgtttctgcaaaacgctgcggctcagaaaagacagcaaagtattgttaagtctcgcggtgcggttgcgacagatgatggacggtgttctgttatcgggatgcgtgttcttcgtgaaggaggaaacgcgattgatgcgtctgtggctgctgctctgtgtttgggcgttgtaagtcccgcgtctagcggtataggcggtggagcgtttacagtggttaagatagctggtgggaaagaaattgcttatgattctagagaaaccgctcctctaagagccactgaggtaaaacgcgttttagtaataatgtctttctttatcctctgatcaaatatgcgttttgtaataagcgttttcgttaaaagtctttgtgaatagtacacagtcttggttttttctcatgagcttaaaataacgttttccttatacgtttttgaatcaaaggcattatttattggttgtttcacttgatgcagaatatgtatggaggtaatgttgacctaaagaagaaaggagccttatcagtaggcgttcccggggaagtcgcaggtctattcacggcttggaaacaacatgggaagctaccgtggaagcggttagtgactcctgcagagaaacttgcagagggattcaagatttccaagtatctttatatgcagatgaacgcgactagaagcgatatcttagcagacaaaggtctctctgacctatttgtttcaaatggagagctcaagaaaccagggacgatttgccataacccaaaattggctttaaccttgaagctaattggagagtacggtccaaaagcattttacaatggcacagttggggttaacctagcgagagatatcaaaaaatctggaggaataataactttgaaagatctgcaaagttatagagttaagattaaagaaccgttgtctgcagacattcttggatatagagtccttggtatgcctcctccttcatctggtggcgctgcaatgatgcttgtaagttcggttttttcgtgacagagtttcacatttgatcaaacctaagtttcaaaatatttatacggagtttaatttcttgtgttgcaggttttgaacattctttctcaatatgggattccatcaggtgtttcaggccctctcggtgttcatcgactaatcgaggctctgaaacatgcattcgcagttagaatgaacctcggggatccagatttcactgatgttaccaaggttgtttcggatatgttgtcgccaaagtttgcaaaagacttgaagagcaagataaacgaccaaaaaacttttgatccaaaatattacgggggcatgtaagttctaatatttgttaacacgtagatttcttcttaaattcatgatttatagatctttctatctccaattcataggtggaatcagatcgacgaccacgggacaagtcatttatcgatcatagagcgcgagaggaacgctgtgtcctatgactagtacaataaatggttactttggggc

SEQ ID NO: 20220 - DNA, 649 bp, Arabidopsis thaliana landsberg
aagtaaaacatatagggggaaaataacaattaaataaagccgaaagttttagacccttaatttagcaaacattaaacgaatacaaaaaacctggactgcttcaataaataaagcaattacaaaaaaaatatttaaattagtacgagtcttgtgacttacggcatacttattgttttgtatatatattagttcatatatactgtatttttttagtcatcggatattatttaggactcatatgagccaattttgaggaaaattgtttataaaaaggcacgaatttttcgtgccaaatagtccattttaacatttgcattgcgagagattaaagataaataaaaaatgagaattcttctttgtcgctctgaaactcctccaaataaattgaaaatgctggccattcggttgggaagacaccttcttcaccaggtctgaacagtccgtaaaaatagctacttgtcggcaccaatcatacatttcattatatgttatttgaatgtcaatagtaagttttatgaccatgatttttaaaaatataatagataaaaaataattatattagttattaaaagggaaaaacaaaaactaaatatcaatatgacaatgtgtattttaggaaataatgaatgagggtggaatgatgatagat

SEQ ID NO: 20221 - DNA, 1899 bp, Arabidopsis thaliana landsberg
caatgccagagcttcttcatcgcccagagtgtctggacagactccaagaataagtccgtacgatttgtaagggaaattcgagtgtatcagaagatgacatcaaagacatgaactacttaaaagctgtgatcaaagagacaatgaggctacatcctccacttccattgatggttcctcacgaatcaacacaagaagtcatattaagagattaccacatacctgcgggtacacaggtaatgatcaatgcttgggcgatcgggagagaggctgcgacgtggggaccagacgcggagaagtttagaccggagagacatttaaattcgtctgtcgatttccgaggtcacaattttgagcttattccatttggagcagggagaaggatttgtccagcaatatcattcgctgtgatcttgattgaggtgactttggctaacttagtgcatcggtatgattggagattaccggaggaatatatagaagatcaaaccaatgtcgctgaatcaaccggtatggtgattcaccgtttattccctctttacgccattgtatcatctactacttgatggatgcattatacataaatgcttactattatgttatgtctacaataaacatgtttactcatttgaaaatgttgctaccaaagagaagtttgagattttaaagtctcaagttcctaaactaatctagaaagccaggtgagcttacttgatttattgttatgttcaacaagcatcattagtcccttctcaagtgggcttcaagaacacaagctgatatcaagaacacgcatacccggtttcaaattatttccaatcattagacgatcgcgcataatagcactgcgcagaggtcagttcgagttgactgtaaattagtagcttgattggtatatttagttcaattttgtgttttttttttgtgtaatgttattaaatattctgataagtagtttagtggctttgtagaccattattgaaaccagattgagggatagctatatactaaagtagctaactaaaactcacaacaataataagtgttgcaatattaacgaccaaagcaacgactttgaggaatccaacactctttcaaattactcgttaataataaaattaaaaacactatagaaaatctccaaacctagagagaaactaaaacacgaaccaatttgatatttttttcccgagtgattcgttcttaatttctctttgatgagcttgattggtttgtttagttcaactttgtgttatttactagttactacttaggggttgttattgaattaatgtatttgaatttgcagttttctttgtgggttttattttatcaaatacataattgaataacagtggatatcgccttgactttaaaacacattcaattccattagttcagtagttttgcgtgactatgctatttgttactttgacgtgattgcatgactgtctacctcacagtttgaataagtataagtggaaatattcatagttttacttggttgtatctgttctctctccattgttatgttgatgaccttcttaaatgtcatgattttccagggtttaattagggcgccttaccttgaaagaaattggagaaagaaattataaacgtgaaactcctcttttttgcacatacataaaaagagcaatccaaatagtaaaagaattagatgagaaaccctagtcctcaaagagaacttgttcactaagacaatttgaaagattcaacgttttttttttctttgacaaacttttaataagaacgtgtaatagttgaatttcttatccatatggggcagagagataagaaaattttgagtggacagagttttggtcccaggaaaaacttggcttttatagttggatacattaggcaaacaggaagaaaccaaac

SEQ ID NO: 20222 - DNA, 581 bp, Arabidopsis thaliana landsberg
tttagaatacattattataaaaaaatcacattacataacatttattttttgtacgttgtttttccatttaatataaaggatttttcgtattttagtttgattggattaaataaaaataaatagtttgtttaataaaaaaatatacttgttataattttaaggaccattttgtaaataaaaaagttcattcaaaatatgaagatgtgaatagtataccttcaaatatgaagatacactattgaattcttcattttgaagataaaaatgaagcaccattggagaagatttctctatcttttacttcaaaatgaagaaaaatgtgaaatttaaagcaccattggagatggtctaaaaaagaaatttctttatgatttttttatcggtaaaagaagtaaatgactcaaaaagctttaaacatatcgaataattatgacccaaccaacctaaacggatcgcaaaattacacaagcccattttattcgggtcatatctaataaaacctaaataaaacactttctcactttttctctatggtaaaacagatcgacgactctttcttttccctttcttccttcttcttt

SEQ ID NO: 20223 - DNA, 602 bp, Arabidopsis thaliana landsberg
tctcttcttgagaatcaatggtctctcataattccaagaacactttcatactgtcatcttcaagttgagatttatcacactctttccttcaagaagctgtactgtagactttggaagatttaggacttctcaagattttgaaaatggcgaatcaacatttcttcaagcctcttcttcctggcttccacacccacttggtactctcagtctctctctcgctctctttcccttcttctatatctttctctgtctatctgagaagctaaagatgagtcaggtttttatttgcatgttctttcagagaatacctgtagccttcttcttgaagaatatagaaggaagatatgagcagaagacggcggagctgagatcagatgcgtcaaagataacttgggaagtgaagatagatggacagagactcactgacggttggaaagagtttgctctctcacatgatcttcgaatcggtgacattgttgttttcagacaagagagagatatgtctttccacgttacaatgttgggacctagttgttgtgagatccaatatggttcgtgttcagacgaggagagaaacctcggtaggtgggttctgtctctga

SEQ ID NO: 20224 - DNA, 2247 bp, Arabidopsis thaliana landsberg
  unsure (1)..(2247): unsure at all n locations
ttttatatatattgtggatcaactcttgttcttaacattagccaagtactattcacatgatcgaagaaggttcgaacaaaaaaaacttcatcaaaattccatgtttgttcttggtaatggtattatgtgtttgagacaaaaacaaatgtagttatcaagaaaagaaaagaacatagttacatagatgtggtattttgtagaaagtagagtttgttaacaacgttgttactttagattaagggtgagttaaaaatatatacattgatgaacaaaaaaataagaatctgtacattgttatttaggtaaataggaaaaaaaataatatataaactaaacatatccttcatttttatattaattacacaaatattatcgattcaaaataactctaatatttaaaaataagtatataactgtttgtttaacgacctaacatatataataatgtggtaaatttacatattatatgttaaataaatgtttttttttgtcaaacaacttttattcacttaaaacatcaaaagatgaaagttcatacaagttggaactatgaaaatataaagcaagaaaagatagaggctcatgagtttttcaaggaaattgaaaaatctgttcaaaccatagcggattcgaccatgaagacgggcttcgcgaaatcctcgaccaacaagtggtcaaaagtggctcgtgcggataacacataggagttcttagaaacgttctccacataggaggttattagataaggaaggttgcagaagctttggtaaccacctatctttgagacggggtcaaaatgtcgttctccttcaaactcttaaaacttttcaaaatagccatgaatgtgctgaaacctcttaaggagaataccataagaaataatgcccggatgatccaccaatcgtatatgaaagataacatttgcttaagctctggattcaaaggcaacgaatataacaagtagcggatgtttcggtaatcaccgcttcgtaaagacgggatcataatgccgaattccttcaagttttaagtttcataagcattggttccattactcaaatccctagttgtaactaaaggaagggttctcaaaagatttttatacccaactagtaacaaatgtgcgttatgtccgaattgatgtcctagctcaattgaatacatcaaacaacagaaagattgactaagattgggtaaaaaggagtttaaaacagacctgaatatttgctagataaggcttggatcacaacatttgaagttgggctttggatactgtaatgtgacgaaaaatgcagtgcccacctgaagaaaacctaatttccctttggttggcagattacggttctcagagcagctgccgtacggagaggctgaagggttttgcggtggctcgagcaactctggtggacgggaggtcagtggctaaggggttgactcgagaatcaagtcccaggaagaaaaccatgggttagatgttctggtgagggaaatcgagttccagttgggcaaaatgaatcgtgccggatgggatggtacgggaaggtgttgagggatggctatcgccggccatttgttttctcctttgtttttaattattgaagcgtacaggagatacttgtgggttgagaagatttgtgagggattaaagagattaaaaagtttaactaaaaaggaggcagaaacacaagattaagatcgaagaaacgcaagatgatttatcacccattgccggcaaggaagagcgttgccggcgccgtagaacatgaccggtggagattcctcgatacttatgtttgagagttttttcttaagtcgtcgtttcaattgttaaataaatgtttatcggtttaaagttatgaatcagtatttataaataaatatatatatatatatatcaacaaaataaaatatcatgttacgtaattaacatgatcacgattataacatattacatagaacaataatatgctaacatactaaatatcaaaataatatttgtcttaacatggtaagataatcgaatatatgaataataacatgctaacatactaaatatcgaaataatatttgtaacggtaaaatattcgatacataaataatattaatttgaatgtataactaaaaagagataactactgataatgattagtaatgacgttaacctcataacaatgaaaataattagcaatgaaaaatagaatttttgttttagatttactgactgacganatagacttagaaaacgat

SEQ ID NO: 20225 - DNA, 1023 bp, Arabidopsis thaliana landsberg
tgtgaatggttcagtgaaggagatgattcacaccccaacatcaaactcattgcagatttgtcttttaaagacagggacaactacaccaatgatcacagccttggagttacggccgttgggaaatgattcttatcccacagagtcaggttccctaaatcttttctttcggatgtatgtcaacaagacagaggaacttctacggtaagtcattgccaactttcttttctgtttgctccgctgtatggacaaacttcgagttcttgactaatacaatttttgctttacataggtacccggatgatgtttatgatcgcagatggtatggatttgttctgccgagttggaccgtgatttccaccaacctctcagtgagaaatcataacgattatgatccaccaaaaaaggcacttgcaacagctgctacgccttccaatgccagcgcaccattgacaatcagttggacaccagttaatcctggtgaccaatattacttgtacagccacttctctgagatacaagatttacaaagcaatgacaccagggaatttgaattgttcttgaatggagctgttattagcaaacctttcattccttcaaagttagctgtacaaactttcctggatatttctccaaggacttgcaaaggagggaactgcatttaccagctaattaaaacctctagatcaattcttccccctctaattaacgctcttgaagtctacacagatatccaatttccacaatcggaaacaaatgaaaatgatggtatgttgcttatattggcagatactttctgtttcttttgttaaatactatagaaagtcaatttcacctgttgctgctcacaacagtggttgctgtaaagaatatcgaagctgcctataagttgagtagaatcaggtggcaaggagatccttgcgtccctcaacagtatgcgtgggatggtttgaactgtagcaacaacacagatattataaacacctccaagaataacgtccttgtaagttgaagatgacttagacg

SEQ ID NO: 20226 - DNA, 559 bp, Arabidopsis thaliana landsberg
tggtttaaaatcatagtatacatatacataaaccgctaatcggttttcgtttatacggtagaatttagtaatcagtcatataaatcaaaagttattaaaaacaatatccataacaacatatccagagtaagacacaaatattatctctttaattcacaagtgtttgtaaatagtaaaagctatatagtcaaatcaatataaatagatccataaacctagactctaagccatatacaataaaccctaaccactaaaccctaaaccataaacactatacagttaaccctaaaccctaaaccctaaacactatgccctaaatccctaactctaaacactaaacactaaaatctaaatcctatatactaaaaactatactcaacaccctaaacactaaaccctaaatccaaaaccataaacatattcttaatctgtgttagatagttgtgaatgacatattataattaaaaattcgttatatgaaaaacaatttcatggtatttatagtctgaattaatcataaatttatatgtaaattttaaaatcatagtatacatataca

SEQ ID NO: 20227 - DNA, 763 bp, Arabidopsis thaliana landsberg
cattaggtgtcactgtgtgtggacctaaaggcgcataagattaccatcctcgattccaacattcagctacgacgtgatgcagcgttatatgccgaactccagccgctggctgccatgctcccctaccttttctgatagaccagctcttctagcggggacatctcgctgcaaccctttctgcttgatcgcccgcatggtatcccgcaagtttcctccccgttcgattccggtgttctatcggttttcctcatccacgcccatgctgtcggaggggtcgaggaatgcatggagtttgacgttgctgcgctggatgtagaagttacaaaacttgtctcgacaataatattgtcgtgtgttgcctcctaatatttttattagccgactattggcctttaagacattgcctcccttccttttgcgtgtagtacacatgtgtgaacttatttatcagcgttgctttagctttgactatttgctttcgcgatcattttcaaagctttgttactctttaactcgctatatttatcaccctactctgctctgtagacggtaactttttggtagctagatgtatctaactaactattatcacttaacggtaactctgttataacgtatatcttatctcctaggtcaatatgtttcatcgttatagcgtaaaacttcgagtattcattcttattcgggttatggtgtacattaaacactttcctatgtaaaaatatcctagagcactgtttgtgctaactatgctacaatgaat

SEQ ID NO: 20228 - DNA, 1698 bp, Arabidopsis thaliana landsberg
tgtatcaaacgtatagtctatgcgttaaaagatctctagcaaaattgacgattccaatttatatacaaattcataatttattttagtctatgacaaatttggttgaagttcttacaccaaaacgaagttcaaattccaaggctttaaaaatcgttgtatgtcataataaatgaaaaatcagactatttgtaattagaatgatgttcagatcttataatgaatgattatctaatagattaaaagagatttgacaaagacaagctctacatcagatttgagtagaatcataaagaatgtattactaccagaacttaaaaagagattactactactacaaataaagagtctaaaacacagcttccacaagtatgtgtctcttcttagacccaaacccaacaatgtgattaagataaactcttccttctttaacagtagccgacgagactaaccgatgaaccataccgctgctgaaccaacccgtcacagaagccgtccgccacccgtctgaactctctaccagtttcgaagacgggctacctgaaaacactcacaaatagtctacagtcattggtagaactttaaaaatcaaaactttactaaagaataactaccattacctgcaacaacaatcttggttggagacaagaactcaagcccatcaccaaacctcaaagacccaccagaaacgtcaataacagtgactttactactaacatccccattggttacatcgattttgtataagaaaccggagaaagtgtggatgacgataaggaacccctccgggtgataaacaatgccgtgaagagagacaaagttattataccaaccaggtgtagtgaagagagggcttctaatggtgtacactagctttccattgacatcaacaacccatattttacctccttttgcatcagatacataagcatttccttgtgtatcaacagctacatcgtctgcgtatgttatctctttacctacattgcttaaatcatttgtttgcttaaccaacaaatgattagagagacataagcagagaaactacagagagcttactatggctgctaagcactgtgaggaagagacgacgccacgtggacaaatcataggccactaaagcactataacgatttccaagcaaatcgccgacagcgaggaggagacggtttcggtggcggtcgatgacaaatccgttggaagagttaccggcgaggtcaacgtctttgaccaaagtgacttccttaagaacgtcgtcggaatctttagtaggaacaagctcgccgataccgccgccgccgtccatgtaggaaacgaggaatctccgaccaacgtcgtcccatttggcgcactcgcggaggaagccggagctgtggtaagagatgacgtgcgtggaaggaacagctttctctgaagagataatataagctattggaacggcggagagaatgaagaagaagagagcgacggagtatttgccggagcagcaggacggcgacattttgaaaaagacagttatagagagtaataaattgggtgcgaggaagaccaccttaagaaagtgtggaatagatacagagagagtttggttggtgagcgaacatttggaaaatatggggcccacttacttagatgcacatacaaccttgcactagttttggcggcccgttgaatgtatcattggcccagaatctgtgtcca

SEQ ID NO: 20229 - DNA, 1097 bp, Arabidopsis thaliana landsberg
aaacccaaatgaccttgacactcgtctccctacacagatcttcgcaactgattgttatcctgatgctcgtctcaatatctactccagacccgacattctcactgtaatatgtgacgtcttgaaacgtaccaacgaaatggaaaccatcttagaatcttgttttgggtctctctttagtttaagggttagcgaatgtccaatctcttgcaaactagttcatgctttgttatgtagacagttagttacccaacaaaaatacgaaatgtggactgtttttggtggacatcctcttagattctctttagttgagtttggttctgtaactagtttgccgtgtggtgaatttccggaggagtatgaacctgacttcttccctagacgtgtcaatgggacaaatgattactgggatgttttgattggggaagataagaatgcaacactagctgatgtttcctctaagttccaaactttaaaagggattgaagaccctttaaaactccccctggctctgcttttgattattgatggagtccttattgctaataaccagactcatcgtccaactttcaagtatgttaagatgttagaggacattgactcattcctggctttcccatgggggagagaatcttttttgaagactattcagatcatgaggcctgttagaaaaaacccgtcaatggttgattctaagagaaaaaggtctcgtcctggaatcaagctagaagatcccatccaacaattcacaaatcagatgcaacagcagagtatagctatttatggctttcccttagccctgcaacttcttgcttataggaacatttctggtctactggacaaaattcctggttctgcagatgagagaacgtttttggaatggcattcaattgggataccgaaaagcaatcttactatcaacgatgttcatctccttgaacgtgttcctgatgtaagtaattgtaaacattgttgtggtatcttttctttcatgtgctcttatgactttttttatttggtctaattttctgagtctgtttcttcagatgattgttatcctgaagctatttgtaaacactaatgaggatggttggggtgag

SEQ ID NO: 20230 - DNA, 1118 bp, Arabidopsis thaliana landsberg
tatgtgattgataactctttttaaaaggtaaagtatttttttaaaagattagagtttatttgtttcctttaatgttaaatgcattgtatacatctttagtataaaaatcttatattgtatttgataaattattgtagttcaaagatttacaaacgctaggataaatagaaaataatctggttggaaaatatgtaatggttttgtgcttatcaaaagttaaatgctgacatgtacagtaaaacctctataaattaataacttctacaaattaataaattattaagattccaaaaactagtataaaaagtgatatatatcgatagattaataagataataattattttgaatgttctatgtaaatatatggtctcattaatatcataaattaataattatatagatatccccaatatatatatatatatatattatatgtaaaaggattctgtaaaatatatttataataaatttttgcttaaattcatatttattctttgtttgactatagttttcatattttagtgtatcaaaacttttggtattgttttctagtcattattattatgttatatttgtaagtggttctagaaatatattttctataatgaaaaaatctcataaagttttttaaaaagttactaaattaagaaaatctctctataaattaatatttattaatttatcgataaattaatacctctataaattaataaaattttgcagtcccaacattattaatttatagaggttttactgtatatgtaggttttcttttcttcttccaaaactgatccaatagttgaccaattcatcataatcgttcttagtttaagttctagccattatagatactctattatagtcttatagacatagatcatgcctaaccatactctctaatctattccacatagctttatcctattttccttttaatctcaaccaggaacagtcatattacattctttttaattcagcaagtaacggcttacaaggcaaactagatatcttcttcttcaccatttaaaaacggtttacaagggaaactaaccaaccaataattgaatatgaactcatctatacaacaatttccttctatatagacctatgtctaat

SEQ ID NO: 20231 - DNA, 1424 bp, Arabidopsis thaliana landsberg
ctctgtttccttctctgttctttcacatgtcagagatacaaatcctctaagtgtatataatactttatatgtatgtatcagaacctcactgcaggatgcttcagttcatgattcttattaaaacagagggttctctagacactaattagcagcagatttgtaattgtggctgtggttttctctaattgactccacaatcatcgcatgtatacgaccactccttaacatatatatttacctaaaaagataatactatattctaatcaccccacgctggcgatgcttttaaagttcaattcattacatactctatagtctatgttatcgttattgaaatattcagatcaccatgccctacgaaatcaacactttaaattaaaatgttaataatcaacgtataaaatttattctgaccgttaataaactgttaataaactgttaataaagtatcatagagagccattctcactttgaaaacgttttactatgagtatatggtgtcgaatggttaggctatactaaccaaaacaaatggaacgtatacacatagtaatgcaattgcaaatatatattttaggctataataagcaaacgttttcaacccaacttttgctctgctttcttctcattctctgttatttcacatgtcagagtagatacaaatcctctagtgtatatatactctatgtgtatgtatcagaatactgctgtcactgtaggacgtttttgttcatggattcttagtaaaaccgagggttctctaaacactagttagtagcagttgtagctgtattcttttttaaagggctttgttttatttgtcacatagcaaacaatgacgatgaaacaaccctaatggagaacctggtgtggagcgacaacgtacgacatttggttgaaaccctaaatcctggaagaatacttaaactggagaagatccaggagcagatcgatggctttgtcgttttcaatgagtttgctctagcaacttgtagaaaaatattacaatttaataaaggccaaagataacaccttcgtcacaaacataggatccgcacaagtggaagataattcaaatagtctacattttgacataaagattagagtaatggttggacagagtaccgtataattaggatccaattatttaacaaagtattaattagtattgttagtgaattaaactcggaaagtatcgattgacatggtgagatatagctgtctctcagttgacatcggcaaaagaatatttttcaagtggcctagtgataatttaaaatatatggatatatctataaactattttacttagatcatcaatgcaaattgtgaaaggcaaacaaactcattttttcttgatactaacattgagatcacttgagaggaaactaaccctggttgattacctgtatagacccaactca

SEQ ID NO: 20232 - DNA, 553 bp, Arabidopsis thaliana landsberg
  unsure (1)..(553): unsure at all n locations
aaaagggagttcgaatatgcgaacatacaaagcaggaagcaaagctatatttattcaaaacaaaaaacaaggaaaaaatgcagaagtcttagacacgcttcaaactaggaaatcctcctcgtcttgaagaacacctcgacaccttgactggcgatgtcgagaatgggcatcatacagtccgggatgcgggcaaattctgcgattccgagttcgatccagtctccggggtgagagttgagggtgtgtaactcccttgatatcacggtgactctctacagcatttggttgatcttctttcgaagtttcttcttttctgttgattgatttttgtgttgagccgctagagctttaataaaggacatcgcgatgtcctgatctctgctcaaaaggtccttgattaacgcacatggagctcggatttgggatctgaagttgcaaagtnnnnnnnnnnnnnnnnnnnnnnnnnnnnnnnnnnnnnnnnnnnnnnnntcgaccctcgaaaagtctggcatggattccgagcatcggacgttgaaggccataactgcgaaag

SEQ ID NO: 20233 - DNA, 519 bp, Arabidopsis thaliana landsberg
aacatgaacaataataataacaagttaataacagaataatcatgaatagtgtatctccatacccaatccacataaagcaatagcaagtactacccaaaaatatttcaggggtgaacaaggtatagaggtaatcaaaactggggtaacataaaggctcccatcaaaattatcctatgcagatcattaaaattaataagaacatggctgggaaagtaagtgatcaagggcacaacttgcctggcacttgagattccaggtaccaacttgcttttcagatgacatgtgtcctcgcgctagtcgtagcaatacaaacaaacatggtatagacaaaattaacatcacaccaaacataagaacaaactaaataataatgatctacgcgttgctacgagactaacgcaacttgaatggatcaaatcggtgttaaaacggaggagttatgattttctgaagattctatgtgtttcgtacaagattaaatgggatataaatttttaatgtgactttcatgtcaaaaca

SEQ ID NO: 20234 - DNA, 569 bp, Arabidopsis thaliana landsberg
gaatgggtgtgtgtgccgggagcttgatgcggtacttgatcgagccatcgagcagatgaaaccgttaagaggaagagatgatgatgaagttaaagacttcttgcaatatttgatgaaattaaaggatcaagaaggtgactcggaggttcccatcaccattaatcatgtcaaagccttactcacggtaattaattaatgcttttagtttcataattttaggatttaagtatttgtataaatagagattgtagatatttatttgtttatgaaaagtgatttgatcattaatgttattgttttacatatgaaggatatggtggttggtggcactgacacatcgacaaacacgatagagtttgcgatggcagagctaatgagcaacccggagctgatcaaaagagcacaagaagagctagatgaagttgtaggcaaagacaacattgttgaagaatcacacatcactagacttccttacattttagccattatgaaagaaacaaataggcttcacccaacccttcctttgttagtccctcaccgtccggctgaaaacaccgtgggggcggcgt

SEQ ID NO: 20235 - DNA, 1013 bp, Arabidopsis thaliana landsberg
ctaaaggttatatataataggggatgaattccatgcaacaatgattacacgtttcaatcaaatccgtaaggaattttccaaatttaatgatggtgagatttctaaggcatatttttctctcttgtaggtgcccactttgtctcctccttcattctccctttcgttttcttttcttagtttgttttcatactttgatgtctttgaaaattcatgtggagatgcatacacgagctcgtcacgtaccgttggctataacctaaacctaactacatagttctatatatatccactatttccatacaagttcaatatcaattttcattgaaatgagtttgaggataaaacaagaacaaaaaatataagttgggttcgtaaatacgtaagttatcaaaaaaaaaattgaaactctaaaatcaatactatttgtggatctatatccagcaaacaaaggaaaaggaatgtattactgaattccaaaataagatccagtgggcgacaaacccaagcccaattgtaattcaggcccaatgggcctacaaagcagaacaagataccaaattaaggcacaagttagttcgaaaaactttctccggcggaaacttacgccggcggcacaaactttgtgtcttgctcaagatgattgcgtcgaattttatgtaaacaattggctctccgatgttgtcagccatggatgttatgattcactcttcaagctttctcctcccttgcgacgaaacttgtgggacgagatacgctctcgttgttcttaaccagaatttaccacgattcactcctcttctctgggaacatggtaattatctctctattcttcagaatatataaatgaatctgtttttttttattacgcatattctgtgtagaacagcaaaacttcgtctctgtgctgatggaggcgctaatcgcatctacgacgaattacctctcttcttccctcacgaagacccttttgtcattcgaaacaggtctcagatttatgtctctatttctctcat

SEQ ID NO: 20236 - DNA, 955 bp, Arabidopsis thaliana landsberg
ttaaaattttcacaggtatgcactgtttttatacacatagtgtataatatttgtcattttacttcattgttggcatgagatatcttggcttatactcattttgctctcctctgcagttcctgatgttctatgcgtgctcactagatcctgaaaattgtggtgtgaagtttgccagtaagctgttggaaaaatttctctccagcaacaacaatcaagttactaggtgggtttcatgcttatccttcatggtaaaaatatctctgcacgatatcaagctaatattgttctctactcaccagactcaccgcttgtatatggttttgttttctcctcttactaagcaggacgaatgcagtgacatatctagctagctacttggctcgtgcaaattttttgtctgcttcttttgtggctagcatgttaaaaaggtagaaagagactgctagaaaaactggcaaaagatgattggtttgaatttaagtttcactttgttgtaacatagtttctcttttgctgaaatcctagattggtggacgagtgtgcggaatattgcggaacatgcaatgatgatgtgaagccagaagcacatcaagtgttctattctggatgtcaggtatagtccaagtttaagaccatcttatggcttttgattccttaagaactcttctgtgaaatcattgacgtctctagttatcaatcattgttaatgttcacacccttaccagaagcttattggcgtttgggatcatatgctattatgtcatgtatcgcttaaagttgttacttttctatgactgtaggcaatcttgtatgtgctatgcttccgaatgagatccatagtggagattcctcgctttcaatcgcagtttagatcattggagtcaattttatctcacaaactaaacccactactggtgggtgacttacactaatcattttcttctcatagctcaac

SEQ ID NO: 20237 - DNA, 1917 bp, Arabidopsis thaliana landsberg
  unsure (1)..(1917): unsure at all n locations
tataattggctctattcagtcatattatacagttatgaaacatcatcccaacttgcttcttatatttatttctttcacaagcattcaagaacaaaagcaatatctttttccaagcttctgcatagaaataacacctcctggttctttcttagctctgtagaggatatatccatacggaacgtatctgctggaattgaggtanacatagtacttaaatcttttggaatctcaagatcgtcaagaacctgcagaggagcaaggttaagtaaggcataaggcataaaatctcatagacaatgctcgcatgatagtataaatgtgttgcttgagattctagtgttgagatcaaaccttgaatacaccatctacattacggccaccgacaaggaacttgcaacctgtttgtttgcaatcaccaagtacctccaacatccttttgtggcttccttcatagtactttggctgcaataagttataatttcttattctttcttctttaaacattgatcgcaacagtttagctctatttgtagggtttaaagaaagaagcaaaaagaggatcaggctaaaagtacatacattaacaagccttgctgcagtatcagcaccgattacaaaactgcttcctggaaagagttcagctttcttgtagaagaaaggctgatttgaaactattaccgtcttttctgcaaaccggataccaaaccaatatcaaaacgatggcatgaggagatgtaagaaaaagtggtgtacaagattgaaaacatgaataactagtgagtgataaatgaagatttcgccgtaccaagtacttcaaattgtttgacacgatctttaatctctgtaactgcaagcgatggtttgtctgcattcagagcagatatttcaaaacatggataccctccggactcagaaacactgcatcaacaaatctgcttgtgagatttgattacattctgttatcagatctgttgattggagatcataaaaacgtcaaaatgccagagaattctccaaaatacaacaaggaaatcaagtcatataacacaactagagaaaataatcaaattactaattaccttgcataatatagcatatcagtattaactaagaacatagaataaacaaagagtcaaagacgataatgaagacatgctagcttacctcatagcagcttccaacagcttgagatgaccatcatgtaatgggttaaaagaaccaggcagtataatctttctatctttatccgacccgtatgattctgctgtaaaggtataaaaactacacaattaatggcaacaaatgcaagattctgtttataaaacttcaaaataagttttaaagagtcaaatgaccaacaatcttacctttagaaaatggacagatcttaaagcatatttttccatctataagctgctctagttcttcttcttcactaaacctggtttcagactcattaggcacctcagaatcagtcaagccagagtcaagtgtctcagaaacttggcatgctttggccaaagcctacgatagtgaccattaagtacttttagaaaagttatcccctaggcaagtactatgttgtaactagctttatataacacacctgaattagtacacagcttgccactttatcttcttcctctcggcttcgttttccctaagagttttccacagtaagataagaaacacaccaggacatagataagaataaagagtgacatgagaaagaatgctgcaatcacctttgttagagtaactgaagtttcccattccggttggaagctcttatcgacagaaagaacctactcatcataacagacagaactatatgagtaataatataaaatctaaatcccttgctatgattgtattttttcagaacatgacatataacctatgatccccacgctttgg

SEQ ID NO: 20238 - DNA, 668 bp, Arabidopsis thaliana landsberg
gtccagagatatggaggctaaaatcatcagaagactcatgggagaaggtttataccatagatttgctttcttgttcttcttcttctttatctgagttccgcgatggatttaattggacacgaaaggagttgcttgagccatgcacaccagtggcgatatgcaaggacaagaagattctgctctcacatcgctatgcccgcaatatgatcaaatacgatccccaaataaaatccatcagtttagtttaccaacgtcctctgtgtagaagatatgcttcttattttcagagtttgatctctcatatataaaatgctttgatgtatttggaagcatgtaatgtaagaaacaaagcattgtttggattgttattttatccgatagcatgctgttattcataaatcataataaaccatacctatttcgccaaatgacactatacttaccaaaaatcatactactttatgaattgatacagatttttcaaaaaaatgaggacgagtattttcgttaatccacacaaaaatcagtttcattctgtgtgtggatgtaaaaggaagatgaaatatagattttatcttaaagggaccattgccttcgtgttaaaaaaaagggaccattgcatccgacatcttttatcccaattaatcttgaaatgtttattccaatat

SEQ ID NO: 20239 - DNA, 483 bp, Arabidopsis thaliana landsberg
atgcataaggattttttgcctttacacatttcgaaaaaaaaatgattgtagacactaacaaggctggaccagtatacaaaatctctagttttgtccaaccttaccgattttaggttgtctggtgaaaatacatctaccattccctccctcccagataaaatccaattctttaactcaccaatcctaccttcagctatatagctaacaatttttgcaagaatgcctgcaggcatgtgaaagtttgttgacagctacatgtataaaaacagattttaaaaatttataaacgtacgttttactcttttataaagactgcctcagctcttacctttatttgaaatccaacaattgattccagattttaactacaagttagttcggtcatccgtcgaggagtttgttgtcttctactacggatgtaacgattgggattattggttggaacagggcaatgcatgcagtgacctttctcacaaactattt

SEQ ID NO: 20240 - DNA, 1845 bp, Arabidopsis thaliana landsberg
agccagcgagagagacaaaggtcagaagatttgatttttcttattcctcttcaaaggcaaacaatttacacagctatatatatatttttagggtttttgagtatctcgcgaggttttacatagatttctccattatggtaagttaatgtttctgttgtctatcttcaattttattttctgattgtttgttgttcctcagatcgatttctgtttttgtgtatctctaaactttttagccttgtgttgggttgcgcgaatcgattatttgtttctcttgattcatttgcatgtcataagagcttcgggagaaaaaaattgcttctttaggttgtaaaaagcaataaaagttgttagctttttgtgtttgtagcttcatgatctgtggattttattttcaaagttttgtgttttaatgtttttgggttttttggtttgtaggattcgatgatgaatcagaagactgttttggctgtgacggatgatgtggtgttacctgttagctctgttttagctataatgaaagagcttggaaaggaagtgattgagagttttgatcctctgattattactcaagcatccacaataagtaaatctctgttcctttgtgttctctgattatttgttttagctcaggttatgaattagttgttagactgctctagttaagcttgtagtatggttagtctggtgtgtatgtagataggaagattcgtgtctgtaccatatggagagatgagcaattttgtagggtgagaacacttgaagacgacatgttgtgggatattcttttgtgtcctcttctcataatgttggactattgattatttttgcagatcagtttcctttggatgcttcctctgtggaggcggtgctagccatttccaaaacatctgatttcccaagtgataaaatatgtggtgagttctcaagaatcttgaagcctggtggtacggtttttgtgtgcaaagttttggagggtgaaacgggagaaattcaacaggtttgtgtcgtgtaattagtctatgtataatgggtgtcttggaacctttctttattaatcttatggcgtcttccttgcagaccattcaaaggagagtgacattggctggttttcttgagccacagtgtcttgatttgaaatcaattaagttgtctacgttcagtttatcttttggggtgagcacttttacacgtcctgtctatttcttttagtatgaggaaacgtttcttcttgaacggaaataggaatataagcttgctttttgggttcaggcttattctaggcctttgacatgaaggataaaagatcttcattctacttatctgtcaaacttgcatatataccctcactttggctcatccatataacagttaatcatgttgtcaaatgcagattaaggcaaagaaaccttcttggaagattggttcatcatttgctctcaaaaagcctgcaacaattctctttacagttgatctagatgacgacgtggatcttattgatgaagattctcttttaacagaggaggacttgatgaagccacagcttcctgttggtaattaaagacagccacatgatctttgttatccttatatatcattcattgtattgaagatatcttgcatcttttgcagccagcggttgtgagaccactaaaaaagcttgcaagaactgcgtctgtggtagagctgaaaccgaggagaaagctgtgaagcttgggcctcacagaggatcatatcgagaattccacatcatcatgtggcagcgtaagcttctttacccatctctttttcagtatgcattggaattttgggtccacaagaactgaaaatttcttaacaattctt

SEQ ID NO: 20241 - DNA, 1414 bp, Arabidopsis thaliana landsberg
  unsure (1)..(1414): unsure at all n locations
atttcatacaaaatgggagtctggatcggataatgtttttctttgatttaaagataaactttatggggggggggacaccccagaaggaatttatgttcacccccttttttctttgtttttatacgaacaagattgtacctttacgttcagtttttaaaagtcaacgcgaacccttagaaaaaggatatacgagaagtacctgaggatcttatgatggctaatgcggcagaaagttgcgaacggaacggcatgaaatcgagcaaaccgttgcctgatgtgttgaccgctactcggtcgtccattcgatacaccactttgccttggcttggtaaccatatgaaatccgcaaactcatgtttcatcccaaatgttacggcttgatccccaaaatccgaatcatttctcatgacataccttaacgatctcttaaacatcggttgcaatttaagggttaccttttttgagtaaaaaaaaagtgttagagctatgactgatattgttacgtaataagaacaaaatatgaatttttaattgatctaacctgagagataaccccaagaacgccaagagaaaccttagcggcgttaaattcattaggcgttgtagtctctcttaaaactctaacctttgcaaagccgtcattgaccgaaccaggactaacaatcctgatctcggtcacgtaatcatggaccgcacttcctttaccccacaatgagctcccgtgagcaccggtccccatcataccacccacggttagaccccaccaatacggtgcataaggcaacgccaatccaactttagctgcttcagcgattaattgcctaagcgtcacgccactctcaaccgtcaaagtcatggccttcgcatcggcttgcaccgtgtggtttagaaactttgtgctaatgaacaatccgtcgtttccatcagtgcacgtgagcttagggatgctatgggaatatcgagtggttacacgcattttccgtccggctttagtagctgcagcgacgatagatacaagctcggcttcagttgttgggtaagccacgttggcggctctacacgtggagcggtctgggaaggctcctaatgagttggtgactatacagttcgtgtttcctgacacacatttaacaggatcttcgggtggnnnnnnnnnnnnnnnnnnnnnnnntgtaaataaacaatataacccgagaagggtgcgccaaaacgaacaataggaaggagaataaccaaatgccatggtttttattgagttttgtctaatggaggcgtttctaaatgtttggtatatatagtggttgtggcttaaaggccggttcagtgatgcatcatgctagcttgttgatattttacataaaatatgtttggttgataaattcataaaaggctggatgagatgcatcatgctagc

SEQ ID NO: 20242 - DNA, 1323 bp, Arabidopsis thaliana landsberg
tgatacacacagttatttgaaagttaagttttgtttcgtcaccttttctcatattgtaaacgcgtttgcgggctaagggggttggattaaacaaaaccttatctcattaaattctgacaacgaatcaaatattcaatcttcgtgctgatgatgaagataatatcacgtctctctcactgcagattcgatctcagggaaatataatacttctacagagttacgtggtcaaagtgttcgacgaaatgcctcacagaaagccaatgagttgcgttcaagtatgaatactcttgcagatagtgggatcattgtcaataagctgattttcgaaaagatttcgtcttgataacattttgtcaacgcttaccagatttgtattagtttattcgatctttttctcccggattctatggatatgatcacgtgaagcatgggagatgataatgtatgcgtaaggtttgttaaagttattatatttacaaacattcttccttcaatagttcttcattcatttgacgtttgcttcttcttgttcttgttaagtttgttttttgttgttgagttccgttgccattttaactgaaaatgatccaaacaggtgaagaagatgaagaaaaggcaacgtcccttgaagttgagtttgcttctggaaatggtgttgatgatgaggaagagcttcggttgcagtgggcaacagttgagagattaccaacttttaaaagggttactactgctttgttggcaagagatgaagtgtcagggaaagggcgagtcattgatgttactagacttgagggtgctgagagacgcttgttgattgaaatgctcgttaaacaaatcgaggatgataatctccgtttactcagaaaaataaggaagagaattgacaagtaagtcactgcacgactctactgtgtttttttatgtcaagtagagcaacatttgttttgtaaattgtatgtgcatgttagcaactattgaaccttcatgtaattgtagagttggtatagagttgccaacggtggaagtgaggttcaataacctttctgttgaggcggaatgccaagtaattcatggaaagcctatcccaactctttggaatactatcaagggcttactatctgtaagtactcaaatttatttgctgcatcgatctgaatatggagcgcttttctgctctcaatgttctttattcatgtttttctgctttccatgttacaggagttcatttgttctaagaaagaaaccaagataggcatcttgaaaggagtgagtggaatcgtaaggcctggaaggtaaagtattcaagaggttattctctagtcc

SEQ ID NO: 20243 - DNA, 915 bp, Arabidopsis thaliana landsberg
cgcccgacaagagagaggccattcgcgccgagttagctcgcttggttgcagctggatttattagagaagtattacaccccgagtggttagccaaccctgttcttgtactaaaaaagaataaagtggattggcgcatgtgcgtcgactatactgatctcaacaaacactgtccgaagatcccttcgggctcccgaggatagatcaggtggtggactctaccgccggatgttctgtgctgtctttcttagattgctattccaggtatcatcagattagtttggcaaaagaagacgaggaaaaaacggcattcatcactccgtttggtgctttctgttatacctccatgtcgttcggcctcaaaaacgctggagcgacttatcagagagctattcaaacatgcttggccgatcactggggcaagcgtgtggaagcttatgtggatgatgtggtaatcaaaacagaaaattcagaaaatttcattgaagatcttcaggtggttttcaacagtctacgacgatatcgatggaagctcaatccataaaaatgtgttttcgggataccagcaggaaagttgctcgggtttatcgtcagccaccggggaattgaggctaatccagataagattgaagctatcatgaagatggaagctcctcggtcacaaaagaaggttcagtgactcactggatgtatggcagctctaagcagatttatatccaggctgggagaaaaaggtttgccattttacaagctactcaagaaggtggataagtttcaatggacttcagaagcacaagaagctctagacgcactgaagaaattcttgacaacaccaccagtgctgaaaccacccacggcgagtacgccgactcaaccggctgaagatttgttgctgtatatctcttgcacaactcacgt

SEQ ID NO: 20244 - DNA, 1247 bp, Arabidopsis thaliana landsberg
ccacggtttgaaccggatctaacccattttatatggattttccctaaaattaaaattttttaacctaagtaaaaaaattgatttctcacttccgtcgtcgactcttctccctccgtacaaacgcgttccgtctccggcgatttcaaaacaactaacatcgcctttttcttttctccggcgactccacactccacaacgagcccctctatttctcatttccgagtaattcaccgtcgttacatggatcccgttacctaaccgaacgtcgcgactccacacagttccgccgtcaaaaccgaacgtcgcgactccacacatccgttacagttccgttgcagttccgtcgtcgttccaaaccgccggcgttccaaattgtaagtgtagattggaacggtttttgatttttgatttggttcggtttttgatttgaaacattagaattggttttcgttgggttgatttgaacggtttccttgattgttgagtgtttttgcaaggtaatcatgggtcgtgtaaggttagtcactcctagttcgagtgaaagtgaagacgagagggtcacgatcatccgtgaagcggatatgaaccgtgaagaagttgcagccgaggaaaacaaatttgaagacgaaaactgtgaacaagagcctccggaaaaccttaacgaaccggaagaagaaaagatttctgaggtatatacaaatttatgaaaattttgtgtgaatattgatgtagtgtttagggacaactagaaaacaatgagtacaagttaatagtataggtctgtgtaattggtgcatggatatacgtgattaatcatacattaggttgcattagaaaattgaattctgagaaaggttgataatgttgttctgagataactagtacaagtagtacagcgaaatattaattttatggttgtgtatgaattttcaggaaattgatgatgatgaaccaatgccatctcacgggatggaagaaaaccctcaagaagaggaaaaagaaagggaagaagaagaagaatctgaggtaaatggttatttctgtaaattgtgtttgaatattgaaagtattgtgtagggacaactagaaaacaatgagtacaacttaatagtatagtttcaacttatgtgattggtgcatggatttatccgttaacgtgatcatacattggtttgtttgattggtgcattaatttaattgtatgattggtgcatcaatttaatacgtatagtttcaattctgagaaa

SEQ ID NO: 20245 - DNA, 711 bp, Arabidopsis thaliana landsberg
  unsure (1)..(711): unsure at all n locations
ggagaagcatncttcttggtcgatatttgnngaaaagggttctgctaatgtgaccggaaanggnccatcaacctatgtgtggtttgtaaaatggataaatgataccttgccaagagcgccagctagtaaacaatactttttcaaagtttctgatttgtttgatgcagatggttggaaattggacaaattagaagagcttttcctcccacaagatatagctcaaataacggcaatggtaccaactgaagttttggaaggtgattatgtttgggctttcactacaagaaaacacggtttttacgacaacatcaggagactgtataagtagtcgtaacatttagcgactattgaatgactatttagcgacaaatctacgactaaaataaaagggacgttccgtaatcgctaaatgacgactgttataaatagtcggccaagtagtcgtcaggtaacgactacgttacgactataagtaagtcggagaattaagagtcgctaataagtcgttaaaattgtaacaataatcaaagaaattttatagtgttataagtttgggtattcctaagaaaattagatatgctaaaattagaccttttaatttggaattggcaagatttaagttaaaaattttaacctatttcagttccaagctttatttaaaaaagcatttcttaaacaattggcccaaggatatatatatatatatatatg

SEQ ID NO: 20246 - DNA, 1070 bp, Arabidopsis thaliana landsberg
tcaaagaatcatgtaaagacaacaatctcacctttcttgctacacacgttaataaaccctaactaggttttcgatttttcttacccatctcttatctgttctgttttctatcagattgaccgtcgatgacacacccattagagagtttaaaaactatgagtctctcggtgtcttgtttccaaagaacaagccgatgaggatgtacgcgagtttatggaacgcagacgattgggcaacaagaggcggtcttgttaaaactgattggtctaaagctccattcatggcttcttacagaaacattaagattgactcgaaaccaaactccaattggtacactcaagaaatggattcaacaagccaagctagactcaaatgggttcagaagaattacatgatctacaattattgtactgaccataggaggtttccacagggagctcctaaggaatgcacaacaagctcatagaatctcaaattatattctatttatttatctacacttcctctctttcttttatgtgaaaattgtgaatgctctgtttctagcttgtctattatgtccgagaatttctttttctgtttttgattcttttcgttgtatatctttgtccaataaaggaaatgatgtgtctttactcttatagatatgtataaaaagatgtccctgttttatttgttaaaaaaaattgtttatgataatgatagttctttcttcttcttcttctttttttctcataaaaaaaaaatgatagtttcatttgctttatatatatacataattaatttacttacattgtaagaaatatgataaacgtgttgaatgcttctttttcaaatccaattattgaaaaaggtcaaaatatcaaattttatttattatagaatgtatcaaaagcttacaataaaaaactctctacctgagttttatctcaattttattaaccaatcgcatgctttcatagaatgagatattatgaaacgacgtcctttagggtaagaacattacgtcacacgtttattttaatattattttattatcgccctttttgtatttcgacttttttcttcgt

SEQ ID NO: 20247 - DNA, 700 bp, Arabidopsis thaliana landsberg
  unsure (1)..(700): unsure at all n locations
accaaggattaaagtaccattattctgattatttccatcgaaaagcttttattattcttaaatctggnncgnngagagaatgtagcttgtgtcttgtgtctcacaaaattaattacatcttaatatttctaaactatttttttattaagttttcaaagaaaaaaagaaaatatttttcgagtttctaaaatggaaaggtgagtttccataacatatttagacatacaattttaggaaacgcgttttcgtgagtttccatcatgtttctatgagtttttttttctaaacgttttggaaacgggaaacgtactgcgtagagaattttcatgcaacgtaagaccaatgtttctttctttccttcataggcactgcctggtcgtaacaactccaaaaataacacatcggatctgattggtaaattgataattagcatactaataaaggaagaaaatgtctattatactagcgtaaacttttattctagttttatgtaaggtaaacattaacgctgaaagaaaaaagaatgtgattacaaaagttttcagctcattatgttaggttcagagtaatctaactaaaaacgttttttactcttcttttattctaataccaatcagatcatctatattatataaatcaaactaccatgacttaaaaagggaaaaatattatatgaggcttaaataaaaaatccaaaaaa

SEQ ID NO: 20248 - DNA, 559 bp, Arabidopsis thaliana landsberg
ctctaaagtcaaacgtcaagtcaagttaaatgagaagaagtgtagtaaagtttccgacctttcggcttctccacaaatttacaatttagtcctcatagtataacaaaacaaatattctagtgatatattgggccgaaggcccattatgtttttatctcacacatttacatggttaacattcaatgttaatttttaataggaaaaaaagttagagcgtgaaatgaggtaagacaggcaaatttagttgaaaaaggcataatctgtccactaattacgcctcacaaaacatggaagttgcaaaaatacaacaaccttaatctgttatttgtccaaatttccaacatcttcctctgttgatcatttttttgtctgattgattctctccaggcggcgtttctgaaccggaaaacatgagccgtctccgagcattttctgcgccggatttagtcccttcagattctggatctattacatcatcaccaacaagaaccatagagcaccaatctcatgaagattctggtttggaaggtagatcaatcacattcatctcataaagatc

SEQ ID NO: 20249 - DNA, 888 bp, Arabidopsis thaliana landsberg
gacatcctgaatagaaaacttggtgtacttcaggcctagcatcatcattgcatgttctgcaataatcagcacactcatccaccaatctaggatttcagacacaagagaaacaatgttacaacaaagtgaaacttgaattcaaaacaatcatcttttgccagtttttctagcagtctctttctacctttttaacatgctagccacaaaagaagcagacaaaaaatttgcacgagccaagtagctagctagatatgtcactgcattcgtcctgcttagtaagaggagaaaacaaaaccatatacaagcggtgagtctggtgagtagagaacaatattagcttgatatcgtgcagagatatttttaccatgaaggataagcatgaaacccacctagtaacttgattgttgttgctggagagaaatttttccaacagcttactggcaaacttcacaccacaattttcaggatctagtgagcacgcatagaacatcaggaactgcagaggagagcaaaatgagtataagccaagatatctcatgccaacaatgaagtaaaatgacaaatattatacactatgtgttataaaaacggtgcatacctgtgaaaattttaatttttgcgtgttcagaattaagttctcaaacgactcgaagagattttcaaacacctgcgccaaaaccatgaatatcaaagcccgagaagatgaatgcatctaccacaaaggtaatgaaacgaaagatatatctgttgatgaagctccatttggtggcatacctcatccagacaaccagcatcttgacaagattggagatgtttatataaacaagaaatggtgcgtgagtgtatttatatactagagtgccgtcatttgcgacgtcaagttcgata

SEQ ID NO: 20250 - DNA, 971 bp, Arabidopsis thaliana landsberg
tcatacaatgtcatcgagacgaagtacttgagcctccagagtcggctagagtcataggattctcagacaaatgcgacgttgagatattctcagtggaagatcacttgctttgctttcaaggtcatcccgagtataacaaagagattctccttgagatcattgatcgtgtccacaagatcaaatttgttgaggttcgttttaaacgtctatctttggttttattaatcctattatgtatagattggtcggtcttctaatgtcccaacccttgggagattattccgctacgtacccaatttaaattccgttgttcaggatatatatatatatatatatatatatatatatatatatatatgtagccagggtgaggaatctctaaaacgattttttaaactaaaaaatatgtaggaggaaattttggagaaagcaaaggattcgatcaagaagtttgaaccagacacgcagcgtttgcacatgctttgcaagaattttctgaaaggacgaagaacccactaattggtttagtttccacgttcatggtctaaataaattctactacgtttgtgtaatttcataactattatatggtcatggtcatcacataatgtaacatatcttcgcttttaactaaattaccgactgctataagaaataataataataaattaccgataaacaaaaagaagaagactggtatttgtaattttaatttagtcatttataagtgggtataggttacgtgtataaatagattatttgatcttcaaaaaatacacgtaaaatcgagctacggtaaacaaataaatgtgattctaaacttagataaatgattaggtggagttgtcatcttatagacagctaatctcgatgtgtgattctttttttttcaactaattttgactatttttttctgtttctttattaacaaaaatctaacttggcggtctgatctgtcccccgcgcgctta

SEQ ID NO: 20251 - DNA, 1093 bp, Arabidopsis thaliana landsberg
cctcgactctagaggatccccctcatgtgtagtgtaaggctgatcaacaaataatggttaaagttgagcattccttttaataagttggtcaaattttattagccattactaagtataagtgtatactatcccaatataataagagttcacaattataataaaacccacagtgcaatgcatatgacaggttaagcttacttccataagttaatcatgtgagtgtccgaaatgctcatgactgtaagcacggctgatataccagttttacactcttcagaggttgcacattttacccacaagccgtgtcacccattggacaaggggtctagaaatcccattcatctctaccgaggagacaaggtagggtagcacgacgaggcctttccaaagttccactagttcgagaaactcgttaaggattcagaaagaaggaagcataggaatccctcgtccaaaaagcttcgcggacagtttaacccgaggacctccctatactctgcagcgacgcactccccacttgcccctttcgggtaaggtagtcctccactagctttcctaattaatcagccaagggcgtcccattaaacccttgtggtagcactgttttcccgggtggtcgctccatgttccaattaacataatgatcttatcatgaacgataaataacaacggataacaaaagtataatcatgagtaatgtatcttcatacccaaaaccacataaagcactagcaagtactacccaaaaagttcagtggtaacaaggtataaagataatcaaactagggtaacctattgggtcccatcaaaattaacctatgcagatcattatgattaatcagaacatggctgggtaaaaagaagtgatcaagggcacaacttgcctgagacttgagattccaggtaccaggatgatcttcagatgactcgtgacctcactgctagtcgtagcaatacagacaaacattgtataggcaaaattaacattacaccaaacatacaaatagaatatacagtaataactagacattaaaaataagatcaccaggactggaatcattaaatttgggggtatagattttaagttatggat

SEQ ID NO: 20252 - DNA, 836 bp, Arabidopsis thaliana landsberg
  unsure (1)..(836): unsure at all n locations
cgatttgttctaacctttaaaaaaatcctaaataataacatacgagtttaaatggtaacaatgttagtcaatataacttctagcaaataagaaaaataataacgacgataccacaggttgtctccttgtgatttacaaaaataatcaaaactaataaatacttttctgataacaacctgtatcgcgataagcttctatccgctaacatcagtatcatgataatctcgtttcggctaaagattatatcattttagttaactttttaaaaaaagttcacaaacaatagactacgagtttaaatggtaacaatgttagtcgatataactactagcagataattaaaataataacaacgatgccacatgttgtccatttgttttataacaaaaatcaaaactaggaacacgttctgatacatgttgatcatttgtgttttacaacaagaatcaaaactataaacactttctgatannnnnnnnnnnnnnnnnnnnnnnnttcttcttcatcttcaaactcagatacttcccacagggtaatccagaactccatctctcatattcatataggcatgaaagaagaagacttattgttaattggagagaagaaaatataagaaaaaaatactcccaaaacaatatcttaacaaaatctattcctacaacatgccctacgtacattctataattgacaaaaccaataacgtatgggtataatgattaaaaaaaatgttaacaggtctaatgctacagttcaaatggaagaaacttaatatccaatctttttgggcatatagaggtgaattatccaaccttatttggatattatntgaatgctat

SEQ ID NO: 20253 - DNA, 1057 bp, Arabidopsis thaliana landsberg
ataacaaaaacaaaaatctagtaacatattctaaatattttatattatttttgacttaccttatgaatttgtaatatatatttcagtacttattgagaatgatttgtggtggtcttggatgtaaatttatatagacatacgtatatacatatatatatatatatatatatatgaataataaatcttccatatttttcaaggattttttcttcttttttatagtcttatttgggtcagataataactttagtcaaaatgtttcattatttattcttatctgtcattgggattatatttcattcaaagacatccaaatttagtttattttaataggtaaataaataaattcgtaagttcatgaattctcttaaaaacccaaccggtctaccaatctggttcgcggttaaatccggttaatgacaataaaaatagtcaacgtacgttttgtcccgttgactgacatcgtcttctttgctgctttaacctctagggttctactattggctctttaaacattgtcgtgatggagtcggacgtcggagattcgtcggaaattgtccggtaattggaagagttaaaagctcaagaagacagaaatagagcactttatttcgaccctcgaagctaagctccaggatacggtggcagttgaacggtacgacgacgtatactttgattatgatccatgttgatctcgtcatgatgatcattttgtcgagatagccggtaaagtctatagttcagtgttgttgcctatccaaatttttggttatgatccgatcaacaaacagtcaatcagtttcaaggtatcgtcgagtatcaacttacacatgcaagatttgtatctacttgcacaaatcatcttgttagtatcaacttctcacaatacatagagattgacaataagatatccagattgtgttgtatccagattacacaagatatcctttcttcatcttttactacaatctcgagaaaaatattatcacaaaagtaagagttgaagcaccaatattattttaagtgacaaatccaaactatgtagaacatgttaaac

SEQ ID NO: 20254 - DNA, 1076 bp, Arabidopsis thaliana landsberg
gaaccgcactagatggctacgtaccaaaatatcccgggtaaccaaaatatctgttttataaatatatttccaaaaatattagttatttttaaactaaataattaaaaatatatataaaatagtaaaaatattcaaaaataatcaaaaatatccaaaaataaccgaaatatccaaaaataattaaaatatccgaaaatattcaaatcaaaataacggaatggatactaaatttaaaaccgaaagaaccaaaccgaaatttcaaaataaccaaatagataataactttagaaccgaaaaaaccgataacggaatggataaccgaacatccaggactaagtatcaatatgtggcttaaagaatttatgacatgaggaactcaccagcttctcccaccgatcacgaacttgtcagagacatagtactgtttctctagtgacgagaaattgggtaacgtccatttgtaaaggcggtcatgcaaactcttagtgaaggagaacacttcccatttgttaaaaacttcagtgacaaatacgtccacaccgaataaaacattttcaccgtcgaaaagccaaccagcattgggattagccacgtcggcgtaggctctaacattaccatatccccaatatggtttgaacagaaaaaagcgttttgcatccgtctctgtgtaccaagacatgcatttgagattgtgtgttttaaatgaaaattttggcatctgaaattatgcaaactatcagcgtctcaattgttttaaatttaaacgttggaaatttgattaatacaatatagtttataaataagatataaatagggcgtccggatgtatataccttgatatgttaagtacttgtcctctttccggttataaatgaagaatttgacttctgcgtaaacttcttttggagagttaaggagtgttgaattgtctatttggacgtacattgaaacgtaattaagtggagctccttccttaatgtttcctttaggatagacaataagtgtcctgtttgcaaaaggatatatagtcttacaatcaaatgtgtcgttgaaaatttgtgatgcaaagacatatg

SEQ ID NO: 20255 - DNA, 1498 bp, Arabidopsis thaliana landsberg
acctatccggcttataagaatgactgataggaagacctctgataattggaatatccaccggatccatttattcttgtaaaataggaatatgccactcttccgtgacaggattaattaaatggttaaccattagattaggatggaggaattttcctcttccatttgcggggcgtggtatgacgtcagaaatccaaggatctctccaaaccgataaactaaatcccgaacctagggaccatcttcctcccatttcaaccaatgttttagtcgaaaaaatactcctccatccaaatgatggagagcttgggtttttttgcttgtagagggtgaatattcttgaaatatctaccttttagcacccgagctactaaagaatttggatattggattaatcgccagtactgcttagccaacataacatcgttaaacttatctagaaaatgaaagcccaaacctccttctcctttatccctacacattttctcccaaactatccaatggattccacgatcttttccgttagaactccaccaataattagaaattgcactagttaacttagttgttaactcttgagggagtttaaaacaagacatgccatagtttggaagagccaaagctactgacttgatcactgtttctttcccaccttttgacaaatacttagccagccagccattgttttttttttttaatttacttttcaccacatctcgatcttactagagaaatttgcaaaactaggttacaaaaaaattatagtgcatttttatttttatttgcaaaacgtgctacagaattggttaaattttatttagtacattttttttgtatattatactagaaaaaaacccgttccatagacggatttattttcttgtaactaaaattaaatttatcaaaaaattaattaacaacgttgaaagcagaaattatctttcaaaagttacaaaaaagtatttatttttactgttgtattgtttctttcaccactaacattattgattaaaaataacttaaacgaaaaatatatcatatagtaataactcaaaatttctgaattaaaagtatatcacataacaataatttttggtatacttatatgaagaactaaaattaaaattattcgtcataaagctagcgaatgaaacataaatgatttttactcatggctatttgcctactttcataattattttgaatcaatggtggagtatttatgaaaaaattaatttatttggtgagaaaatatgagaatatatttttctatatagatatgagtatttacaatattttttcttgaaagattaataacttatcctataattttcttaatcctttttctatatttctatttttttttggttatttagtaacttataattaaaacgtttagaataattttttaaggatagatttcattaaattaaaccggtacagaggctgttacaataaatgcagaattgatacagattttgcattgcatctgttcttaagt

SEQ ID NO: 20256 - DNA, 1911 bp, Arabidopsis thaliana landsberg
ctaactattatagtctaggctgtggggttttgtacagccgagtcacttgattcctcaattccatgaaaagtatcctactgaagaggctcacgtaacctatagtcactctcacttgagtgattttgttttaaattttatggcctcttcctcaagttgtggctgtaacttatattgtgaaatatgtctgcctacaacatttgattcgttccttagcattcgtgtaagttagtatttttatagaaaatacatattttcaggtaactgcttatttccagcattaaacccgtatttaaaacacccaataataagatagttcatatgcttttttttaaggaattaaaacgatttggagatgaactatattattatggaccagccactatttgctgatattaataataagatagttctctcttttttttttgtttaattaacaataataagaagaataataataatatagtatcgaaagaccagccactatttgctgatattaatctttcaaacaaaatacggatgatagaaatttatttttatccgttcagatcagatcaaatactggatatatctagctatacccgtaagggaaatttgcaagtataacctaaaaataattaataaattggaaactaacacttcaaaaaccataaagtgatattgtgtatattatatgtaataaatacaattatatcctctttttcttctttcttctgcatgaacatcttctctcttctttcttctttttttccacaaccatcacaaccaccactacctttaaagccattatcgccggaaaatcgtatccgaagccaccatcgccggaaaatcgtcaccggagtcatcatcaccggaaaatcgtcaccgaagccatcatcaccattgtactattctattttgctgctagatttttgaaaattgaaacttgagatgatttcattttgtttaatgatttttgtttgggttccatgtattgtatcttagggtttagttttcttagatcaatatatatttgtaattatcttgtcgtcaccggcaccgccattgtcgtcaccatcgccactaacaccgccattgttgccgtcaccatcaccaccgacactgtcactgttgtcgtcaccatcgccaccggcaccaccactgttgtcttactatcgccatcggcaccaccactgttatcatcactattaccatcggcacggccactgttgtcgtcatcatcaccatcggtactgtcattgttactattaccatcatcgccatcttcgccaccatcacgctagccaacacttttctcttttatgtatgtccataaaccgaaaagagtgtcaaggatcacgtcactcttcttctcttttcacgcgcgtgttctcatgttttaacgaggagttacttgacttttcatccttctctagtgttatttacttagttttacatattaaggtgctatattcttaaatagattatcaaacatggtcatttctgcaaatcaccctaaaatcttatatataaataaatcttaatgaacaatgcataacttgttactccagttttgatttgttttttttttccttaacaataaaatttctattttgctgaattatttagtgacttttgacgtcaaatgaatcaatcccgataaagtaatgtcattttttcacacattcgtctgtgtttgtgtatgtgtgtgtataagttaataaaagctattaaatgttaggtgttatgaaaacgtccgtgagcatcatcacttcgtcaccctaagaacctaaatagaaataaatagaaataaacttccaactttataattattcaaagctctttgggtttgttcttaaatgcatacaccttcctatttcctaaaaagccaattactaattaatatctcaccacattttttctgctattatttta

SEQ ID NO: 20257 - DNA, 546 bp, Arabidopsis thaliana landsberg
gtctgaaattcggtgttgagggttcaactttggagcattgtaacttgcaaattctagggtttttgccctaggtcaccacatcaagattgtagcccaatcataggagcacaactttgcttaagagtgtgagtagagttgttaagaaaatattggagataattaagcctaaagattggctgtcaggctgattcagtctgaaattcagatattcagtgtagcagagccaactttgagtataaattccaccttgatttagtgctcaaatgggttcaagtcctatagccgaattattgttggtttatatctctataactttgttgcagaaagtaggcttaggttccacataaaaaatggagaaaacagggctccaatttgatctgtcagtcaagctttttactgaatccagtgcactgttcatcggttttcagtaaactcgccgtggataaggattggccgccggcgataaggatgtcgcgtgctcgggtaagacgcggcggcacgacaaaagttccggcgacgtgtcaacctcctaaggtgcaggcccgg

SEQ ID NO: 20258 - DNA, 1340 bp, Arabidopsis thaliana landsberg
  unsure (1)..(1340): unsure at all n locations
ataccgactattaagttacacacctccaatcctgtaagtgcaccataaactgtatttgcctgaaaccacaagaaactttaacctataagattcccacaaacacattccgcatatgaagaagctatagtagcaaaagtaaaacctcgatcgtggctgctccaacaatcgattgctcgttcttcttcgacaccatcaatgtataactctcatccacacccaattgaagctgaaattcaacagaaaacaaaccaatttaactatttgccgctatcagctcctaaaagattgaaactttccaattgaaggaannnnnnnnnnnnnnnnnnnnnnnnnnnnnnnnnnnnnnnnnnnnnnnnnnnnnnnnntgatatcatactcaaccattttcagaaatctaatcctcgacaatagagaacctctaccagaagcgtgtttaaagattatacccatatacctatcaaacgcagctctaataatcagagatccaccgccatttccagctacgattagagtcacggtgggatccaccgagagcgtttcgtttccgaacgaaaactccgccggtaacggccatagataaggaggagaatcagccggcgacggagttgacagagatgaagtgatagataaagtgatgaataggagaataagacgaagaagattcgttgacattttcgaaatttgggtcaatggaggattgttcgttcttgtcacataagaagaagaagaagataaactttgttttagtcgaaagattcaatttttatttattacacgaacaaccaacttgagttggtatcatgtttctgttagttcggtggaaacatatttcttaactcttactaaggtgtgtaatgtttagctccgatgaattcaaaatcttttgtgttctgattagtatcagaatgtgcattgattgatacgttaattaccatgataattctcattagcaaaatctgatttgatgttcatttatatataagttgatcggactgataaagggtcgaagaacgaacgtgtaaagcccatcagctgcaaagcccatttgacgaagtccgttgaatatatttgtcatcttttcacccaaactagttaatttgtgttttgtgtaaacgaaacaaaatcataggtcttatataaaattcaataaaaaaaagactttgggatcttttaatagttttacaaagtcaaagcatcaaaaagattttttcctttttttcgacattcaaaaagattaactatttttccaaatattaacatatactccgaaaatatttcttaccaaacatatatatatatttcttattaaaactaataaatctataacttaaaaaggaaaa

SEQ ID NO: 20259 - DNA, 605 bp, Arabidopsis thaliana landsberg
tccgtctattcatttttaatgatgttatttttagtctatttttggctctgtcatggattgttatctttttgttttgatcaatcatatatgtaggtccttcacttgttgtccgatattttcactactttttcgagctatgtttacttccttcagtcccttgcctacattcgagcgattatcatgctttttggcacaataatttgtcgagaattgttagactatacactgatttattcatcgctaggatggtattcataaaagtacacccaagactaaaattacatagtttgtttcatgttctagattctcatacagaataaaacctctttgtaaaacacattgcaattttttgaaacggctgcctagacgttggtctattagacgatcaattttgttcagtttactagatttgtgcaaaccattgttctaatatgttatttattcatgacacaattttaattgtaaaagaaagattaattgccaaagaaaacaaatgtgtgacttaattacttgagagagaactttacggatcaccaagaatattcaagtttggagaatttgacgaacatgcatgagcatatatatatagggtcatgagacaatta

SEQ ID NO: 20260 - DNA, 467 bp, Arabidopsis thaliana landsberg
gaggatgagactctgccttcaatcgacagtgtcagatctcaaaccgaaggatcctgaggctgccccctggcaaccctctgttgcatctcgattgcgcaagaggaagtcatctgctgcggatccacgcatcaaaaggatgaagcagggaaagggagttaccggttcatcttccttcgatggaattcgatttgtctctacggaggctgaaaagaggtatgctcaattctctcaacaaaatttccttgaggaagtagaactgtctaggaagacaaatgaggcagctagggagtttatagagcaggcaggactgattcgaacggttactaagttcaacccgttcactgagaatctagtgtttgagttctgggctaatctgcccactatgaaggtagacacgtataaggtccagagtcttggtgcgcaatcgggagtatgagctctcacctgggaagatcaacgagatgtat

SEQ ID NO: 20261 - DNA, 977 bp, Arabidopsis thaliana landsberg
acttgttataaagaattatgccaaatgttagtttctcatatcatgaaatcttgtatatattttcttgtttccagtcttccaggctttaatttgttttgaagttgtttatctgacaagtgataacaacacagagagaactcgtcgctaaattcaaagatggagaaaactgatcagtggtctgatttacctgaagaactcctagatttaattgcaaaccgttattcctccaacattgacgtcctacgtatccgtagcatctgtaaatcctggcgttctgcggttgcgatgtctaaagagcgtcttcagtttcgctttgaacgctaccttcctacctccaacaagaagataaaggctcatctctctcccaccactttcttccgtataactttcccttcttcatgtcctaacaaaggatggctagtaagaactagacaagcctccaaaatgtatcgtaagattactctcttgtgtcctctctctggcaagcgcatcacccgttcccaccaaaccctagaccttttaaaggttggcgtttcagagattcgccaatcttacgagattcaaatattcgatggattgaaggacgaaaagaaagcattagattcagagatattctctaattatatcaagaatagtgacaaaataccatcaggtgtattctttagagttgctttcctagacaatattttttttgcagtcaattaccacgataataaaatatggtgttgtaagaatagagaaggaagtagaagttggacaaaaattaaaaaccaagtcgaagatttctcggacattatacttcacatgggacgtatctatgccgtggacttaaaaggagcaatttggtggattagtttatcacagcttaccattgttcaacagacatcttcaactccgttggactactataaatatgatagttgacaagacaagaggctcgtggaatattgtggagatactatgcattgttcatgagc

SEQ ID NO: 20262 - DNA, 897 bp, Arabidopsis thaliana landsberg
attcaagatccacaatatctaacatcttgatgtgttttgtttgtctaaattagaatcttgatgtgttgtttttttctcttttaaaggatgtttttgggaattataacaaagccagagaagcaatgggactatcatattcatcaaacccaacacagttagataacgaccagaagaaaccttctcctgcaactgcagcggctgcgacaaggccacagcctccggagctagctctgaggtgtccacgttgcgactcaacaaacacaaagttttgttactacaacaactacagtctcactcagcctcgctacttctgcaaatcatgccggagatattggactaaaggtggaactctaaggaacatccccgtgggtggaggctgccggaaaaacaaacgatccacatcttcggctgcaagaagcctcagaaccactccagaaccggcgtcccacgacgggaaagtcttctcggcggcaggttttaatgggtatagtaacaatgaacatattgatctgagcttagcctttgccttgctgaacaaacaacatccggggagttcttcacagctagggtttcattcagaactcggtagctctcatcagtctgacatggaaggtatgtttgggacaagccaacaaaaagagaacgctacttatgcgtttggtaacgggagcagcggtttgggtgatccaagcagagtcttatggggatttccatggcagatgaatggagagagctttggaatgatgaacataggaggaggtggtggtcatgtagatcagattgattcagggagagagatgtggaccaatatgaactacattaactctggcgctttaatgtagttcaaaattaaaaacacaaaattatttgggttttgatttagggtttgaatttcat

SEQ ID NO: 20263 - DNA, 1984 bp, Arabidopsis thaliana landsberg
caagcatataattgaagctcttaccactgaaatggggcaaattttcgacagccagttagctcaaattcgtcaagagcatcacagagcacgaaaaaggaaggaacaagagtttaagtataagccaccggacaactcattgagatcaacacagagcatcccacatagaatccctcacactcccaaatctaaatgtgtgtttcattctgattataagccgactaatgcacttttcaaattttcaggaaaagaagattacctagagtgggagaaaaacatggacaagtggttttcctacaaaaacttcttgagcgagatgagatttgtttgtgcacttagccacctcacgggagacgcttacaaatggtggttgcaagaagttgatgatcgcttatattataaggagccacctatcacattgtggagagatcttaagaaactactaagaaataagtatgctccacaagcactagaatgcactccaaaaggcaatcccaaaatccaagggttagcagctcaagaaaaggaacaaggcttagccccatattcgaagaaaaaccccatagcagaacaacagttgaaggatgaaattctgaagattctcaatgcttacaacaaacccaagaaagttaagtcaacatctcaaccaaagatggtcaccgaagaagttgtagttcacaagcaaaaccgacaaccatcacttgcatcaagcggtgaacaaaagcaatgtaagtcttctaatctttcaaaatccaggggagtcacttgttataactgtcgtaagaaaggacatttagttgcaacttgccctgaaaaatttgagctaactaatacttcattagaatcgaaactgagctcaccaaattcaagtagtgaagtagttagtcaaggattagaaaattctagttcttgtgtcatgcacttgttcttgtcaaaggatgttgattcaggtcagactatggagcatgagaatgacaaaactgaaggaagcacaaaagaggagaatcatcatttggtgtcaaccacttcacaagcttgtcgagctgactatgtttcaaaaatcaccatcttgaacatgaaaggaccgccatatgtatcccaaccagttctaaaccgagagttacctaaacaagaaccacgtgaattaggaggattcactcaagttgaggctgtcatggtccacaaacaatcacctagagctgaatgcaatatttttttcaaggataaaccaccagatgctacaccaccatttaaaactcgaggtatttatctaaactcccaaaatcgaatgaaagctaatttgctttctcttggtgaaggttgtacactttgggggccaatcaagaagactaatgatcgggagataagcactcatcatatgagtcaatcaagagatcctcgtgaagattatcaaaatcaacttcggctaaaacacatggaagaatgcatagcggagcctgaaatggatatttcttcatttagtactttccatacctatcagtggcgaccaggagagttgttagatagctctagagaggaggaattggtcaccaacaatgtcttgatccaaaaaaaaccccggatccaacgccacttccatttgtcatgatgataccaagcaccgaacacactgtgaaccttactcaagtaagtaactctttaactcgatttgtttctcatgtttctataattgttactatgagtttatcatatttaggaaacattgagaaagagttggatttatttaaagaatatttggaatcaaactcttgtcttaggataaaagtaaaacatgaacatttcaagaatggtgcattgattaaagctgagccatgtttacttgtttataatgatttcatgactatgataacgcacttgctttttgccaaaggtgctgaccaacattgcaggtataaaagaggagccaccagacttagaatttcttatgtccaatctctttaataggactggaattggagttgttttg

SEQ ID NO: 20264 - DNA, 1016 bp, Arabidopsis thaliana landsberg
cggattacttgggtttgtccttttcacttgttcctgttatattttctattacgcaatttcgcctttttctggtaagggattttatttacttttaagaaaggagaaactgtcacgttatctcctattaatcacaagctttactttgtttcgttttttatgttagtttttttttaaaatcacgcagggcaagtttgatgcaatttttctttttacttgggctttcgtacacgtcagcaactgtttcgatggctctagttagcatgttacctgctatcacctttgcgttagcccttattttccggtaatgcaactaatttaattagtaacatatatatatacatcaaaattttctcgttttttttataaatacttttgcaggatagagaatgcgcaaaacctaaagagcaaagcaggcgtgctcaaagtaatgggaaccctaatttgcataatgggagcaatgttgttgacattttacaaaggcccagagttatcaaaccctcattctcatccacaagctcgtcacaacaacaacaataacaatggtcacgaccaaacaaagaaatggcttctaggctgtctttatttagtcattgggacagtgttgttgtctctatggatgttgtttcaagggaaattaagctttaagtatcctggaaataaatactcaagcacttgtctcatgtcagtcttcgcatcatttcaatgtgctattttgagtctttataaaagtagagacgtcaaagattggatcattgaagataaattcgtcattttggtcaccctttacgctgtaagttttttccatcttcttttggctatatatatatatatatatatatatatactcataaaatgcgcactaagaagaatatgataaaaattatagggtaagcttgtagaaattgataaaatgttaagttattatgttcaaagaaagagttagaagttatattttctttgatatctaaatgtcatcttatctattgtcacctttttataaaagttcctagtagttt

SEQ ID NO: 20265 - DNA, 821 bp, Arabidopsis thaliana landsberg
tcaccctcttcagtaccaacatttccagttttgagttgttgtcaccgtgtctcaagtagttggttttctgctatgaataatacttatttctgaaggagaaaggaatctagataccttctttattgttgttttcaagatatctaccatagtgttttgttcaaaacatcatttccttcagaagttttaattcacttcccaagtataaagttgcaataactctacttgatatgcattgtttcagtcatttcaattttcaactgccaacaagatatatattgggagactgggagttgtatagtttataggataacatcgtttttatacatgctaacagatttggcatgattgtaggatacgatggagaaagctataaagaataaagttgcaaaggctgtggtacctgcagtagacgttatgtttcaagctctaaggtctgttttcaactccttgttagttttctccattggttcatgaaatcttttatctgaaatatcgacactactttatttctaccttagtgaatttggatcaaaagttattccacctaaaaggattttaaagatgcttcctgaacttttcgaccatcaagatcagaatgtccgtgcatctgccaaaggagtgactcttgagctatgccgttggattggaaaagaccctgtaaagtctatattgtttgaaaaaatgagggatacgatggtaagatttatgttgagccgcacatttgcaacttagctatgctgccaagttgatatgaactggattaaatcctcttgatttttcttggaattggaaacactgaacaggggtttctagtctaacag

SEQ ID NO: 20266 - DNA, 458 bp, Arabidopsis thaliana landsberg
gattcgtttgaatatgaatggcattcttaaagtttatgaacccacacgattaataatgcgttggttttatatggctattattatcacattacgaaaaaacgcttgaacacatcatttattcaacatcacttgtgtaaaggatttaaaattgaaaaatgaacaggatattaacaacagttacttagagttaacgtaagttttttttttttttttttttttgcaaacgacttaacgtaattttttgaatcactgaaaactgacttaaacgatatacacaattgacgctacatgatgtattttttttagtgatatcgatcacaatgaatgcagaagtattattcaaaacaaaaaataactaagttcatggtgataataacgtcacagaaaataaactataattttttttttaaatatgctataatttttaaaacattttatttaaatatttaatgtattaa

SEQ ID NO: 20267 - DNA, 949 bp, Arabidopsis thaliana landsberg
taacttgttctactcgatttcataataagtgtgtgtgagatcttttgattactactagagactagagttgcttttaaaagtgtaatttttatttttattttgactcgatatacttttcaacaaaaaccaacttatatttttcttatcttttaataaaaaaagaggtatgatatgcattatcaaaggatctcctaaacttgtctataaaagatctcacgaggcggtctctgatcaaaacatcgtacaacccatctctttttttttttttaacttgtcttctctctttccttaactttgatggcactgtcccttctctcctacaacgtctccgacctctgtctcggcaaacctcctcttcgttgtctttcctcctcttcctcctccgtatccgacgccatcgctgccctcaaatcctctgaagacactttcctctccgtctggaattgcaatcacgacgatgacaataacacagagtgcgagtgcttggggaaaatatcaatggctgacgtcatctgccacttgtccaaagaccatgaccacagtctctgtgccttaaactcatccgtctctgttcttctccccaaaactcgttccattgtcctccatgttcaaccatcctgcaggttctttattcttccaaactctctctgttttgagggtctacataaaaattcaacctttagttgtgcttactctgtttctatgctctgtttttttgtaatgttctttaaattaatggtttttgtggggttactctggtttgactaatcagcttaatagaagccattgatctgataatcaaaggagcacagaatctgattgtcccgatacatacaaagccctacactaagaaaaagcagcacaacgacaaccgttcggtcaccaccaccacccactcgaacggacaacgattctgctggatcaaacaaaaagacaacattcaatttct

SEQ ID NO: 20268 - DNA, 1227 bp, Arabidopsis thaliana landsberg
tccttatttctattttttttttcttttttttttctatctctcttctctttcatctactcattcatctcttttttttctaactaattttttcttcatatatatttttttttgttatttttcattgctaattatttttattgttatcacattaacgtcgttagtaattattacctgtagttattatgtattaattatatgttcaaataaatattattcatatatcgattatcttaccgtgtgttaagacaaatattattttgatatttagaatgttagcatgttattaatcatatattgattatcttaccgtgttaagacaaatcttattttgatatttaaaatgttagcatatcattattctacggtaattattgttataatcgttgtgtaatatgatattttatcatattttattgttctgatatatttatatatataaataaaaatactaattcataattttgaattgataaacatttatttaacatataatatgtaaatttactatgttagcacgttaaacaaatagttatatacttatttacaaatattacgattattttttatcgatggcatttttgtaattaatcttaaaagaaaaggatttttttggcttatattttatttctctttcctatttacctaaataacaaatttttatgtataaattcttaatttcttgtttatccatgtatatatttttaactcaccctattttttagttatttatttttgtaaacgctttttttcttttaacataataggactctgtttttgcttttgccattttgtctcggggtctctcgaaagctcaagccggcgacaagctcccattgcatcgtagacgagaacggtcaacgtaaagctagtgtgtgcgagctggccatcacacctctagtggcggaagggctaattaagcaagcaaccggtggaagcagtgtggctaagaagatagcggaaatgggtttcaattgtctttggttaacttggccgtcagatttgatgactaataagacattagcttatatagtgtcacaatgacaatcttttcaaagccttggtcttaatggatgattacattgttggcgtccaaactaacaacctctccctcattgaagctttcaaggtatatctccactctcttggttctaaatattagtgtgtttcaattataacctttttgtggtagatggacttatgttcaagtttcaacggttttagttttaa

SEQ ID NO: 20269 - DNA, 673 bp, Arabidopsis thaliana landsberg
ataaattttaatgtcatcgtggtactcaagttttggtagccgcatccaaagaaacttccactgcttcgacaaaatacttgttgttacagcagcttttgttggaagaaacgataaaatcttcactagcaattcatcatcagaaaatccagtaatcttgtccatacctctcaaacaaaaaccttcaccgtagtttaattaagttttgtcttacccacacagaagagcaacatcaaccaaaggcagaggcagagaataacaaatagagaggaataaaacaaagccctagaattcttcaatttgttaaaaaccctaggaagtaagaaaaggaggaaaaaaaaacctatacttacttaggctccgaagtaggtctgaagcttgataaggcttgtggtttcgtaatatttcacatgtcattgcaactgtgtaaaatattattaaatatcagtgaagttgtgtctcaagagcatattattaaatgtgtttcttaactttgagttcttcgacaagtgaaattttgtcatttaataatatgctcttgttctgtattaatataagaaacacatgagaataaaccaaatgcagatgaggttctaacttttagatcaatagagaaaacaacccacaagatgttaactaaacatgtactaaaaagatctctcaggacaagttaagt

SEQ ID NO: 20270 - DNA, 904 bp, Arabidopsis thaliana landsberg
  unsure (1)..(904): unsure at all n locations
tatttttattccaaatttaaaactacaggtattaaatggccaaattaaaaatagatgacggttttttcggcttttttctcgaaaaaaaaaggaaggaaaacttgcatatataacctaaaaaagtttataaattaagaaactaacctattataaaaaagtttacactataatagttgtatataatataatacttttgtccttaccatcacaataatcatcaccaccaccatagttgctgccaccgccgccaccgctgccgccaccgccacttccgccgccaccgccacttccgccgccgccgccaccgctgccgccaccatttttaccggaatgaatgccatcaccggagccattactttatcgttggggttcccattgtcaccggagccaccgccatcgccggatctactgtcgctgtagtattcgccggaaccgccgccgtcgccggactcaccgctggaaccaccgccgtcgttggagttaccgctggagccaccacctatagttatttaatataccttttaagttagttagttaattgatacatatataatgctattttcttaattatttattgaaaatatgttagttttgcaattcacccaaaaaggaaaccgttgaatctttgccgtattattgctattaatgtaaatcatgtcattacttattagtataatgaagaagatacgtaagcctcttttgtctcgaaaaaggccttattattatttggttaaagatgtaaatcttcttattatggtaacacaatctgttagcaacttagcattaaaactgtagatgcgtccccccaccccctctctatataaatcacacctagctagttctctanaatccgtgacaaaaaaatgggtttaacagtaaaagttgtttttattactaatatagt

SEQ ID NO: 20271 - DNA, 1076 bp, Arabidopsis thaliana landsberg
tccttttttattataagtccaaatttgaaaaaaggaaaataataatctgatgtttccttttttttggtgtttgaacctctctcttataaatagtattcatcttttcttctttccttaagaaatcattactccttcttctaaaccctaaaaaaatattttctttctctgcgactgttttacaaatacgatcgctgatatctcgtgaccgtgaaattgatgatccggatacatcgctgaacggtaccaacggcgttgccgcgttggtccaacgccatgtcgagagaggtctctcgtgtatgatcaatttttgacgatcacgggctaattatacaggaagattactttgagttctagaaacgagtctgacgtgacgcaaaatctggatgcatctatttcgggaaaagagaatcgcgagtgaacgtgacgacgagatctggggtttcggtggttcagagtttcagacctgaaaagcgagatcttcttcatcatcaaaaattgcaacgaatgggctttagattacaacgaatgggctttagtaaacaacaatccatgagtcatgccgagagagtcataattagtccaccatgagtcaggttcgttgattcttaatttccttttcttttctttttttttttaataaagattttgatttattttatgtttgttattttaaaagtttttatttttttggatgctaaatttatataatgatacgaaaactaaccggattttggatccagcattagtcgttagcgattccaaatattcaacttgttttcatattattatgtagatttagcattcaagtttttcattcggattttttaaagtactttttaaattttagattttgtttattcggattttaaaaatcttttttcatgtgtttgtttttttaaattatattatttaatggatactaaatttacataatgatatgaaatctaaccggattttggatccaacaatagtcgttagcgattccaaacattcaacttgtttttcctattattatgtagattaaatattcaaggttttacttcgcattttttaaaatagttttaatattatttttt

SEQ ID NO: 20272 - DNA, 1652 bp, Arabidopsis thaliana landsberg
taaaaaaccttttgcaatttttattcaagtttttgtttaaactttaagttttttttatttttgaagcaatattttagatcaagtgttttatttttaaaatatacataatatttttgttttaaatgttaaattttagtatgtgtaaactaattggacacaacatcccgtccataatatgaggtccttaagcggtgttctaggtttaatatgtttacatatatataaatgtttaacaattttttatttaaaaaaaattttaaatttgtattttttctaccactatttaaactttaatattttttttatttctaattaatattttagataaaataatttttatatatacatagtatgttttttgtttttaagtgttaaattttaaatatgtgtaaactaaatgaatacaacatcccgtccatagtatgaggtccttaagcggtgttctaggttcaatatgttatacacatctttaaattttaacattttttatattttaaaatatattaagttgtatttttcatatcactatttaaaatttaaggtttttgtttttgattttgtttttgtttttgtttttatacaaaatatttttgttttaaatgttaaattttagatgtgtgtaaactaattggacacaacatcccgtccataatatgaggtccttcagcggtgtcctaggttcaacatgtttccacatcatttgaatttaacactttctttattttcatacttttattaaacttaattttaaggtttgcaaataatgttataaatatattgataaatgttaaaaaatttatcacttaattttagacataatttaaaatcttaacacttatttcttttatttaaaaacatttatatatcaatatctaaactgtaaagtttttttttgtttttaacttaaatttagataaacagttttattttcttacataatatttttgttttttaaaaaagttgtaagtatttttgtttaaatgtgtaaaaagaattgaatgataacagattctttactcacagaacaagagatatcataaattttctttatgtttatagtatttatttccatatatacatttgtttctgtaagaactatccatttgatactagaataaatttcttcatttggattagattgttcagtacaaaactctatttctggcatgtcaataaataacaaatgctaattttggctcttaatcttgttgatagaatactaaacttgcaatgctttttacactaatctttatctctttatatatttattttaaaaaactcttctttcctttttttctgatttaaagtacaaaaaaaaacaatacatctttccattgaagtagaagaaaacattttcactgtccttttgaatcagaagaagaaagagaaaaaaaagagatggagagaaacacgccggtgagaaaccctcacacttccaccgccgatctgctttcttggtcggaaactcctcctcctcctcaccactcaaccccttccgccgctcgttctcaccaggtccgtttcttcaacaaatgttctcactttctctttctatagagagaagctgaggttttttcttctttcttctttcattttcagccggtccgatggaatcagcaagattctaggcggtggtcagtcacagatgaaga

SEQ ID NO: 20273 - DNA, 1184 bp, Arabidopsis thaliana landsberg
  unsure (1)..(1184): unsure at all n locations
tctttttacttcatgattcttacatctaagttagatgatctaacctatatatatatactgaattaatattatactatctttttgttgacctaggatatatttctggctggaatagacacaagtaccatcaccatgatttgggcgatggcagaacttnnnnnnnnnnnnnnnnnnnnnnnnnnnnnncaagacgagattcggtcttgcattggaataaaaaaggagagaatcgaggaagaagatctttataagcttcaatacttgaagcttgtgatcaaagaaaccttaagactacacccagcagctcctcttttacttccaagagaaacaatggctgatatcaagattcaaggctacgacattcctcgaaaaaccctccttttagttagcgcatggtcgatgggacgagatccgaaatactggaaaaatcctgaggagtttaacccggagaggtttattgattgtcctgtggattacaaaggacatagctttgagttttaccatttggttctggtaggaggttttgccaggaatggcttcggcgattgcgaccattgaattgacgctcttgaatttgctttacttctttgattggaagttgcctgaggagatgaaagatatgaacatggaagaatctggtgatgtcacaattgttaagaaagttcctcttgagctgctcccggttctttatcattgaataatggcttaaacttgagaagaagaaacttaaaataatggctttggattttctcgtctttatagcattgttaacttcttttccaactctttgaatctcaataataaactcaagcttttcctttcttgcactatctaggttcatagaccttgatcagttgatcttaatgtgtactgtcttcgatgtcatgttgatatgcctctacctttcaaaacagaatatatataaatatgacgcatgtattccttgaaagttgaaaggtatgacgcatgtcaaccttgatatttaaaagagaatttaatttgttagattcacatttgaatgcagtgcatccaatggtttaatcatcaattttggttatattattatctaattgtttagtcatcaattcgtttttttttttgtaacaaatcatagtttgtcaataacgtattcttgaattttgtttcaaaatactctttcaattatatattggtcatgagtattg

SEQ ID NO: 20274 - DNA, 465 bp, Arabidopsis thaliana landsberg
gtttgattgatagcctataatccttaccatacacagagaatcgcaagaatctcaatccttcgcattccaaatcatcagaggtcataccttggtaaagctccacttgcagtgtggagaggaactgaatcgtttcttcttcatagggtacatataggtaagccatcagagtgtcctggtgacaactctggtacaagtgttgaacatcctccagtaatccatgttgtgccagtgtggtcgagcacggataccttgtgctacagaactcattcagcttgaagagcttgatatactcctcagcaggcaatatatcaggtttgtgcagaagtttggtggctatgcgagtatgctcaggcatatactcttcttctagatcctcatctatcagctcatacctctctgtcattgctctcttccctcgagctatctcaacttttctcctgaagttatcatattctctctgttctc

SEQ ID NO: 20275 - DNA, 1194 bp, Arabidopsis thaliana landsberg
tttggatttttcaatccacttggaaaattgggtcgcccgtttttgaattcccgtaaagaatttgaaattgggagttttcttctctgcggcgttgtgtttttttccgatttattttgttttgggatttaatacagattgtttgatttcagatcttcgagatttagttgttgacattcgatataatttcatttggatctgatacagattcttttgctttcaaaatccgttgtttactgttttgttcatgtaatgttgatttcagataaaatagaagatgagagaaatccttcacattcaaggtggtcaatgtgggaaccagattggttccaagttctgggaagttgtatgtgatgagcatggtattgatcccactggtcgttacgttggaaactctgatctgcagttggagcgtgtcaatgtttactataacgaggcatcctgcggaagatatgttccccgtgcaattctcatggatcttgagcctggtactatggacagtgtcagaactggaccttatggtcaaatcttcaggcctgacaactttgttttcgggcaatctggtgctggaaacaactgggctaaagggcattacactgaaggagctgagcttattgatgctgtactcgatgttgtacgcaaagaggctgagaattgcgactgtcttcaaggtgtgtaatcctaagaaagtttattgaaggtctttaaattgtggttttgaacattttgttctaacagtgatatgtataattatgaatttctcaggtttccaagtatgtcactcacttggtggaggcaccgggtctggaatgggaactctgctcatatctaagatcagggaagagtatcctgatagaatgatgcttacattttctgtcttcccatcaccaaaggtctctgacacagtggttgagccatacaatgcgacactttcagttcatcagctggtggaaaatgctgatgagtgtatggttttggacaatgaagccctttacgacatctgttttagaacacttaagcttaccactcctagctgtaagtccctttccatgtcctttcttctctgcagtggttttgtgaaaattgaatcactgatcttggtaaccatgaatggtgtgtttggttgtgaccaaaataaaaaatgtttctgtttggaaatatcaacgtatccttgatccaatctccagttttgactca

SEQ ID NO: 20276 - DNA, 968 bp, Arabidopsis thaliana landsberg
acggatacaacgggtgaaattaaatcctataactaacattttatttacagttatataatttaaaatatatgacaaaacaaacaatttttttaacaaaaaaacatatataatttaaaattttaaattttaaaaattgacttacagtgtacgccatgataaaatcaaaggattgtacaatatatagaaattaggattatatatttataaaatacaaaacaatatattacatatagataatttataaaaaaattatattttcagttattttcaataaaacaaatagtctcgcggtgtaccgcgggttaaaatcaattattagattatttttgatagggctaacaaaaaaaacggatccgataaccaacccaatacccgaaccaaaaaacggggttagggcgggttaaaattttaggaaatttccttattgggtagagttttagtaaactcgtgaatatccgattggtcaggaaattacccgttatccaaaaagggtattcaaaaacccaaacattaatttaatatccaaaatattaattatatttaatcgtaatataatctaattatctaaaattataattataaatctaaatatgtcaattaattttggacctaaatatacaaaacaattaaactattcaaaaattatttgttatgtttgtcaaaatttagtaaaatttattcaaatataattaaatttattaaaacttaacaaatttaaaagttttttttgtttggagacccactatctacatacaaaatacccgtttctaatttttgtgtatttttagggtctgaaactttttatccaaactgacccaaacccaactggacccgacccgaaccagaaccgaatatttagaagtattctattgggtagtaaatcatataccattaatcctaaatccgaacgggttctacccgaactcgaatgggttattcatatgtccagccctattctctgatttaat

SEQ ID NO: 20277 - DNA, 628 bp, Arabidopsis thaliana landsberg
gacgcaatgcagttttcagttgatcagagctaacagatcaactcttccacctctacttaatacttttgaagtgttcacagttatccagttcccgcaatccgaaacaaaagcagccgatggtacttagtaaggaaacaaaccatagagattagagacaaaagagtattcaaaacctgtttaatcctaacgccgtatcaacagaaccttttctgtgtcagatgatgctagagaaactataaaagtcacctatggattgagtaaaacaaatctaaacatgggtgggatttcttattaaacgaaataattaggctaatcaactcgagatgaatttaattaggtgagaggaatcaaacaaacgaaaagacagtcttgtgggactcgtcttatatcattgataccaattcattattggttcacgtgcttcttggtctggctacttcaaaatgatgatgttgggacaattttttcctcttaactaaccttcatcttcttcccttggtgaagttgcaatagaaaccacctttactcaattttttcaccaatcaaaagtttttcttttagtgtatgattttggtttgcttatttatttggagttgagagaaaattggtaagttcttttgggcttttg

SEQ ID NO: 20278 - DNA, 1047 bp, Arabidopsis thaliana landsberg
gatgaaccaactcagaaggctttcaaaagcaatttcctaatggaatatctagcaaattatcaagtgttacaccacttttctatttcttcttgtttaaaactgtaaccactatcttgcgtcatcttgacactactacttctcactgttttgatttaactatttacaataaggataaatataaatagatatagaagtaatgtttaagttttaccatttcatcatcacatccaatataaactcatcattaagcaatcatttacatttacttcatcttgcctctgatttttcctttttgtttcaaatttcatgtgtctgatgtcttcttactctgtctccgactaaccaaacaacatacttttgtgattacataaacacatatcaacagaagaagaaaaccaaacacaaaaaccctaaacaagataggctcttcaacaggagacataacggccaagtacacacaatctcttataagaacaagcaatgtcagtccttgcacaacatttttaaccaccaaaactcttttatttattccttcttctttgcataacttgcatataatcctcaaaaacaaaacaccaaccaccaagaacgttgtactagaccatcctcggtaagagacaatcttccctcccactattaatggctctttcctgcatatacaagacttgcagactccagagaaagtagatgtgaccagagcatcgaatcctgtataataggggagaatcacagcgtctaagtaaagactagcgtggagaataccagagatagtagaggcttcgaagaagacaaaactcgcttctttttcgatattgttctcaaataaaagcactgagagctgaacaagctgtagtatcgcaggtccaaagatggaaattgggaaaagggtattgatcctttgaccttttgcaagaatcaagatgatcaaaggaagagagattggaccagaaggaagtaagtaccttcttgctttgtcatcatcaccatcatcatcattttctcttctttttcttgatattaccttccttacgacaacaattagcgtcg

SEQ ID NO: 20279 - DNA, 225 bp, Arabidopsis thaliana landsberg
gcagagccgagattctcccatgataaaatcgatgcgtatcggggagaggtgctcggttgcgtatctacagaattttgggaggcataatgggaacctcatgtttttcttttgcggggcgagaggaggtgtagtgactgattattctgttctgccttccaaatcaagttcttcaaagagtaggactgtgcgctctttcctagcaggtggaggagactcacctccttt

SEQ ID NO: 20280 - DNA, 591 bp, Arabidopsis thaliana landsberg
  unsure (1)..(591): unsure at all n locations
agtgttcagctctgaagattgttggtaaagggtagttgctgtttccnnnnnnnnnnnnnnnnnnnncgaagattagaatcgctgggaagagcggcttcgttgttgcgtttgcggctgcgttgcagggcgctagtaatgttgttgcaatgaagagagttaaggttatggctttagacgtcgacattttttattttggttttgttttttagtagatttgaagaaatgtgttgcttttgtggcgtatttataaggtgactttttttttgttaccaagctggctttggaggttgtttttctttaaagtgtgtaacaaatggatgaagtcaagagctttgaaccttatagtctaaataaagattttgttaagatattgatgagcatttcacaaaactgaaaaacaatgtggtcaaaagaaaataattttcgttggtcgagcaaaggaaaatagaaaaccaaacgtttttatttagcgtttaagaattgataatgtgaaaaacaaatcgantaagaaacaaaacaattaaccaacatatcttgattccactgaactccaatctgaattctggtttagaaaatgacctaaactaagct

SEQ ID NO: 20281 - DNA, 119 bp, Arabidopsis thaliana landsberg
tttcgatttacttattctttctttattggctctctctttgcttgatttgattgcctcctggatattattcctttccatgattcttaagtcccataagttcgatccgatagaatctgacc

SEQ ID NO: 20282 - DNA, 1461 bp, Arabidopsis thaliana landsberg
ctaatctctgttacatctccatatggaactgttggatgtgtgagataatgatagagaagaagacaccatggaacaaaaatctaacaagtcccaacttctcgaacctctctaatgtgcgtatagaagggtgtgatggtttaaaggatttgacgtggctgctgtttgctccaaaccttattaatcttcgcgtttgggggtgtaagcatctggaggatttaataagcaaagagaaagctgtgagtgttttagagaaggagattcttcctttcgcgaaactagaatgcctgaacttgtatcagttgtctgagctgaagagcatctactggaatgctctaccttttcaacgtttgagatgtcttgacatactaaacaattgtccgaagctgagaaagcttccgctggattctaaaagtgttgtcaaagttgaagaatttgtcataaaatacaaggagaaaaaatggatacaaagagttgaatgggaggacgaagcgacaagacacggttttttaccttcttgtaggctgcgttgaggagccccatgacccaaaaatttgatgtgaatgaatattatgagtctcagttctcttacgtagaacttgatgtggtggctgagacagctccgtctactgaggtggatgactagaacccgcaaatggtcatctgaccatgggctaagcccagtccacaacattatggacaatccatggtcggcccgtaatgaaaacgggctatatggtctaaagactaattttatccatgggtttaatgggctagcccacacggtttatggttggcccatcaattttttcaacacatcaatttttttctcttctctctctctcggcaacgacgctctctctctcggcgacaaagctctctctcggcgacgaagctctctctcggcgaccaagctcgacctctctctcaactcctactccggttagttctactagcttgtgggtttgtccaaatttcaattgttgatgttatggttttataaatagagcttttaacgagattgtgtgaaaatgcattatatataaacatcattgtatgggctggccatgggctgaccattggacaatgggctgaccattggacaatggtctttagtggtcttggacaaattttcagaccattgtccattaaagaccaaccaataaaacccataaaaaaaatggttcaagtggacatgaccaatgggctttggacagcccaattgacacttctatccatgtcgatctatgcagagatgcgtgtaatcagaagtcaagttgacaacaacccaatgacaaataaaacatttaatgatcaacagattaagtttacaaagcgataaattttgatatcatatggggaaagaccttttatactaaacttaataaacgtgtgcatgagtgtatatatgcatgcatgactacaagaaacacctacttttatactaaacttaatatacctaca

SEQ ID NO: 20283 - DNA, 596 bp, Arabidopsis thaliana landsberg
  unsure (1)..(596): unsure at all n locations
gagcggccaaagctttcttcttgccgctttttctctcacagatttcttcatttttggtcagaatctccattggttaaggtacagtgagaatgtgagatgcttcactcttctttcacaggtttgaaatatagactcagctagagtgatcttagagcaactcttgttggatatgaaatgatattagggataattttcatcacaaaaagcttacaaatgtcacatctttatgcagaaaagaagagttcattgttttgagcagaagaaagtaagttgaaagaaatacaaaagcagaatgaatttagataccgggaaatgttgttcttgttcactcacttgcctattatgagtttggctctggcatctccggtgttgatctggaacttatttgttagtccaaagtgagccattagaagccacacaannnnnnnnnnnnnnnnnnnnctactgaattgctctacgtgagccgtagcgtcgcaatgcaaagctgcaaaacagagaaattccacccacactttactcaaatatctcccatttgtttattttgtgcggcttctccatattcataaaggtctttggcgagcctgctcgcgttaaac

SEQ ID NO: 20284 - DNA, 1118 bp, Arabidopsis thaliana landsberg
caattccaaacaaagtaaatgtgatcagaacaaagaattttcttcggtattttacttttggttaacatcaataaagaaaacatcatcaagtgatgagctatagacatagatttcgaagactacaaataagaattagaacactataagaaaaacataatttcttaagaatgaagatagaataagaataactagatacaagcagtctcacaagcaaaagaggatccacaagtaatatttaaaccacccaaaaaaataagcagaaaaaggctaaagtatgcattctcctccaccattccgtgacggtgaaggcaaccttcaaccattgagactaaaaataattctaaaagaacaaaggagaaggagtctggggggagattagaccagcagcaacaactgatgattttacttggaacttccaaggatttattcaaacactaggatttagttttgggacaatattcgttaacccaaataaaccacaaccataatccctagatatggacttaaccattatcatctacttaaccatgcgctcagtagttagtaaataataaacctaaggaaaaaaagagaaatgaggacaatgaagaccatagaaacgtccaccagtttcatcaccaattggcgatgatgagaacaacctccaagcttccattgggctccgcacgcatagcaaaacgtatagccacacctacacatcaaactatgaacattacagtagccgaattctaaaaaagattcagaaatcatatataataactgtagaatgtgattagagataatacctgcaagttacattgatgcgttcttccgatagttttatattgtgttggcaacttctacattgtcgccacactgttgtagtagccttgttacccttcatcttgtattccttgcaagacaagttactatgccacgaaacattgcagtcaatgcaaaagggtttacggcatttagagcaacatctcctaactccatcgtcagtggattcagtaagctcggtcttcgacatcaaagcccagcactttggatttgggcaatgaaatctgttacatacaggaattgactcctctttgatcgtttgttccacatctctctttgtttaggtgcacaagatg

SEQ ID NO: 20285 - DNA, 1243 bp, Arabidopsis thaliana landsberg
cgaatgctaagttggattcagatcataacttacttacagagaagaagcatgtccactttgcagctgaggcagaatccattgagcctgagcctgagaattagtctgaggaaggagtcttctacatagatggtcagggctacatgaagtttcggcagccacagggtaacttcggtggcaatctgatgagatcctcccaaggactcgacactcttaaggttagcaaaggatactagtggttgtgaagccgtgatgatggatagatttaaatgaatcgatggatatcacagaagcttgcggaagggcttcaagatatcgagacttagatcctttggatatgcgcaccaaaagagactaaggattttgctggatatacacaccaacaagatgatcttcttagaaaaggtttctcattaaaagaaagataagttctcagcagagaatacaagagtatataaagagaaggagaagagaagatgaagaggcaagtcttggaacatactccaaggctacctagaacacaacagaaattaaaaacatagtttgaaattcaaaataaacccttcaacttcaaaagccacaaaaatgtctctttattttagtgggtttgggccttgaatcatcaaaatggattatctgaaatgaaaacataagcctcattaaaaaccttcctttggaaaactaagtgggacaaaaccaaatgcagggaaaaagagcactcatgaatcacttatctatcttgatgaggtctttgagcttgaatcaaaaccaaagaggtagtgacttggctcaagtcatttggtcggtcccaaatgtggttaagcatcccgccaatggcttggttgaatatcttagctctagaacgagtcattgggacgatcgttgtgacaagaacatcctccgctacaaggttctcctcagctacaagctcatcctcagctacaagcttagctccttcctcggctacaagctcacgttcaaactccggttcatgctccatatccttattgttgtccatgatcatatcacaatcggtttgcagggaacaagagttcatcgaactacactccaaagcctgcctttctgaagtcatttccttagagcaacttctagagtacctatggtaattcaacttaccaaccaaccaacgccccccctcaccctcgtagagagcagatgaaattatggtagagcagattctgagagccaacaaagctgtagtgagtgtatgacagtttatgctgct

SEQ ID NO: 20286 - DNA, 911 bp, Arabidopsis thaliana landsberg
gatgtcgactttggagaaagaacgccaataataccatgaaaagttcataaatttcttaatttcctgttattatcaagtgaaatttttaaaatttattttcaacaagagatagaaagtgaaataatatcatatcatattttcactagctaatgaaaaatttaaataacaattttgtgttaaatgatttgaatgtgtaacactatttatagcaagcacacaattaccttcaaaaaaaaaaaaatacatcacatatcataaaactcaccagtgaactttgtttttcattatttgtcaatatccattttacaagttcgccactcttatcaataatagcaatcataatccattggaggatatataatttggtaattcttaattcacaagaaaataaaaataacataaaagatacttaaacaaaaaacataaagatacactctgtagtctgaaaatattacataaaaacacacatatacacattaaactttataaaccttcgttttattaatcatacttgcttttctgaatcgataaagtaagactacattatgattttataatttaataatgattgttttagtttattatttagaaaaaataaaaaactagataacatatgcatcaatctattattctgatttttcaattagtcgataattagtgtcaaacactcatcttttacataatctttatccgaattcgcttagatattaatatatctattagatcaaaaaatttgtttttaaaagtaattctgttttgcgaaaataagcaatactatactataaacattaaaaatatatatcgcattgtcagtatttctacgctcaatccgaaccgtgtgcctcgattgtatacctgaaactcaaacactttgataaaaaatgcacgagataatatattttactggacag

SEQ ID NO: 20287 - DNA, 829 bp, Arabidopsis thaliana landsberg
tatcatgtgagctagcagatcgacgcaactgcataaaaaattaaaatgttagttatttaaagaacaaatggagtactttacaagcaatggagtagagaaacaagttatggtaataaccaacagaaatgacagtagattccattctgcaatgtaccattgagttcatgtagatcgtgttgccaagattgacaaggccagcattgtaaccctgaaatcaattgtaatgtttgttagttgataggaaggatgcctaaattttctgaatatatagtataaacaaaaccagtttttacaatgcctaacaaaatattgggtctatcttctgttaccggaactctacgaacgtgcattttgtctagggtccaaacattgtacaagttaacaacaacgatcacacacgtgcacactcataatcagcagtgaaaagtaaataccagattagtggcttgcgcttcttcaggtagatcctctgcaaacaatggccttctcaggagatagaaaaaagatcgtggtgaaggtttcggtttaacttggccagtgaattaacttctctcacctgtttacatttgaaagaataggataacgatacttctcttttctctacatgaacaatacaagaatgagacttcacaataaatcataataattcttcagattcttttaaagtgtcatctcgaaaattattgagattcctactccaaatccaattcagtgtataatctctttgacaataaaccattggttaagctaaatctgaaaccctaaagcaccaaatattcatcatgatttcataatcataattcaattggattctgatatagcattctag

SEQ ID NO: 20288 - DNA, 821 bp, Arabidopsis thaliana landsberg
tatatgtactataaaaaatatctacattattagccaaaaaaagagctattaaatgtcatccatagcgtttttataaacgctgtcttatgcccctattatgttagacccttcatatacgatagcgttttttccatatgctacgataaagtactataccataacattagtaaaatgctttcataaatcaacttatactagcgatatatagacgctatgatctataatttttatgatgctataatattcagtgccataactctaattttatgcgattggttttaagctatttgcatttggtggaacctatttagttttcaaaatatctgatatatataataaaaacatccaaaagatatacatcatttcataaaccaaaaatcaattcatacataacacaagtctcaatccaatacttaacctaatatcctaacttttatattctacttctgctaaggaagttattgatgagatcatgcaaaatccttactttgttttctagatattggactcggttcttcaaggaagttagctcagcttcatacgttctacaagaaaacctgcaatttgggacggtttgttgtgaccacttattcagtcgcaaattataatgacttctttgtgacgattttgtgaccgtaacaaccacgatataggtagatgctaaacggtcgctaattaacgaccagtggttgttgtcggaacggtcacatatgaacgacgattttcggaccctgttgcgacgcaataaaaatggtcgcatataaatcgcaaagagcgactacttactgacgtcatgttggtcagaaatgatagtcccaata

SEQ ID NO: 20289 - DNA, 1094 bp, Arabidopsis thaliana landsberg
atcatgtctgtaacaagaagatcattaataccgcgggaacaagctcgaggtggacgagaggtttatggaagctttgagtttaagaaaccagaaagggtgtggaagagggagctctgtttcatcaaaatcttcaccgtcagttagatcgttttagtttcttctcttgtaacaatagtttgcatcaaccaattccttctttatgttctcatgtattttccattgtttgcaagaaagaagattaatattttcatgagtaatatttcgtaagagaaggaagaagaatgtttttattaatattaacttcattgggaagtttcttctaaatttttagattcggttttgggtccaattttttgggtcggttccaatactcagtaagaagactacttagaaaatgtaaatgtggtgcagtgtctgtaatctagattgcatatacattgaagaacccaaagattgaattgttgttcgtatggcttaaatgaggtaatgctgaaatcgatttgtgaacaaaagagaatatgtgattaatatcattaacataatactcaattttgctgtacgataatcgacatttgtttcaaatggaccgatatagctatggttgaagagatggaagaggttgagagtgttgtttacaagacacaagtagatgtgtgatccttagagaaaggtttatatgatgtgggagctgagatggagagtctagcaggtgagacacgcacatgtgtgaccatatcaagtagctatggaaatgagattgaagtcatcaaagcatttttaaaaggatgtgagaaggagattggagagctcaaagccatgaacttttgtagtaagaaagagattcaatctcgacgttacttcaaaaattttatcgggtgtagtttagttatggtttgtagtctatgttttcatcttttaagtatgaaaagttagtatgagtttgttgagttaagagttctgattgtattttattggattgagtttgagtttcaattgaaagttgttgtttgggttttacataacacaaacattgggacttaatgggccaacgaaattggcaaggtgaagaagaacaaaatgtgggcaaaagtttg

SEQ ID NO: 20290 - DNA, 495 bp, Arabidopsis thaliana landsberg
ggaaaataatacaattgggggtttatatacaacttaaccaaaggcctaaaccataagccataaaccaaaacttaaaccaaaactaagattgatttatagaaacatcaatctgtacatactctctacactataagaaaactatatacaataatagtccccctcaagatgggacaaaaagatttaggagacccatcttgctcatgaaaagcttgaagggagcagggtatagaggtttggtgaatggatctgcaagttgcaaatgtgtgttaatatgaagtaacttaaacaaacctgaaactaacctctcacggacgttgtggcagtaagattcaacatgtttggtgcgttcgtggaagacagcattgttggcgatgtgtatagctgcagtgttgtcacagaagagcagtgtaggcttggacaaaggtacttgaagttccctgaaaaagaaagtcaaccacacatgctcatctgtagcaaaagaaagagcacgatact

SEQ ID NO: 20291 - DNA, 716 bp, Arabidopsis thaliana landsberg
caatgacgtcaagattacgaataggcaagtgggggcagaagatatactgaatctatacctcggttcacggaaatgtgttaagcaaagactaagtaaatcacttatttattctgacgataacatgcaatacaaataaagaacacttaccacttcgatttgacattcgtgaattgtgtaaagcaaggtttgtgtgcttatgctatacgctacagaatggcaggtcgataagttgacacgttggtcaatgacgtgaagattacgaataggcaagtgggggcagaagatatactgaatctatacctcggttcacggaaatgtgtaaagcaaagactaagtaaatcacttggttattttgacgataacatgcaatacaaataaagaacacttaccacttcgatttgacattcgtgaattgtcgcttcacgcctccctcgggtgttgggagggaaatcataccgttttgaaattcgcgtggctgcaaatggttaagcaactgttactagaaatatcttttgttactgtagccctaaaaaacaaagttaaccttttctataaaagaagaaagatggcaagatatcatctctcacacctttacttcttcctataaagcacacactacgtatccaacaacatcgaagaactcgatcatttctgttttggtatgcaattaatgaatgttcttttggtcggatttgttgctatttttaaaaaaccca

SEQ ID NO: 20292 - DNA, 1503 bp, Arabidopsis thaliana landsberg
cccctctaggcgactttcaattggtatcagagcccggtgcttcattagagccaaaccgctcgaagtgatgtcgggagcatccgccaagagggatctcgggaccggcgagaagaccgccacaagccatgggaaagctccatccggggagtccgccaacaaggtgaagggatccccttcacacaacaagtcgcgtcgaagcggtgacaagaagaagaagatgaggaaggtggtctactacgagaccgactccttgtcgccatccacctccggcttcgacagccgtccataacttctaagcgccatgagccaagaagtttagtaagattcccctacgctaccctcacattccaaaacgtactccattacttttcgtcccattaggcaaaccacccatgtttgatggtgaagattataatatgtggagtgataaaatgaggcatcatctaacctcactccacactagcatttgggatgttgttgagaatggagtacaggtagcatcaccggggggatgaagattatgatacggacgaagtggcccaaatcgagcacttcaactctcaagctacaaccatactcctagcctctctaagcaaggaggaatacaacaaggtgcaagggttgaagaatgcaagggagatttgggacctactcaagaccgcgcacgagggtgatgaactcaccaagatcaccaagcgggaaacgatcgagggggagctcggtcgcttccgtcttcgccaaggggaggagccacaagatatgtacaaccggctcaaaaccttggtgaaccaagtgcgcaacctcgggagcaataaatgggatgaccacgaggtggttaaggttattttgagatcacttattttccttaaccctactcaagttcaattaattcgtggtaatcctagatacacactaatgactctcgaggaagtaatcgggaattttgtgagctttgaatgtatgattaaaggctcaaagaagatcaacgagcttgacgaaccctccacgtccgaagcgcaaccggtggcatttaaggcgacggaggagaagaaggaggagtctcaccaagtagggtccccatcgacgcctccaagctcgacaatgaggagatgacactcatcatcaagagcttctgccaaatcctcaagcaaaggagggggaaagactacaagtcccgctccaagaaggtttgctacaagtgtggtaagcccggtcattttatcgctaaatgtcctttatctagtgatagtgacagggataacgacaagagggggaaaaagaaggagaagaagacatattacaagaagaagggcgcgatgcccatgtttgccaggagtgggactccgatgagagatccaccgactcctcctccgacgaggacaccgcaaacatcaccgtcaccaaaggcctcctcttccccaacgtcggccacaagtgcctcatggcaaaggacggcaagaagaagaaggtaaaatctaaatcctccactaagtatgcaacatc

SEQ ID NO: 20293 - DNA, 1007 bp, Arabidopsis thaliana landsberg
ctccaccttttgatctttatacttcgcctctgacctttcccattctttaaggagtatgcataacaaaccccaccctagacccgtcttcttatatgggatacttggcatttgaaccgacgcccactttagtacaccatgtcggctgatatatcaaccgcgccaaaccgacattagcctacatagattaggatcggctaattagatatcggcaacaagaagcatggattttgataaacggtccggttcggaactaccaaaccgaaattatcgaaattttattttaaagttgaccgaaatgtacctaaacataccaaatttaacagaaactgaaccgaatttggtttccattccaaaatcagcactataaaactaaaatcaatcaaaattaattggtttgattatgttcggtttggaactatcaaactaaaattaacgaaaatttattttaaaaaccatcaaaaatgtaccaaattaaaccgaaatcgttaaattaataaccgactcgattacaaatcggcactatttataccataaactaaaccaaatttcggtctgatgaggtgaagttgatttcaaaccgaacattgaaatatcaaaatttcgaaccaaaccggaccggcttagttctaaacaacagttttcaaacggtaaaaatatcaaaaaaagccttaactttcaaatttgggatgaaaaaagcatgaactttgtaaatgtcgtattaatcatgaagttttagttgatttttcaaaaaaatagctaagtttcgttgaccgagccgttaaaggcttgccgttgaattttcgttaacagaataataacagggttatcactctgttagaaatttaaaacgacgtcgttttaaattttaaaattaaacagaaaaaatgaaccttgccaagattcgaaccgctaccatgagaaactcattacgagattataaaccattgacccacaattacattttgtcaaagtgacacacactaatgtatatatatactcaacaatta

SEQ ID NO: 20294 - DNA, 589 bp, Arabidopsis thaliana landsberg
  unsure (1)..(589): unsure at all n locations
gacacaggaaaccatgctgaagatctgaaaacacactccttgatcaaacagttgttgtattgtccgaaactccaaacagcttgtcctgttccgtttgatgaagctaaactgtggcaaggtcaaagtggannnnnnnnnnnnnnnnnnnnncagaaacaattcagaaatataaggttcacctcatttttttctcgaaaatttgaatatgttcttttggcaaatgtagagagagcggtagtagtaatacatcttagtaatgtatgtgttacagtgcactaatggattgcgtaggttgtgaaaaatgccgactttgggggaaacttcaggttcagggtcttgggacagcattgaaaattctcttctctgttggaaatcaagacattggtgaccaaacgagtgagtttctcaaacatctatctgcgtagttttgatgggaggtgtcactgacctgagattattttcatgtttttcagctgcaactgcaacggaatgaggtgattgcactggtgaatttgctcaaccgtcttttcgagtcggttaaaatggtccacgatatgagttctgacgtggagcggctaatggaggatca

SEQ ID NO: 20295 - DNA, 558 bp, Arabidopsis thaliana landsberg
accagaattgagttacctagtacttctcaattctattttaccctaacgtctaataaataacaagtactctagcctcttcgttttatgattcctctaggaaaagttaatgttacggcccaatcactttttttaacagcccaaacaacatatattagctccaaatatcattttttcccctagaatattctcaacctattgtccactcaaaacgtgacaaatggaggtctaaagggagaccatacttgactcattttagagctaggatcagacagagtagattttttgccataactccttgtaaatgtattcacatttcattcccaagaaaaatagactgatgaagaaatatatcagatatgacaagggccgtgtcgtttaggttacgtaactctacaaggtttagggtctcaatataaacacacaaagcagatagaagaagcaaaccattcacaatcagacaatgacatctctccatacgttactcttctcttctcttcttttcttcatcgtctttccaaccttcacgttttcctccaccttattgtttcaggttcgtct

SEQ ID NO: 20296 - DNA, 1329 bp, Arabidopsis thaliana landsberg
accaggatcgattgaagagaaaaaaaaaacccaaccaatttgggaaaaaagcaaaagtgtgacaagacgattctggattctggatacagctggaagagaattaaaagaaaaagaaaaacacttccaacgaagaagatcgatttgcttcgagtctctgaaagaagaagaaaaaataatggggcgtatggattatctagcgatgaagaccgacgacgtcgatacggtggcgttagtcaattccgatatggaagagctcaaggtcgctgcgaagaaactgtttagcgatgtttcgaagcttggtggattaggcttcggtgtttcttttctcaaattcctcgcttctttcgctgccatgtgagtttttcaagtcgccatctctgatttcgtgtctcgtcgatttattttgaatttgatttgattttctcgtgggtttttcgataagtcgactactgtgtaatctcgtacatgttgaattcgaaaaagccgatttttatgtcaattgaaattgggaaaaattcatgatcggatattaatgattatgcaagtgaatctctgattgatcattatcaactgatttttactctgttattgacacagtaatccgagagaattcaatcctactgttaccacagttaaaaaaaaaagtgattaattaggctttaaatctgtttatttctgttaaattgttgacatttgcagtaaccctattgtttctagcaatagcatctctgattggttgaaactataaaattgattagtgatcagtgagcacaaacatgataagggtgtctttgtttcttttactcaatttagagaaactttctggttattcatggtttccttaacgtttttgttttggtattttgatgcagttacttgttaattttggatcgtaccaattggaaaaccaagatgcttacatcactcctaataccatacatcttcggtagccttcctagtgtcattttcaacttcctcaggtaacacaatcttttcttgtcaaaagacacaactaattcttaaaactatagtctataatctatatactggactggtttacatggaatttttcaatttttgttatcagaggagatgttgggaaatggattgctttcgatgcatttgttctcagacttttcttccctaagcatttcccacgtgatgacatcttcatattgttgtgccttcttgatttgtatctttgtattgatgtcatacaatcgctgaagatgtctcgagaacctttaaaatgctttgaggcaaatctatactaacattcaagtcagtgtaattgctgaaacaaaattaaagtctcacacttttgttgct

SEQ ID NO: 20297 - DNA, 1974 bp, Arabidopsis thaliana landsberg
aaatttacttaaccatctaataaattataatttttcaagattgttgtatgtttaattttactctttatatattcaacgggtgttgggatatatgcagaaggcttcatcgacttttttgactcttatttacgtctctgtgtgtatttaatgtggcatcaggtgtagtgattacaatcgagatctacagtatcagggggataaggcttttttttttttcttacgataaattatgtaataattagctgtttaaatactggagttgaaaaaattgaggaactcaaaagtcaaatcttgacgtcttttttgttgttgttattaaatgagaccgtgacaggaatagttttgttgtaaacaaaacgaacaataataaacagatgaattacgtatcaatatctatcatcagtcagaatttagtatgtttttaatacaatcatttcagtttttttgagataacatatcatatatatatacttctttccactttccagtgttggatgtgcatgtttacaattttttaaaaaaattctaaggaaaacaatgttttgaaattctaagatacgtttaggtaatacatgaagggggatacactttgtcttcgtcccttaattagctcctatgaagaatttcacatacacaaattaagaagatgcatgcaataacaaggctaaagccatttcttaatagttcattgatatgtacataaagtaagtttgtgtatgttaaaaaaaaattgtgtatgtactgatgtacagtatgttgttgattgttgatacgtaaaaccaaatagtcaaatactatacatttttacgtttgctcgtataaattaggaaacgaaagcataattgttacggataaaaaaaacgataatcaattaatgaaacaaaacccttttgtaaaaaagcccatttttatggaagcccattttgagatggaccagttaatgaaaaaaaatccaagaatcaatgaaacgaacgtttaagatccatgatggaaatttgggccaagattataagaagatctcaccacatttcatttgggccgggtgggcgaaacattccgggtgatcgtgtagacccaattttttcggtggaaagtgcaaaaaaaatgcaattggtggatgtcgtcgcggttcgaccccaagggatttggccggtaaaattattgggagttgtctttctcttgcactctctctagttccaaaccctagcaattcctctgttttcaccattttcggagattatcaccttctccccgattcgccgccttgtgattacatctacgtaaagagtttctggtagaaattttccctcttttagctgcagattggcatcagattccgttctggatgtgtcggtgatcgattttccgcgtcggtgatgatagctaacggattcgagaatatggataaagaacgagtcaggaaacgtcctcgtatgacctgggacgaggccccagctgaaccagaggttgctcctctttcttcttcttctttttttaattaatctttgacatttagaacttcgaattagggtttagaatgtggaggaaagaccgagcatttatgtttctttggtgagattttgatatgctgacaatgaatgaattttgacttttttgtgataggctaaaagggctgtgattaaaggacatggaagcgatgggaggattttgtcaccaccattaagggacgatgatcgtgatggtcattatgttttcagtttgagggacaatctcactcctagatgtgagtttttgatggataaagttgctaactttctattctatgtgagctaagatatttacctatgttgcttctatatgtgtattgacgctagtaactctttgttttgtttggcaccattgacttagggattatctttttccgctttcgtttcattgggatgtgaatccttcctgaacatgcctaattgcttaacttacgctgttgagagtccctagttgacttctacctta

SEQ ID NO: 20298 - DNA, 878 bp, Arabidopsis thaliana landsberg
ctgtggacaagtcaaccataagctcctctctgttatccagggtgatcttagttgcctccaacaatgccatcagatgagacattgcctcaccacgcatcacttgcagacggtacagggcattcatgcaccgcacggtcaagtgagtagtctgtcctgggtagatagcccagatgtccttggcatgctccactcggtccttccacattgggtcgtcctccttctcagcggggaacaagccaatggggtgagtggacagctctaaggggtgaaatccgcagaaagtggtcagtccatgaagggcaatcgcctcgatcgtatcctcagcccggtatccaaaggactcagagtccagcaaacgccagcctggttgtaggggatgaggctccagggtcatcctcaccctacagcggggcactcggtgcttctcgaactgctgcaccgtgtactgaggaggcgtcgtgtaacagccccctgaagtacctcccacaaaatacggggaaagccctctcgtgcaagcccgtcagtgtgggacagtgcattcccgtcgtctgaggatccgtgggaagtcatctgtgtatggttaagcgtaagtaaaaagaaaaagaattataaaaagaccaaggaaaataaaactctgcctttctctagtaaaaaaaatatactggggacctagttggttatcattttttaattaggtcctcacttaatttttcatttgtttaattttaagaatgcatgcatgctcgtcctgaacgacgtcacaacaagataaaaggaatagggaagaactcccatcctgtaaatgtggcctgtagggcctaatcacttagccacctagctaacacttcccccatcctaaggcttcacgtcctaggaat

SEQ ID NO: 20299 - DNA, 375 bp, Arabidopsis thaliana landsberg
ggcctaggatcataatatgatggcggaggactttttttgcaacatctagttctgcctccatttaaacacattcctccataacttgtctcttcgcactgttttttgcagtcggcacatgatatatttagatctaaacatatgagcatttggtacgaacttgcttgtcctgtgattgatatatatatatatatatatataacaaaaacataaccaatacattcaaagatcacccaccatcacaaaaagatcagtttttgtatttgaattttatgaaccaagtaatgacttacgtgcaatgaaaagcaagaaaatagttgatatcagaagaaaatatgttccataagcatctgaagatttctcgtttttcattttccg

SEQ ID NO: 20300 - DNA, 109 bp, Arabidopsis thaliana landsberg
gcagaattttcttcttcgttaacggagcttctgttcgacgaagtcctggtacattaagctcagttgggactactgcctccattccgtacaccaatgagaacggcgtttt

SEQ ID NO: 20301 - DNA, 503 bp, Arabidopsis thaliana landsberg
tttagagaagtctacaactacagaagagaacagtatctttgataaataggtggagctgacagctaatcagaaagctgatttacagaaaccagaagacagtaaggggctacaggcagcagatgggtcacctgacactatcaagcaagaatcaaaaccttactgtatcgctcaaaaccgaacaaagaggattggagttggaccaccgcaaagatacggttatgaggatatggtaggattctgtcttgagaatatggcagggtatgctttacaggttgcagaagaggtagatactcatgagccagccacttatcgagaagttttttctgggattgaggctgagaaatgatttcctgcaatgagagatgagatggaatctcactgtaaaaatcagacatgggatttggtcaaacgaccaccgggaagaaagattgttacttgcaagtggatcttcaagataaaggaagggatatcaccagtagaaggggttaagtacaaggctcgag

SEQ ID NO: 20302 - DNA, 582 bp, Arabidopsis thaliana landsberg
  unsure (1)..(582): unsure at all n locations
ttttactatacattttaactatctctttcatcataataaactgccttttaattctatacactccaacttatttttgatatttgaatttaaatagtaactcatatttgttttcagtatttaatttaatatttccttaaaccaaatttaaatcttaaaaattcgattttacaatacaattaaaatatctattttatcataatacaatacaatttaattcgattgtatacaattcaaatacaatccaattttgcaatacaaatacaatttaattctatacactccatcttattgttagttttcctttttaattaagaaaattataagttattttttcttaatataaaaatataaattagtatatgtaaatatgtttatttctttttgaaaaaaaaactgttttcttgacacatgtcaacatctcaatgatagacctgaaacgtcttatgatcttgtgagttagtaactttcaaaaacttactttatataataagatatatatatatatatatatatataacaaacaaaaaaatcagttttagtaatatgggacttgtactgtgtcaagaagcctgctntctctct

SEQ ID NO: 20303 - DNA, 965 bp, Arabidopsis thaliana landsberg
cagagtatgagatattataatgtaatagggagtgtgttatatatatctggcaaaaaaatagattattagttggatatttggaggtatatagccgccataagtgaaaatatgcagttaatcacgtagaaaaataagaattcgagaagccatctctattgaacttgatatcaattatattaattttatttcattagagtacaaaaaaactgcaacaatagtcaatattcatgaaataaaaggacaacaattaactctttgctgcatgagaaaaccgaaccttttccccacatgagtttgacaaattacaagtttttagctttttttttaatttctggtgaaaaactttagatacgtgagctcaaaaataattatgaaatatattataaatttcttatgtcacaaataatttatttaaactaatccctatagatatattaaaatttataaccaagaaattaattaattaaacaacttattttattacaagagttttgtgcaaacgaactctcaaatcgctcatttttacaactttaccttatgaagtcaaaaataataaacaatataatccatttttgcaactttacatattgtaaacgttttcacgattacatacatttgtttttgaaaaatttaaagatatagttgaactcctcatttcgaagatttcgatttattatttatcaaaatttaaaatttgacaatattgaaaatgggttatattgcgtattatttttgatttcatatgattattttgcattttttttagacgtgaaagataaaattgcaaacatgactgtaaagagcttttttgcacaaaatcctatatttagtaattaaatattatttgcgattttgctatacataactgagaaaatttttggtaaacaaagttttgtctaacaatactaggaaatacatatgaattacaaattttttttttttttgcccaaaaaaaacaatttttt

SEQ ID NO: 20304 - DNA, 1140 bp, Arabidopsis thaliana landsberg
ctcatcatcatcaacattaaccgcctgcatatctacaggcgtcgccatgaccataaccataaccactacctatgaagttataaccactgacccacttttggtcattataacttgcctgccatttgtgttagtttcttaatttacgcatatatagtgctatatatttaaacaatttatcaaatatgacttttttgcaaatgaccttttcctatttccttttataaaaataaaataaaaattaaaactaaatcttgaagatatcctttgtccaccaattcataatactttcgagtaagaacttcatggcgtttcttttgctgcctcaagtgtaacttgctaggagttcctccatataaagcctttgttaaaacaatcgtggattccaagattccttgaacacatgtgaccaagatatccgctgtctctttggataaactcatcacctcacagatcttttctctccattcaattgtcggcggcatatccaagctgaaatcaagtaacttccacatgagcacaacattgactgcattcgtcttcttgatgcgctgcatcatgccctcctacgatgaaaagattcgacctcgaatcttgttttgatgcaggtagactttatcaaccatagcattgttctcttggtacgtaaggagaaatgtttcttcacaaatagaaccaaacattcgcacatcccttttcacatatgcaaaaaccaaatcttcttcttcttgttctgcaggaaagatcgtcttcacatcacttgtatattgctttctaatcagagcacacgagggctacaagtggttccattgattgttccaaaatcccattgcattagttgtataccccctataggagaagattcgaccgcgaatcttgatcaggatggtgttaaatacataaacgtgttcagagacatagctaaacgtgtttgcaaattcggcccaacaacacttttcttcccaacgtttactgtcacccaagaaacaaagccatatatgcttgaacattccgtgtgtgatcttccgtagagtatgtgacgatgagttaatatccaagctgagagcatgtaacttcaacatcattgcaagaacaagcgcatttgtagtctccttacccaccaagaaacgaacatttgtagag

SEQ ID NO: 20305 - DNA, 518 bp, Arabidopsis thaliana landsberg
gctctcttgatcatcagctggtgtgtaagcatcacacatcacctgcatatctcataataatcaataatctgatttatatccaagttgaatctgtcacactaatcatatcaaataaacccaccaggatgttgttgcctttcctgaagggatccttgaatattgcctgagggcttttatttaattaacaaacaaagcaagaccaagattaagatatgaattacttcatatagagacaacaaatagataaatagagatgagggatgagcatagtactatagaatgacttcactgtcttctccagcagcctgaccggtgctggatccgtcgtagttccacttgggaagctttgatggatcagtcactggtcctggtagtgtctgtatcattcaaaaacaaatcagaaaacagaggatgaaaaataaacacatgagggagatttataaatcaaataccctggctttgcttctgatatccattccagatccaccgatcctgtttattcaacaatcatacaaaaa

SEQ ID NO: 20306 - DNA, 1687 bp, Arabidopsis thaliana landsberg
ttcttctaaacttgctgtgattatatgggccagtatcagtgttgaggaacccaaacaagttaattttcgagcccactatgatttaaatcccattgtttcttccctactaacttactacgaaatatatttttctgttggcatatcacatatgtatgtgaatggcctaatgggattatataactctttttgatgcccgttatggattccatttttcaagatcaaaaaaaaaaaaaaaaaacggctgtgtcatttaattactggacaaggagctggctatttgtctgtattcataaacagtgtttgtatcattatttaacgaatattgtttccataagtacacacgaatatattcttatacatacgggatatttagacaggattggtacgattcgtagtcgatacaccatactaatttagaccgacccttattattattacatgtactaagtgcttctagtactagctagctattacccccacttcttcttttcattctagtatatgtttttccccaccgttcgtatttatatacaaaaaatatatatatataatattcctttggtccacatattaattcccgtatcaaattgtaaatcacgtacttgttgattttgtgaatgtacacgcgtacgcctccctaacatttgttgacaattagggtttgcggatatgtatcttgatttatacgattttacacgaatcacgatgacttccgattgtactcgcattattaatggtatttaacgacgaaacctaaaggaacccagacctatatttatatatacgtggatgttaagtttaataaagatctttacgaaaggttttaaagaaaaaggagtcttttacgcaaattgcagttattaatagcttatatggtgattaagaaaacacaagctcacgccaaacacacattcatttcatatatataaacacaaagtaaaaaggaaaaaaggatgaaaacaaacaacgacgttttcttttttaatttgctctctccgtagtctaattatacataatttaatcacacagtctcgaaagagtagtatgattatagtaagtcttctaatacctctcgtttaggtggaactaacacatgacatctttgagaagcttgtaccttcgtgtggccgtcttaggcgacgtaactccgcctccatctccagcaacgcccttggctacttgatcgtgacggttattgttatgcttgatccggtggccgggcgaatattccgatctgtttgagaagtcattttcatatttaaccgaagaagaaggcttctttgaagaagaaccgccatgtctagcaacgttgctcagcttccggtcgtcgctgcggcaccagtcgcaaatctcggtaggctccgcaaactggccgtagtagttgctacaataactatatatatatatacacacatatatgatcaattaagaaacccattaatagccgtgaatggtcactctgatatacatatgcatgaatgatgaaggaggactacttacgagtgttggaagcggcagcggcagtgaccgcagctgaagagcttgtcggagaaaccgacatcaccgcacatgcaacacactctctccatgatatatcttcacaatctttattatttatatatatcgacccttgtatatatatgttaggccgtgatgtttacagtcattatacaactatgcgtgttag

SEQ ID NO: 20307 - DNA, 781 bp, Arabidopsis thaliana landsberg
  unsure (1)..(781): unsure at all n locations
aaaatcgcccatagaattttacaaacataaaacatgatattattggtccacatctatatttaacatatattttcaaagtaaattaacaaaaaaaaattaaaaaaaattgatatctaccataaacttgaaagaaaaatcatcgtcaaaataggtaacaaaactaattattcttttcttgaaaaaataaatttagcccggttagaatgcgcggttacaaacaaaatcaccgtcattgcaaaaagttggttatttcctccataatagaagtgatagatttgtgtttgtcgtcgaaagtgtgattatgctggcgatgatggtggtagtgatgactgacgtaaaatattaagtcatcgttacgttttaggttgtatgtgttgcatacgtgatggaaatccatagccatgatagcttcgagagagaagtgaatcctccgtcaacgtgtcatatccatcgtgcactcaagccatattcggtttcatcgccactgttttgatcactatgtcaaggactcaacgagtcaacgttgccgttgtttgtttcacttccatcgatgaagtgatagaaagaggtggagaggaagagatatgggaaaagaattagagaagaaagaagaagagtaaaagaaaattgggaatgtcttatcgtttagtttgaatctaatctcttaccgtacaganttagagaacaagcatatctaaggtgattaatgtcttatcgtcttgcgagttatttgatatatgacgtacttttgatatgcttattatcttggatgtatcatatt

SEQ ID NO: 20308 - DNA, 544 bp, Arabidopsis thaliana landsberg
gactactcttttatgaaaaagtgtgggcaatgggctgggacatgctgagatcacttgaaaacatatccagtgcctccattaaaagcttcagatgatctactcagcaaagatggcatatctagatttgacatagccaaatcaatagatattaaaaaaattgtgagaaacaaaaattgtaaattcaatcaaagcaagaaagaatctattcataccagcagatagtgatttattgggttctagctccatctttttgccttctgcaactgcagatatgaatcaaatatcaaagacctgctagttgatttctgattttgcatcataaagcagaacagtaacttgctaagatcattagttctcgatcacaagctactcatgtgtttcctagtagtccatacatcaacaaacataactgagaagaagaaaatcgaagcaagaccatgagttggtcaactcgatgaatagaaaattttgctgcttgtggcgacaaaacatcatcagagacagagcaataaactcaaatcaaagcttaaactttgaaacaggt

SEQ ID NO: 20309 - DNA, 612 bp, Arabidopsis thaliana landsberg
  unsure (1)..(612): unsure at all n locations
ttcggcttcaaggattttcatcacgcagcccggccgcacccctccgccggtggtcacccaagatggtgacctccagtttgacggtggggaaagcgagccaggctgcggcctctacccctccctcggcctcaaggattttcgtcatccaggccaagatggaggatgaggcgagtcggggggctgccccgcatgggtcggctgcccttttcttcccccggcgcctaggggagannnnnnnnnnnnnnnnnnnnnnnnnnnnnnnnnnnnnnnnnnnnnnnnnnnnnnngccgtcgcttggctagggcgccagtagccctgggtctccgtctcccggcctgaatggctggttctcgtcctctgcgggtgagagcctcccgtcgtaacacctgccccgaagctgctgccgaagccgcttcgccgcccggggcggggatggttgtcgtcgtagtcagagcaggcggcggcgacctcnngtcagtcttctgttgctccgaggccttcccctcggagtggggttgttcgtactgcggagggggaacggagtccgtttgtaatggacttcgaatccagtgtttttgtcattgtggctgtcgaggcctgacatgtatgtaa

SEQ ID NO: 20310 - DNA, 623 bp, Arabidopsis thaliana landsberg
tatatccacaaaatcataaaaaagatgaacttcaaaattgattgaacaagaaaatatggagaaataatttgagaggacgtcttaaaaccttagaagtttcgagcgaattttcgagcgaaatttgatattattttctgtatattaattgatatcacaagtaaaaattaaaacaaccttaccatatgatgcagcgagatatttaatattattatcttttaatttatttattataattattctagaatattctaagttttagggttttgtgttttattataaatagtttttttaggcctcctattgtattcagttatttgataaattgattaatcgaaagattgaaagaagtttttataaaccattgtgaagagtattcacaaacctaagagctttggcgaaagccctgagaggagaactctcaaaccctagatttccgggtattctgagaatcaacggatctctactcctatcctaaaagcttccgcttcatcaccataaaaacttaatatcattcttaaagtatcgcaaattcgaataaatacttatacctttacgaatcaattaaacgtcttatataatttatatgagacacattactaatcaattatcgtagattaggtgga

SEQ ID NO: 20311 - DNA, 1011 bp, Arabidopsis thaliana landsberg
  unsure (1)..(1011): unsure at all n locations
acattaaagagtgttagacttatgacatcatcatcggagttttagcgaaagtagtcatcattgtttgaagtgcagcggaataaaactaacgataattaaacagagagatggggaagcctgtcccatcactcatcatgctcctcctcagccgaggcggggtcccactcgacagtccaacccggtggcaagatggacggccaagtcactccagcaaccatgtcctccaaagaacctgtaaaattatgccacaagcaaggctgagtatactaatactcagctagacttacccgttgtgaggagtctactcctctacctctagacatgcagctgtttggctgtggggtttggttgccaaaagcactacctgagtctaaaaatcaagttttaactttgtcaagtttaaatgtgactctcttaagactaaatgtgtactatctactcattcatggtatcaaacacatttagcaatcaacatcttttgccacatcatcacatttcaacttgttactcaatgcaatacaatggatcaagcagtctcattagctgcgagaagcagacgattcgaatcgagtttttatccttgcaaggtaaacctaaacacacgatgtggcgaggcactctgtccccacacacgtcaaccatccccatcgattccccgtcagcagatcagggctcaccgccttggggtacaatgcctcactgaccccgactaccgtcgtgcagtgaccgcacttgtacccaccataaccggaatgggagaccacgtctcaggtcgcgtgaggggatatatccactgccaggttcactcaggtactaggcttaccaatttaccatatttcttggcatatgtttagtacgttcaaacgcttgacacgggtatcgcacgtgaatccttattccaatttcatctcgtagacatcgcaaccccatgggtccgagtccatagacccttatcattctgttatcaaggtggatcaatcaattttcctgacctcgcgcgagtngctagaa

SEQ ID NO: 20312 - DNA, 1025 bp, Arabidopsis thaliana landsberg
agttcttgttagaggttatcttaggatcgtagcctgtgatgtttgagattgtccgtaccatctgagtttctccttgacgattacctccactttctgaggctttagatctaagatcattagttttatttttacttcggcgatgatgatgaaacaagattaccatcaaactttgagaggtttttcgctcgttgatgtaaacttctttttataatctgagcctagtttgtttgtttgaaatcttatgtgttacatgttatatgaaatcgttttggtgataggaaaggcaacaaattagagtctctgattcacttatgtcaatagtggataaagcgctgtacgttgccgagatagatatggcgatattctggtacttggactagttttgatagttccatgtgcattcaaaagcccttacatgttttactattatctttgaatactttgagttgttgatttggttagtagctttattaaggcaacaaattagagtctctgattcacttattcaatagtggataaagcgctgtacgttgccaataattacttggcgcaaagatctcccaatcggctttcagtcttatttttagccgatatgatcgatgttcctaaattatagcttttgttatatatgtgttttcatatagctgagctgaccaaatctttttgatcaattacctgacactttgacagacgatcgatttttagacattgaaatatgggccgaaattttgaaggagtaatgtctggtaaagcaatgtttgataatgttatggactgctacgcttgtagcagttagatttcattgggttataagcccgaattcaatatcccctaaaaagattgattgagagtttctggagaagatgtaaaccgtaactttgtagcagatcacaaattatttcataaaacagctttcgacgggaaagtttataattttgatataggaaccggataataattgtatcagtaattcttaatcgggctctggatagtccgtcctttttagtcgattagaatcgaaatcg

SEQ ID NO: 20313 - DNA, 3403 bp, Arabidopsis thaliana landsberg
  unsure (1)..(3403): unsure at all n locations
tttcataactggtagaaattatcgtctcactctcttctgtcttttgacaagacatttgaacccttcaaaccaaggtaactttaattcatctacctaataatggtgaccagaccggattatcctaaatgccttttgcgactcatttactcggtaaaacattttgaaaaaatacgagtcctgctagcatcattaaccatgctctgataccacaaattgtaacgctcccgagatgctctatgaccagactagtcactggcgccccgaaaacgccacattcagaatgatcatcaacatccaaccgcggttcgggaaccaatcccaacccttggccagcgtattgacgaccactctcccacttaaaacatcgtttacgcttgccaacccttacgatatttaatgtttgtgccgactcggactaagtcatgctcagttattactcgtaaatttgtacaagaaacccgatttatttcataagtataaatattacacaacatgttaccaaatatttataagttttacataatagaaacatacttgttttacaaaatgcacaaaactacttcaggtttcctattgtccaccacgccctctagtccccactatgggtttcctgcaaaacaagtagaatcatgagtaatctaagattactcagtgagctcgggattccctgcaaaaacattattttacccctacccgaatacccaacatgaaacacgcaacagagaatggcaacgaaaggtagcttcccgaagcaaactacaaaaacatgcaaatgcattaagactccagttttattaagttttaaagggtccgatatgctgccttcaaacccaacaccaaacacacacactctcgtgatctcccacgttacaaccacaaaggtatgcaaccggagcatcactaccaaacgctacaccgttgtgtagacactcggccagggtagctagccccatctctccgagttcttcgcacttcatggcgatcaagtaactttgttacaagaccccacgatagcacggttcactatgaaggtcagacatatcatgatcttggcacgcttatggtctttgcctcctccacaagcaccacgtaccaagaccccaaagtttaagatattatgaaacacatggttaaatcaaacacatagactcatcaatatcccaacacaacttcccaaccataaacaatagcataagaatcgaaagatcacatatgcaatctaatataaccattcacatgattcatataactcacaatcaatcaagaatacatgagaatatgaatatgaaacttaaacaattatccagaactcactcagtaaccaacaaaaagttttcaacgattcgggcaaagctttcggctatgggaccttaacttgaatcggacggacggtttcaactcggtagcctctcacttccactcactttctcttcacaaaacaatcggggtcctgttcagcttatataggcaagggaaaagggcgagtctgcaggtccacatgtcaagtgcttgggtgagtcagcgatccacgtgtcatccgctagtgatgacacactcgctgctctagcggatgagctacacgtggccacccaaacttcggttccacacaactaaaattcggctccaagcaactttgcttgggccccatgtgagccgagccacgcgtccttggggccggggacggtcggtcgacgccctgtggggcaaacttcgcccgcggcacgcccgatcttgcccaaactagcccattcgtgcccattcttgcccaaacttgcccatctttttcctttgatagtgtattgtgttttgggcacatgaggtcaattggccatgcattcaggcaactttctaaaatttggactcttgcctgtggccgatgtccttacgcgggtcactacattctcccccccccttaatagaattcgtcccaaattctagaaggattagacggtccggcttcatcctcnnnnnnnnnnnnnnnnnnnnnnnntggatattttgtccgaggaacttttcctcatttgcccaagtaataaccttacgattttgccttccccagaacacttgaatttgtagaatccttctattctttatctccgcattcttctttcaccagtaccaagagggatttcgggaaaggtgagattcgttttcaactcttgtatcggctcgggtatgatagcattaggatccggaacgtgcttccttagttgcgacacatgaaaaactttatgtaatcgcatttcttctggcataaacaaacggtaggctacctccccgattctgttctcaattttgtatggaccaataaatcttactacgagccttacaacttttccaaaacgatctttccctttaaacgcagttaccttaagataaaccatgttgccttcttgaaattacacttcacgcctctttcggtcagcatactttctctgtcgatcttgagctttcttgataatgtctcggatgaactgaattgactccgcaatctcattgatcaaccgattattaaaactcatcctctatcctacttcagtccaacaaagaggagatcgacatggccttccatacattgcatcaaatggcgacataccgatgctcgagtgatagatgatattgtaagaaaactcaaccaaaggcatgcgtcttcccaatcaccagcccactctagtgcacaaagttgaatcatatcttctatggttcggatggtcctttcagtttgcccgttagtctccggatggaatgccgcgctcatatgaacatcgctccctaaacaacgttggaggtcttgccaaaatatagatgagaacttaggatctcgagcggatactatattagcaggtaccccatggagtcataagatttcatcgatatacttttctgccaagataggtgcccgatccgtacttttcattgataccaaatgagccatcttggtcaagcgatctactactacccatatagcatcattgctacgtcatggtcttgttggtaatccagtgatgaaatccattgagattgactcctagttctatgcaggaattggtaggttacgcaataaacatgctggtacttgatgttccaccttaactctttggcatgaatcacattggcttacccattttgccactgatctcttcatcctaggccaatggtaatacttccttatatccttgtacatttttgtacttcccggatgaatgctcaacaaagaagtatgtgccactttcaaaatttcttgtcgtaatccttacggtcaggcacagtaattctcccattaagtaataaggtgccatcatcagccagatggtagccactagcattccgtccatccaatgtttttaattcctccacgaaaatctacaacttttcatcttgtgccggttcttcttggattcag

SEQ ID NO: 20314 - DNA, 835 bp, Arabidopsis thaliana landsberg
ggcgcttcttaacgcatatttcctggcttatgtaatttcacccaaacttgctcatcgtatcactggatacttagaagaagaggctgtaaattcttacactgaatttctcaaagacattgatgccggaaaattcgaaaactcgccagctccagccatcgcaatcgattactggcggttgcctaaagatgcaacgcttagggatgtggtttatgttatacgagctgacgaagctcaccaccgtgatattaaccactatgcttcggtaaggagttgtatagtttatttgtcaaaatgataaaacaatgtgatattggtataaaatgtaaatttcgttacaatatggaattttatgtgtgcaggatatacaattcaaaggacatgaactcaaggaagctccggctcctattggatatcattaaagattatgtgacaaagtcacaaagctgtgtatacatctatgaacatatgttgttgtggatctccatgatatttttattttatgttttcgatttatttaaaactgttattcgtttttattagctcaatctggatatttaaaccatattattttgttacgatttatgaacatagtactactcatgtgtgtgtaaaagatcatactgcctggacacgaagcggatatccggaaaaattataatatttgttttttgattcgttttaaccgaatacttgattttgtgatttgcttcgattcgaaaatttccggatatccggaaattcgaatatccgattttttttgtgatatttgcggatatctgctttgatacatataaataataaaaaaaatctgtaaactatacaagcatatcaaata

SEQ ID NO: 20315 - DNA, 1360 bp, Arabidopsis thaliana landsberg
  unsure (1)..(1360): unsure at all n locations
ggttaacgatgcggatcataatttatgggttaagtacaagatgggtattctgaaccaaatgaatccggccaaaagtgtgtggaaggagtcatctctatgtaccaagacatggaataattctgttctactgtttatgaaggtgtctgatatgttagaggctgatgctgggtttcttgtgcgtgacactcttgtgtttgtgtgtgaaatattggattgttgtccttggtttgagttttcagacctagaggttagttcatactttatttctttcttaaacattgtaattatgttactaaacattacattatggaactattgttttggcctttatttttaggtcttggcttcagatgatgttcaagatgccttgaccacgaatcctgatgaagttattggttctgagaaaagtgaggaagacacattccgtaagtgatttcgtgtctctatcagtttctcgtctttgttgcgattagagatatagtttgctaatcttggctaattaacctaagaattttcctcatgcaggtcaggtcagtccgtgagaggcttaaaagtctaggtgctgatattgccgaaaatgagacttaggacatcaacggtgacttcgttcgtgggtctttgatttaggccattttgtttagattttgaataaggcttggttttatattctactttttggagactagtgtgtttaagttttaaggcttaatgttggttgaaaataaaaaagaagcttaaagtttagaattgacatttaaaagatttattaatttatccaatttagttaaaaccatgatttacaaaattgtttattacaattccttacctttataacaacaatacatccataatcaattaaaaaaaaaacaaattaggaaaatgaagcttcatcaaatagtgattttctactttttctatggggtcggagatagattgtgaaataaaaacacatatgttttataaaaaaaccatgaacttatgactctattgttaaccaccataaataaatatgtttggtttattaaacaatgtatatctcttaggaatggatacttctagattttgatatttctaatttcttacaaaatttgtgagatgagatgataactacatcaaacttttttcaggtctaaaaaatgaaataaagcatgaaatatgttaccaaaaaaggaattttattttttgtgataaaagcattttggacaacgaaaatcaaattgaaaagaaaatgaaacaaaaggcattgggaagaagtcgaggaggcgcattgtnntaacacaccattnncgcacgtttaaatcnctggtcttttggcccttcttcttctggtaagcggaaaaacaaaaaaaaaaaaggaaaa

SEQ ID NO: 20316 - DNA, 488 bp, Arabidopsis thaliana landsberg
tgaattagagctaagatggtagatttcaaacccaaaaactttgtttttaaagtgaggtaatcattcacaaacctcaagattttgtggttacggttgttgtcgtatccaagagcatacgtctagtctatggaaattgtttttgggttggatccatctcgtttgtcccaaataaggattccatacgacaagccttgtgctgtctttcatgacacataacaataaaaaattcttagaatacaatttcacacataacttagaatatgaaggaaatcttagaatacatgttctaaaaattttagaaattggatattctattttctaagattattaaaacgaaaaatagtctaaatatcgtagaatatgtacaaaatattagaatataaattctaaactaagtagatcactataaatcgttttctaagaaacttagacaaaattttatctatcaaaaaattaacttttttcaactaaattacaattttttttta

SEQ ID NO: 20317 - DNA, 984 bp, Arabidopsis thaliana landsberg
cggtcgcctgcaacgctatagtgaaacgctacagtgcacgcctgcgcgcgcagaagtcagagcaggcgccagacgagcctggacagtgaacaggacctgtccggtggcccacctgtcagaagctccaacggtcgaaacccaacggcctggtgacatggctggtgcaccggactatccggtgcacatatcgacagtagcctccaccaacagtcattttgggtggttggggctataaatacccccaaccaccacacttcaatgcatccaagttttcagccatcaaaccacatacaagagctatagacttcattctcagacacaatcaaagagatcaaatcctctcccaagtccgaaatcactccaaacaaattagtgactagagagagagacatttgtgttcatttgagttcttgcgcttggatcgcttttcttgttctttctttcttgttcccaactcaattgtaatcaaggcaagagacaccaattgtgtggtggtccttgtggggacttggtgtcctgattgattgagaagagatgctcactcggtctaagtgaccgtttgagagagggaaagtgttgaaagagacccggtctttgtgaccacctcaactggggagtaggtttgcaagaaccgaacctcggtaaaacaaatcaccgcgtctcactctccatttgcttgtgatttgttttcaccctctctttcgaactcgtttatatttctaacgctaaccctgtcttgtagttgtgcttaagtttatattttttagattccgcctattcacccccccccctctaggcgactttcaatattccagttctagcctcttttggatgctccccatcatacccactatagagtttttattgctataacactatgggactcattctctctagtacattgtggcaacaccaccactaacgtagttagtatgctccagtaagacttataatccctcctgtgtggtggtatcatctttgcag

SEQ ID NO: 20318 - DNA, 1200 bp, Arabidopsis thaliana landsberg
atgatgcctccaaattcagatcaacgtattgcagtgaagacaattctcattattgtatttggcaaatgcataaatcttcaaggaaaacagaccaatcaagattcataattccattaaagtttgtttacttctcaatatcacattgaacataacgaaaggtgatcagcggaagatgaatcagaattcggacaactccaaacatcaagactccaataaccagattttgatttgatgtccattatcttccgccttctccattgatcaaaatttcaatcgaattcgattagatctgttgaaatagtgtgattaattgatgaaatggtaggatcagatttgttgacatccaaaaaactcagtaaagcttttgaaattagaatcgaattgaaggaacctcaatgtcaaaaaaatgaacttaagctcgacaattttttttccgatgggagatgattttcaattcagttatatcactctttttttttattggttagtcaaagtgtcattaaacataggttgtttgttttttgttgtctttaattaagtatagatgattttgaaaattttacagaataaaaggtttttacatttaaaaatcacatattgtttttattttattttgtgattttgttttcaacatatagagttcttaattgcaatttataatacacaggaaaaaataaattcagtttcatattataattattcataataaaattacctaattttcattattaataaaattaactagatgtaatcaaaaaattatctctaacacttgacaaacatattttataatatataatactatccaaaattcaaaaataaaattccatccaatcaataaatgcacatccaaaaaaaaatactcaaatactataatcaataaatctaacattttacatttcaatcatttgctatagcataattatatatagaaaatactgagtgtcaacacatatatattattataataaataagtattaaaaatattacaaaaccagcttttattaaaagaaaaattaatacgataatacaatgaaaatgtcatagtacaatagtttccaaaaatccccgcaacatgtatttatttatcaaaatttaacacccggacgaagcatgggttatcaatctagtactacatatgtccctatatacctttgaccaacccttctagaggtctttgaccaaatcagaaactcatg

SEQ ID NO: 20319 - DNA, 2140 bp, Arabidopsis thaliana landsberg
tgggcaaaatgaattacatagttaaaatgtatatgaaatagaatcggtaagattaaaaaaaattttaaaacaaaaattactgaactaaacattaggaaaagtgtgtgcattactatttattattcgaatttaaattacaatgatgaaatttatatttatatctatactcgcttatatacgtgggctttagctaatatcataataatggatccatcaaactaggttgaaacaaacttttctaaatcccatttgattcaaacatatatgcctaacacttgttattcttatgcagacctcatccaattcacagcattacacaaatatataatcgattcggtgtttcttgttatctgaatcagtatccattctcaaacagcgcaaactgtgtaaccttaacatgtgtacaaaaagcataaccagatgaatggcaaatcattaataagagagaaaactgagtttacttttaatattacgctaaccaattaagctaattaacattgaattataagagatataaaaaatattgattgagggcctgactggtttaaacgcagcgggtgcggttgcggttgcggaagtttgcggaaacgggcggttgcggtttcaagcgttatcaagtgttttgaacgactggttgagcgtttggtaatgagtgcgtttgccggagttttatgactggtaaaccagcgggtgcgataataattaaataaaaaataaccaaaataaatataatatattactattaaaagaaaaaatacaatatattattatgataaattgataatatttgaaaaattaaacatgcttaataattaaaaccataaataaaactgaaaattcaaaaatgaataaattttgtaagaaaaagcttaatactttatgcatttggtacatcaccaaaaattgcatcaagtagtgtgataaactgtaaataacgttgaactcgcgggttttccggattgcctctatacatatgataaagtttcttcaagatatccaaacgatttttaacacatctccaactcaaattttttctaaacgttaatattcttaagaatattttctttttgaacatcacttagaaatctgattttggggtctttggattcttccgtttatttctccacaataacccgttgaagtaacgcaaatgtggtctcatctgaccaaatgattttctaatcgagaaaacaaatcaaaacatgtattcaatcaaaaaactcaaaaaaaaaaaaaaaaaaaacgatgccatgaaatattccgagaattacactagctaatgaatgaatgaaaggatagatcatacttacgtttgattcttgattttgactttgatttttgtcagtttgggtggatgccataattgagagaatagggtttcattgattacggttttctaataagaataagtatagggtttgggtggaagacataattattttaattaattataaaaataattttttttttaacctaaccgctaccgcccgcaaccgcaaacgcttgcgggaaggagcttttgaaatctggcgatttcgagcggtccaaagcgatatctagcggtttatatgattggtgccaatcgctaacaaccgctaccacccgcaaacgcagagggagaaccaatcaagcccttagtttaactgactacttacccatttgcattgcattatgcatatggataattgagggaaatagcataattatatacaatgaatcaagttctgtatctacaaaaattcataaggtttataaagaaaatagttgtgtcttaatgtagggtctgataattttccatagattccatgattctttactataatttgtgttcaattgttttcattcgttgtggtccttgtggaccattatgtgagtgtagattctagggttttctacttcatttctttgtttttatacacgaagatggtagataaactgtgaagtttttcttgtttattttgaggctatagtttttgaaacggatgttgtagcaagaatatataaattaaaaacattcatagatatgataattatcatgtggtccgtaaataactaaagtttggtttgctgaagattctctatattactacaatcaatcaattagctaatgagttttgagaagattttttttgtttttgtt

SEQ ID NO: 20320 - DNA, 720 bp, Arabidopsis thaliana landsberg
caacatgtaaattatgaccaaaattaatattatattagtcttgtttaaaggacattgcaaaagaaaaggaaaaaaaaaaaacgaatgaaagttgagcttttttttcttctttctttctaattcaaagaagagttataagctattaataaattgtaactcttgttgtttcctttttgactaatagtgtagtgttagaccttgttgttaacttggttcgctttcacttcttctctttccttttgctcttcctcttccttgattttcactaaacttgaaacataacagctggagcacacaattgggctagaaaatgttctaacttctccaagatccaattttttcaagcatatattctctccaatgatgtaagcatttttgtaggcttgagattcatctaactcaaaaaccacgaagactttcttctcttcatcaatgaagaaaccgcaaggctcttcataaaactgaaaatcaagaccagtaagtggttctatataaacttttaagaagggcatccacaacaccacattgagctcaatcttagttgtaatccaaatctctatcgcagatgaattcatgcattgatataacaccgagagtttcttttctttaacacaagatagagttctagtattgtcatcatcctcatgatgttgaaatggcagaagaagaacctgtccaaatctctttgctgtaaaacccaaagaatttaagaaatatggg

SEQ ID NO: 20321 - DNA, 1108 bp, Arabidopsis thaliana landsberg
aacaacacagaaaaaagaagaatttagggagtatataaagaggaccttatttgcggagagggaccagccctagccatagcaacaacattttcggcatcgtcttctttgagatagcagattattgtgttgactatcaaaagacatacaataccgagaaatagttgccaactcggtggccttccatcgccgttagcaaacaacatagccatgattgcagctgcttgtataacccaagataaaggcttaaacattaaagcgaagaacctgagtgttatgtgttcctgtttgttaattgaaaccaccataatatagttagtgagtttacttattgtaataagccacaaaagatatgaaagttttagtttaccttcttcttgttttcgagtttgtttggtccaaagatcttgagtctttcttttccttctgctccagataaaccttctctgctgcatcgcaacttcttgaaaacttcttcaattgggattttctcctgcaatataatatgaacatgatctaattatctggtgtacattacactctttgttcctaaatgattgatttttctagaaaaaaaattgtttcaaaaagattgattttataagtttttcatgcaatatttattggttagtattgtcgaactgtaattttcaagaaaaatagttaattatcattggtttagagttatagaaaactgtaaaacacaaaaaataatacatttataattaatatttaatatgtttttttttttaatatgtgtgtttttctaaacaatcaaacaaagacgcataaatacaaggaaaaatgtataaatactaattaactgtttaagccgttgttgtttcaattaattgtcaagttatcgaattttagttgatagattttttaaccaatacgataattagaatttgatttgaccaaaaatctaggctcccataactcactcacattttattgatatgaaaataatattatttaacttttggcttttcagcgtgatttgtaattttaccacccgccaaataattcagcagaaagctaagaaaaaagaagaaaaaaaattgaaaaagagaagtacatataatgaattaatgatgttgttacttattcc

SEQ ID NO: 20322 - DNA, 442 bp, Arabidopsis thaliana landsberg
ggtcgaacgacgactctagaggcatttacggagaggtactcgagaaaccgctcgagtccccttaaatgccacaagtacatcatcataataaagaagggaaacattgtatcattgataaatctcatcatgttcattgattaatgtgaagcactagcatgaagctaaaccaacataatctgacccaaataggtaagcaaggaaacggataacaaaagctagtcaatccttaggtataaactatgtaaatgtggaaagtgaattaaggaatgtataggacataagtgggtcaagggacacttgcctccaccaaccagctgcttctcaaggtcttctcctgcgagttcttcggactcctcaaccagatcgttatttatgcgagtgcaaacatacatccacctctttgaattaggaaataaacagtacaccatacaagggagcagat

SEQ ID NO: 20323 - DNA, 2555 bp, Arabidopsis thaliana landsberg
ggtcgccagggccgaccttcagaggctggggctccactttccacatcatagctgtcgctatcttcagtatctttagacaagccttctagtatctctttagtaatcttcttcgtatttgctttttctattgactcaataaatccagcagtcttctcctcaaggagcttctcctcttcgctcagcttcgtctcagcagcaacttttttgtcttgagacatcttttcttcagaaatggcaaaaatgtgtccttaaaccgaagcttagagaagtctgagaaactaagcaggcgttggtaggcaagagctaaaaagttgagcaaacaaagcaagcggcaagtagcgtaccaaatgtgctcaaggtgagctcttatttatacgccaagcgcgctccaagttggagggccccatctatcattgaatgttgctattctagcaaagggaaggtgttttttcggaccttcggcgtaaagccttcgtccagatcgcaatctaaatttgttattttgaacaaattaatattgcgaggggctactgttgggggccttcgtcttccgaaggtcctcaaaaacaggatttaatagtgtttctggagtataatgtgtgaacaggtatcttcggactcaagtcaggcatcacagtagaccagaataatacgaaggttggtgaagcgccgaaggtgtaagcaggaaagcttcggcgagacagcagcagttgaaaccgacttatagatgaaaaggctatttagacctcgacagattactataggattattatcaagtgtaaagggcattaatgtaatttcgtacgggctgcatcctgtgcctataaatagataaacagtacccccgtactgttcacgctatcctgtaatcgctcacgtgcaacacttggatttttgccttctgtcaagccgaaggtacaaatgtaattaaatatcatatttaaatattcaagtttatataatggtaacatatgaatgatattatgtgtttgttcgtgttatctttcatgttccatatgtttcatctttcattatctcataaccgtgatgatgaaggtacgtccttcatgaccttcgtccgaagatcgttatatcccgaagggacataatgcttcgaaggacgaaggactttaacacttaacactttttatgttgccttgttcttaactcttagcatttgagaacaagtccccaacattggcgcccacctccggtgaactcacttccatttcttgagctttgaataccttcggcgagcgtcaccttcgtcatgccgccgaagaaggcttcaacaacaggagctggcacactgcagtcgctggatcccaatcaggatgttatttctcttagagaagcccgaagccagaaaaggaaggctgtcagtccaacacctccggatgatgatcttgatcaggaaattcaaaatttggagatccttcagcagcaggtgcaacgcaggaaggagaagatggctcgtctagctgatttttagagacagatagatgaagcttctgaagaggttcgtcatcttgttcaagatgatcaaagccgaaggcctccacatagagagcttcatcaggaaggcttccacaatgaggatgactggtatgaagatttccatcatggaaactttgcttttgatgatgcttctcctctttcaacagaattgcaggctacaccatggccacagtcttacaagccaccccagctccccatgtatgacggtcacacagacccgaagcaattcctaatgagctatgaagcaacaatatcttcgtatggtggcaacgctgcagtcatggcaaaatcttttgtcatggccgtcaggaatgttgctcagacctggtattcctcccttcggccaggaacaatcacttcatggcagaagctgaaggatatgttactgaccagctttcaaggattacaaacgaagccggttacagctcaagccctcttccagtgtattcaggatcacgaagaataccttcaggcgtatgtccgaaggttcttacgattgagggcgcacgaccaacggtgcccaatgaaatcgttatcgaagccatgatcaagcggttcggctaggactacggcccaatacttcgccagaaaccccctcagaccgtggagaaattgcttcaaaagatggatgaatacatccgcgctgataatgactttcggcaaagaagggaggaagcttacagattatccgagatgaccaggggcttcggagggagagttcatccaaggcatgtcagatcaatccactccgcccagaatgacgacagaggaagtcaacaacaaaggccacaatattcctcgcaggcttcggggcagcaacaaagctatcctcggcccccagctccaaggggcagagtcgctaggggcttcggtggaaggtttggggatcaacccaggaaaatttattgcctattctgtggtgaggacaagggccatactacaaggatgtgccacgtcaccattcagaaatagaaggagataacagaagctgcagcacaacagaaccagcggaagcatgttatgcacactgcatcgta

SEQ ID NO: 20324 - DNA, 601 bp, Arabidopsis thaliana landsberg
tcaggcgttaaacgccaaaaacttatatgaagactcttgtctcaacattccactgtctgaaatccatctctctggtcgaaaatcttctgcgtcatctccccaaacagatttcatcctgcctaatgaataaatagggattactaccctccaattcttatcaactttatgaccacttggaagcacgtctggctttgccggtgacttgtggttgaatgggactgatgggtatagccttagcgtctcacacacggcaccgtctaggtacacgagcttgtctaaatctgccggatcaaactttggcatcttcttgttaatctcttgtcggatcttggtcattgcttcagggttcttagagagaagccagaaaaaccaagtgagagctgagctggttgtgtctcttgccgctatcacaagacccaaaatagtgtctctgatgaatttatcgctactcggtttcaagtgtttatatttggtcgtgtctatagtcatgtaatatgttaaaacgtccatggcctctccttttgagtcatgaatcccatgatttttgatctcctctcgtttagctgatatgatcttccctagcatttgatcgaaacgtcga

SEQ ID NO: 20325 - DNA, 872 bp, Arabidopsis thaliana landsberg
taaaattttagtgtttgggagtagtaatttgtaactctcaaaaggggcattgaagaatatggaaccagggggttcattaggccaatgtccatcatcagcttgcaatgccgtgaaatatagtattcctcttcttaatgcagtctttgcatcttcatacgttattttttctgcatcctccactatcactcgcggaatcttctgctcaaacttcttctccctaagaaactgtaaagtccacaaaataaaacaaaaagaataaattaaaatactattttctgaaataaagaccaaattgttatgttttacactgtaaaatatttcacctgcatccgccataggagatcggcactagccttgaaccgtgacctgttgttggagaaattccgacgagcctcctcgacctcggcaagttcctccggagagccagcgttggcatcaaactcccaaatctgcctaccaacatagttattggtggtgaacaagtgagtattatctttggccttagcaccaattctcagtctccacattttctatcaatcgttcaagtttattcggaatgaaagaatacgcgataccctatacatataaataagaaagaaactcatgacgatgcatgcatgttgggaaaaactagtgtatctactgtctagttgtttaataactataatttaaataattcccatatcttatcggtatagtattatatcctcatcttgtaaaagttgatattttattttttgaaatcattaataatattttagtaattaccgttacataattaattttaaaagtatatatatgactttctatggtttttatttaatgacttttttatcaaataaatttataaggtaacttaaaaacaaaaaaat

SEQ ID NO: 20326 - DNA, 1147 bp, Arabidopsis thaliana landsberg
ctaatatccatctcagatatgtgaatttcagaattttaacaattatttttgtaaagtagtgaagtacagcaaacatgcaagttaaaattgtattaactgagtcatggaaaaccattacttttaggtttagttagttgaaaaaccatatgtattaatcaaattgtaatttaagttcatatataataaaatagtcatccaacaaaaaaataattttctttaatatttttaatacaattattaatatagttattttgaagtagataaagttacattttgtctttactttattgaaaaattaatcttttgcacaacaacagatattgccatgacctctaagactagcttggcagaagtcaatggtctccggtgttaaaattattataccacaaatctttggttcactttaacacaacaaccaaaaacaaatctttggttcatatacatagcaatgctttaacaatgctcataactcttgaattattttgctacatataacatgataatgaatgtctatttaaagtgcaatatcagtctaagacgtacttctacagtcatagacaatatcttccgtttcgtacaagcaggatccgattattgggtggaatgccttgtgattggggttatcaacccacccttagtacagaaatgggtactaacttccaatttgggttgaaacagagagggtttagggatgatgttcatcagagacccgcacttgggtctccggagtttgctgctacaactccaatttctttgttggagtttgcttcttcttccgggaaagcaactgagtcaccatttaagctgtcaacaatctcgtcaatcttcttaaactggtatggccacttgctgttgtacagaaactgcctcagatcgaatctgttgtcctctggggagtaactctgcaacaaaaagacaaatgagtttttttgttctctctctcaagacagattcaaacatgtttcaaataagcaagtacctcagcgtgataagacggtgtgaggacagtcattttgtgtcgattgatcggataatatttgaagaaatacttccctttttcagctacttctggtgggaataaaaaatttccccccctgtaacataaaatctgcagaatcacagacaggcttcagtttcactgcatcat

SEQ ID NO: 20327 - DNA, 673 bp, Arabidopsis thaliana landsberg
caaacaacgaattaaaacgtaacaaaaagataaacgaaattgatagcagagtaacttcacaaaatcggttacctgagagtcttcttcgtcagaggattccaacaatgatttctctttccctttcttagacaaattatggaacttttcatctacaaagttaagaatgagacatactcatcaagtcgctacaatgttctgtctagagaaagtcttaatctttaaggttactactaaccaaaagacatatccggaagaggcaatttacgtctaaccgttgaagcaaaggcaagagaacgtataaacggtgaaaatgctaaaggtttatactttgacaatcttcttctccctgatggccttctaggcatctattcaatacttcaattcgaaaactaaacaaaatttcaggctaattcaccaaaacctatgcaaagtatgaattgaggatagtaatcttacttcataagagaacagagtatgaatagcaaaactgattcactagactagttctacgacaatcgaaattacttaactttaaaattggtttggaattgaaaagctgacaaaattggactgagttagaagagcgtatttgcttctcgtgaaacttaccgacggtggagcgaagtgaaacaccggttagagagaatcgacggcgactgaggagagacgagag

SEQ ID NO: 20328 - DNA, 1638 bp, Arabidopsis thaliana landsberg
ggctaaaagattctttgtggtggtcccatggtgctcttcaagtacaaacaccttacctgcatcaagatccaatttaaaattagtacactagagagagatttagaaagaaattagacacaatcataggaacaaaacagaatcatacgttttgccaattcttcttcaagagcgagacgaggaagttaacactcatctgcacattctggaagagctgcttctcttccatggaaaggttaccaacagcaacacccatacacagaactttcttcaactggaacttcactgttgctttggtctcattcacctttgcttccaatgactcttggtgactcacaagtgttgggaactttcctgttcatcaatcaaacaagtagaaacctcagacatagagcttgaaaacgaaactaaatgatgaccatataatataccaagtatcaaagttattgaagaaactcgcctgccttgttaagaccaggaccaagaagacgaggaatctgcttaatgacagactcagaagccaagaaagcatggtaagacttagcaagcttcttaacaagcttcttgttcttgttaagctttttcaaagcctcaacatccatgttactaagtcccattttctctgcctatcaaaacaaacatcaaacactttgtgtcaatcaccaattcaaaccaaacaagatacacaaaaagtatagagatttcaatcacctcctcaacatgctgagcatctccaagcatacagatcttcatttttgggcgaggaatatgtgggagcttcacagatccactgaaacgcttatccttttgtgggtcatagttcttcagaccaatctgaagctccactgtctcaacaaagttacgcttcttctcctcagattttcccttgatagtcgttatggcttctctaacagcctcactctgaagcttactatataacaaaaacaaacccatttcaccaaatcaggtaaagcaatctactttaccattcatttgaaatgatatgattctgttgagcaattactctccaagctatcaatctaaaggcaacactaattctaaagcaagtgaacatagatcaatatggagattgaaagaagcgtaaaggaatgatttttttcacagtacctcatattgagtgtcttctcaggtcacgaatctctgatcctgaaaacaataagagatcgattagaaaaagaaaaaaaaaaacctcattttcgattgtgacatagaattcagattaagcaggagaaatcgaaaaacttcatggaatttcgatgaacgaagaagacgaaatgagaagtgacgatgtttgtggagatagacaaacctgaatggtgaagaaagcggaagccctagttatgtttcagaggcggctgaagattttatatcaaggaagaagaaaaatggaaggaagagtctaaaaccctaggggaattgatttcgtttcatgggcttttgttatattagtgggccgcttgtgatcattactaaaaaagcccatcttctacattgtggtattttgaaaaggtttatttaagtatgttaagatttttttttttattttttttttaaatttttttttttttttgggaattagtgtgtgttcggattggactactcttaagcaaagtgaacaca

SEQ ID NO: 20329 - DNA, 687 bp, Arabidopsis thaliana landsberg
  unsure (1)..(687): unsure at all n locations
atgtcttttcttattgttcttgtgcaacaatgccttctcatgtttgtcttttttaaaaatacctctttttcagtgggaaaggactaaattatcattttttgatgagtgaatataatgaaaaagtcaaatctattttggcaccaaaatttttcaggtttttcaaaatttccggccaaaaatatttggtcaaataatttccagccaaatttttttctaacagtagaaaaagtcgtccaaaatttttccgcaaaaaaaaacaggcagaatttgaatttaaaatcctttcacattttttaaatacttataaaatccttttaaaacacttgtaaatcctttttgatctcttataaaatctttgtaaattattttaaagtcttttaaaaactttgtaatatctttaaaaacacttgtaaatatttttaaagccttttaaaacacttgtaaatcctttaaaaactttttaaaaacctttataaatattttaaaactcttgtcaatcttttaaaaatcctttaagttttttcttaaatgtctctccctgcaagaaaaaagattttgagggaatttttttgtctaaaaaaaatgtgactgaaaaattattgtcggaaagtttttggcgggaaaatntattctttcattttggtgacttaaatatttttcaaataaagaccaaatagtcattaataa

SEQ ID NO: 20330 - DNA, 685 bp, Arabidopsis thaliana landsberg
  unsure (1)..(685): unsure at all n locations
aatattttgaagacagcagatagtaatctgctgtatacaaatgattagcagatcganttcggtaacaccacgagccaaggcattacttatccaaccatccactcggtggaatcaaagccagttctcaacttgagggagagtttcttaatgggagaattaccctgcaaagccaatactctatcaacaaatttcatgaagctcttttgaatttcgtacctatcctccttaccctcttggggatggagaacgacagagtcatcaatatcaagattaggtacaaacgtaaacagattgcgccatcttttgctgaaaatcgaagtcaatgcagcttcctttgtggtaaggaaggacaatatatgataaagaacctcgtctggcagactgcttacatgatccatcttctatgcactgtgcacagcacgagacgaagagagttaatattattaacaacacgattacctaagagagaaaggtttgatacacaattcacaaaatcacaacacaaatataaactttgtgattttacgagtaaatccaagacccgaatttaggggtttcagtgagaagagagaacgatttgcaaatacttcgtagaaaccgaaacatgaaaaacgatactagggctcttcttaggtcaagtcaagctgtcccggtttaacgaatattaaccgggtactttaatgaa

SEQ ID NO: 20331 - DNA, 2324 bp, Arabidopsis thaliana landsberg
  unsure (1)..(2324): unsure at all n locations
cccaatacctaaaatattaataaaactttattggatttggggttgagttttttatatattatgcttacatgtaggcttgtatggggctcattcatgagcggacccacgttggtcttgggtggggcatgtgtcctatgggaacagataaaggatgcccccggtgtggcgagtcagaagagacaataaatcacctcctcttttattgtccaccctcgagacaaatttgggcactatcgcccattcctttctcaggaaatatttttcctagaaactctctattctataattttgattttctcttcttgcgtggacgagaattcggaataggagaagatatcttggaactctttccttggatactttggtacatatggaaaagcagaaaccgctttgtttttgaaaacttcagtgaacctccccctgaaactttgacattgactctccacgaagcagcggtttggaaacaggctaccttaaaagaaaaagaaaccctattttctacccctgttctgggtccgactccggctccggacaccttgttctctgaatgccaagtcgatgcgttttggcatgttgaagatcctttaagcgggcatggatgggtccttgttcgacaagaattaattatccatcttggtctcaagagcgcgcaacggagtctatcaccgctacatgcggaatttgattccttgttatgggcaatggaatgcatgatctctattggcgatacatctggtacttttgcttctggttgctcagatttgatttctattctggacaaccaaaagaattggctgactttcgcagcagaattggcctcctatcgatcattagtttgtttttttttccttatttttgtattagatttcttcctcgtagatctaatacccatgcaaattgtttagctaaaaaaggtagggcatgtaattgtcttttttcccatgtaagcacatcggttactgaatgactctctctagcggagagtatctttccaataaattaatataaatggtgtttgtgcaaaaaaaaaaaaaaaaaaagacagtggaaaaacatgagaatgtttggacataaattgaaaatgttaatgagaaatagaaaatgaaagccggcaataactaggggtctaaatttataagtcaagtattctagtctagtaacagtcaaggaaagattgatttcaatttattagaaaatgcaagttgtagcttataccaaaggcatataagatctatacaaaatatttgagaaattgttaaaaatgcttacaaactcgagcttttatgagattatggatattatgaagttttaactactttcaatatatgagagctttccccaaatattgggaatgaagagttgctagatttgagaacatgttcttttaactcaaagggattaatctgggtaggcatggtcgttcggctatttgattccattcggtttggttgttttggttttcttttttttttgttctaaaaggaaccaaaggttttttggtttggttcaattcgattcggttacctgtcggtttagatatttagaaaaagaaccgatttttatccgaaatacctaaaaataaccaaaatacacaaatatccgaatttttttttgacaaagatgtagtgggccaaaatatattgggccaaaatacctaaaatattaataaaactttattggattaggggttgagataaaaatatattatgcttacatgtaggcttgtatggggctcattcatgagcggacccacgttggtcttgggtnnnnnnnnnnnnnnnnnnnnnnnnnnnnnnnnngtgcttttttacttaatgatgctccacattaacccaagttcaagccttactattgtctttttattgattttttttttattatatcctatatagaataatttccttgattcgccactggactcactaaatatttttttgttctattcgaatatccatggatatcgatttggttcgattgttacccgatatccaatatacagtgtgactgaggtctattgagatacttagtggtatccataatcaaaccaaaatctctttttcggtttggtttttccaggtttttttgcctagacgagagagtagagttggaagcaaaagaagcggcaaaacaatggagaagtgtaaggctttgaccgcgttattttatcgacgaaccacttctcttaatacaaacataaatatctcattggctgatgtcttaagctgaaatcaaagtcatttgaagagaccttttcctgactaaagaaagctacattttattgaagtctctattttaacttttagcagtcccaagtgttaatcatg

SEQ ID NO: 20332 - DNA, 584 bp, Arabidopsis thaliana landsberg
  unsure (1)..(584): unsure at all n locations
acgggcgtgtcgtcttcatgccagtgaggagagggctctcctgccgcttcaggaggggacgcgagcctgcagcngattttactgctgcttccgctcgtttgctgctgcaattactgccggcccacttttggccatatcaaccgccgtgcctcctcccgcggctgactgacccgtgatctttgcactccgttggcactgttgggtcacgtgcagggctgcctcgagtcgcggcactggttccgcaatcgagaagacacgacattggcgcgagtggcgatgcagtttccttgcacgcagtaactgtcgcgtcgggtgcatgacatgcgggcctgggccttcacgctgacccaccggatgcgatgaagccgaaagggtgcacaaccgtggtgcggttgcacgcctcttgcatagcggcctgccctttcgcccgttggtttcggcgaggatgggggaacgcttataaccgcaggcggttacctgcttcgcgtgcaacggtttggcttcttctgtttccggtctgctcgcatgacgtgtgggacccagccccgcgtcggagggtgggaacctggagctcgtcggtggag

SEQ ID NO: 20333 - DNA, 524 bp, Arabidopsis thaliana landsberg
ctttaccttatactgtctttgtaaatctttgatgtaatccacagttttatccaacatatccgaagtgttggtttgctgttaaaacataaagaaaacaacatcatttaacaatttgtttatgatcaaaagtcattacaaggaagttcctgaatactgtaccttgtccatgttaggaacaagctcttgtaacttcctcattcgctcgcttatccgcgttcttcttacctgacacaattgacaagatttcttaggaaaggctttctgaaaacaaactagattctgcttcaaatggacttccattgatatatgtaaagatggccttaactaggtgaagttacccgttcagcgatgcttcgaggatgtgtagcgcaaccacgtttggctctgattttacaaggaacagaatcttgtagctgaagatacttatccactgaaaccatgtccgaggctgtcgatgatgactttggtaggcttaaatgatgcgacagtaactgcatacgattcccggactcttcgttctgtag

SEQ ID NO: 20334 - DNA, 511 bp, Arabidopsis thaliana landsberg
acacatgctccctataaaatttcagctatgcttagtattggcattattataccattgttgtcactcccaaatggcctcccgttccagaattttgcaagaggaaatgcttatatttcatgtttgatctgttttcttaggacaaaactcacttggaaagttgaatcttgatctgttacttgtctacttggttctttcacaggtactggacttgcttgaaaatgcttgtgagtctttgctggacagtatccgtgtggaaagttgatgatacaacaagttcagagtcccacttttattgttactattattgagatttgagattgatagctttgcacataaaactgagagttctataattctatcactacatttctagaaatcttgataatgtttttaaaccttgttaaccatatgctagaagtatcaaagagtgcggcaatctttacacggttgaatattattatttggagagaaaattattatttggagagaaaattattatttggagagaaag

SEQ ID NO: 20335 - DNA, 464 bp, Arabidopsis thaliana landsberg
atgttcctttttatgctctaaccataataatcccagttttaaacgtgatggtgggaatattcccgctattcatacagtatctcaatattcccggtagaaggaaatttagatttgtctttcatggtaaaagagaaagataattgttaatgtatccatatgaatccatccacaatataactgtattaattcgtttgtctgattggataattcattatccgtggatgacatttatattaagttgtcacgtatttgtaaacataattagctagaatgatttaccaaatcaacaatagttcaaaatactcaaaattatttattttttcttcgcattgagttaacattttgagtattttgaactattgttgagtattttgagtatacagcaattttagaggtaagattatcaatatggtaaagaacagcaaaaaacatatttatagaattcagagttataagcattcaaa

SEQ ID NO: 20336 - DNA, 492 bp, Arabidopsis thaliana landsberg
ggaaacggcgattggagttagattttttcgtttagggtgaacagacgttagctgtttagagcttacgcatatcccagagttgctctgctgatgagtccaagaagtaatgaaccttgaaataacatgctgggaacctggaccaggtcgttagctgcatctggttctgtagataggaacagaccaacagcaaacatggaaactgagagtgcagctccagcaaatggaccagctagcgaaatgtcaacttttgtactccggtcaggaagaatcgacttaaactgtacaaatcaaataaaatgatttactaacgctactacactagccaatactctcgttatcgaatcacttcattagaggaagacgaatgcattgagaaagagaagtaaatggatgcattttgaaccatagtagcgtaaaaagaatgtcttcttttagatgtgacttacttagagttcaacaggagataagttccctttacttaaaagaaatgag

SEQ ID NO: 20337 - DNA, 582 bp, Arabidopsis thaliana landsberg
  unsure (1)..(582): unsure at all n locations
tataaaacgcactctttgattctgtcaggagagaagctttatgaatattttctataaccaaaatatctaaaagactagctggtattttatagaagattttatgaacgacaaaatcaaagaatatgtaacaacaagaaagacatgctcacccactcaattgtatattttattggttttaaagaattttgttttaaataagagcaaaagtaaaacaactcgacccatttttaaaaaaaaaatataattaaatatttccataaatatctaattaaaccaaccaataaaataacaattaaaccgcatatcaaaaatactattttatgaataaataaataattcgaccaacaaaaccaagaataactaacaatcctaaccgggttccaataaccaaaaacaccaaaaataaaacaaacgagttcctagatcattctctcttccttgccatgattccacgatcacactttatctttacctgcatcaacaacacaatgagatgcgtaagtattatcataaatacttagtgaggcgatcctnccatctacgagctatacacacaagcaaataaaaatgtataatcacgaa

SEQ ID NO: 20338 - DNA, 1996 bp, Arabidopsis thaliana landsberg
aatatatatatataaagaatggtcaatttatcatggtatagtacaggaatgagtctagaaggatcttgaatgttggcttgtttgatgagacccagcaatgaaagcctggtgggtatagttgtggaacttaggtatggaatctagaatgttgtgtaagcttgtaaagaagtacatgttggttaagatttaattagacttattaggcatatggacttagtttgaatgatcacggcatatgggctagagaatgttgggagttcctttgttttcaaaacctcttccacgggttcggcttttgtgttttgcttgagggcaagcaaaagctaagtctggggagttgatataacacaattttcaccgattttatctatgttttaggtatcggattttgagtctttatgttatttctcgagtctttttagtgtcttttcaagtattctatgcaatgggacaacaatggagatgaggagacattttggagcaaaaactaagaaaaaggaagctaaggaagattttcagttccagattaagaggagtgtcgatcgacacactactagtctcgatcgacacactactagtctcgattgacactagtttcggcccagcaaagtcccagatgctttcaagtttacagaagaggaaatttgccccagaagacttctctatttacattattaatccttagatgttttatagggtttatatacattgtttaaacctaagttttgtttatcaagtttttatcaagctttttgcaaaccctgtttaagagagacataacctattcatcgattgttgtcagagattgattcagttcctaatacaatgaagagatcccttctttcccttaatctgtttgttgtgtttatgctttcatactcaataatgttgtttgctttaatcaatatgtctgagtaaactgctcgttaggaatagggtttctcattatgttatccatatggttagtagtcgccccctctgctaggttatctctagaattcttcatctttattatgtttaatgctagatctagagtaattaactaggtcttgaatccagacaatagatatgcccaccataggtatctgtagttggatctattatttgatgagcttggtttataggtatgtagtaagaatcggcctatctacttaggttaataatctctcggcttctctggttattcttagctatagaaatagggaatttcgcggaacaccacaggttcttccataattagagtttgagtttaagaatggtttgataacaacctagctttcattagatctactaaccaatagtttcctgagaataccctgttcctagccttttatttaatcgtttacacacaatctatcttctattttcttactttgttctcattttatttcattcatgccctgctagcttaatcttgacattgaactcatcgtttgaataaaagaattttggggaaatcgatccttaaatactgcaattgatctcttatttgagtgagtagttcttagggtaatttgaaccgtatcaatagcattagcagtagtatagtccttaagattttgaactgcttttcctggaagttgttgaggatgcttcagagcagaggtcgatacgaactgactctccacatacttgactttggaattcagagcttcaaacttgacatttagatcgttgtaagaacaatttatcttgttgtttagttcagctatcttcttgtcaaaagtcataccgctggcagcttgtccttgaatgatttgttgaataagttgcttaatttcaggatcctgtggtgctggggcttgttgtggttgttgagtgaacctggtggtggattctgctgttggtatccccattgaactgttgttttgggacataaccttggttatactgaacaaatggcttagactgattctgttgtggtggataccttgatcttgtagttgttgtacccttgttgaccctcttggttttgatatacagactcttcagttga

SEQ ID NO: 20339 - DNA, 298 bp, Arabidopsis thaliana landsberg
ttctgggttttgcttgaaatgtgatttgggtttctggtttgatctcatagggttcgagtagtgtcaaaagagaagtgtgagagatgctgacgtgtatagcttgcacgaagcagcttaacaccaacaatggcggatctactcgagaagaagatgaagaacacggagttattggtacccctaggactaagcaagcgattaaatcactgacgtcacaggtagattaatctttctgctgagtcactttcatggattgttttggtcgcaagtgaaaatggcgggaccattctagatacggtgt

SEQ ID NO: 20340 - DNA, 1461 bp, Arabidopsis thaliana landsberg
cccgaaaccgttttactttaaaaagatattgtactcaaaattaatattgaaagtcttcataaaatgtttcatgagagaccagaaaatttcatatcttacataatattattgcaaaacacatttgagggaactaaaaattcagaaaatacaaataaataattaacttaaatggagatcgaactcattacacatcgaaaacgatatatagaacaaaaacatattagtgttgcacaaaaaaaaacatattaaaaactgaaaaacaacaaccatgaaatgacatttgcaaaagtgaattaaagataaatataagcaatatgacatttaaccactataaaatgacgtttctaatacaagtagggaacactggacttctcttattcttttatagtattactagtacaatatgataataattacagtttacttctccacaagttttaagtcattacgtatgtagtttacatgagacggcatgcattaacgttatcgtcattgaacatattactaaccctgtcgtctccacgagaacctacggggatattaccatgttgttctgtaccattgtagccatgtctataatagttatagctctctttaaactctttcgaaggatctacgaaatagttttgagtagatgtgaagtaaagtggaggttcagggtatggcgtatactcagctctcttccccgctcgcctcacggctttgagtactttgtttctgtcaacataacccaccactctcactcttcctaactctctatccacctccactgagtcaactcctaaaatttaatcaaattcattacatctagtctcttttttcgttcattacactaatcttgtctttaaattttaaagcaaagcaattagttgttacctcggagtttggagatcgcgttcctaacgatcctgacgcaaccagtacaacacattcttaccttcagctcaaccgtctagtagtccacgagccacgaatgtcaaactcaaaaactttagttttcttatgagaactttggatataaataaaaaaaatagtatggtatatactattatcaaaatgatcattagtaaattattagcacattgaaaactagatgattgtgtaggaattgacatttaaatcgagataatttaatcatggctagtgtaaaagggaaggtagagaaatatgtggaaggattccaagtgtggttcgcatcgatataacaccaaggatataaaactttattctatatgctaagaaaattttgcattcacatgtataaacgtttattttttctttgaatataacttaacattaaattcaaaaaaaataaaatataaaccaatcggttctgcaaatatcagcttttcaaatgtcattaattggaaagcttgactattaatggtatagtccatcaatgattcgtttatcaaaagaatttaatctgttttgctaatcataaaatccctttgttttttg

SEQ ID NO: 20341 - DNA, 2832 bp, Arabidopsis thaliana landsberg
aagtcacactccacaattacgtattttgtcataatcagaagatatctttaaaaaacatctagctacgacgacacataacctattttaataaaattaattagaaaaatatttaccatcattatccgaccaactacaaacattataaaatatcaggtatataacaaaaacttttacgtaatacgttatagaaaaacacagaatattatttttcttctatgcccttcatactttaagctgtataatctaaaaattttaaaaacaaaaaatgatcactaatctaaactgttttttcataatgattgtccctcgcgccattttctgtctccgtcacattcttaaaacatgtcccacttgccagtcttgctgcccccaaggaatcatgtccccaccatttccttttcacgcgccgcctctcttttttcttccccggcgcgtgaacacaacccaccgcgttctctttggattggcctattcatgaagtaaaaccgttaaccggagtcaagtaaacctggctttgtatcacattctcgccgattttaaacccgggaacaaccgtgaacccgacccgaatatctgaattatcaccggagaataatgactcatcgccggatttcacactctccatatatacttgagagaatctacaacctcgtttgagctgaaacaccgtgacgtttccgcttaatgaaaacgctaagcagtgtaaaagccagatccgttttgccatttcacaaaacgtcgcgaagaaacccgagtccggaaacccacccgagttaaccagcttcctctggttcaagttcccgaagaaagaacactccatcttcgcatgtacaacgctcaagtacttatgaaccacgaacctggcaaaagacgaacccgggttccgggtcaagtactgaatcgggtcaacggatctcaacttttcgaattcctcacgtctcgagaaatcaggagctccaaaattctcaaacattttcccacaaacaaacgattcaaacgcgaaacaacggtgactcggcctcgcgaaaacggtggaagcgtttttaacgttcaccgaaacagcggcggaagcggcggcgtctagatcccagctcgctgattccatctccttcacaatcaatttcacgaagcttctcacagatctcaacgtaaaacctaaaacctgaacaaaactactcaaattcaaatttcgaatttcaatattatcaaacacagagaccgatccactcgctgagagtttcttctccaacgatttattcacaaccaaactctcttcaaaactcatcttcaattcatcgatcttcaattgcttctccgtaacttcaaactcgagtttcttaatcgtgatttcataagtcctcatcaaactctgttgctcctggatctcagctaacataatcgcaacttgcggagacagattcaattccttcctgagaaaactccgtttaagctccgataaagctctaagctcttcgaccaccgccgtatccgccgcttgtatagcgtcgttatcgtacggacgttgcgccatctgaagctctgcgtaagcagctttaatggaagtcgtactagcgaagatcttcgcaaccacagcttgtaaaacagctctattacgctctcgcactttgatctctccgcttctgctactggaagtactctttaaatcgaaaacagagtctccgtcgtcgtcttcgtcgtcgaaatttggattttgggactttaacatacagattccgattccgttgttggaggagaccttcgtcgacgttgttcttaggttacatactttctggaatgttctcgctaacttgctttttcttctcactgatggattcttcttcaatgtctccattgagatgttgtgaaaggaaaaaaaaacagagagattcagtagttttttttttttttttctgacaaggagaagtttttttggtgagtctgaaacagcaaaaaagaagaaaggagtgaaggaatgatttcaaataacaaatattaataaaatgaggcaaagcgtgaaagcgtgggaaagatgatagatagaagaaaaagagaaggtcgatcgtattttgttctctttttcttttgaatactttatatataactatattgtttgtttttttaatatacgtttgtatattaatttatttagcataatgtggttgaatagtaagacacttaattgaataacattcatgtgtagcagtgtgagtaagcttctttcacaaggattttaaattgagaaaatttgtggtcgggtagagtttgtcggagattaatggggttaattataagcacttatacgtaattatgtctagatttattttactttttattatactaaggtgatcaatgatcataatttgtttttattctatatatatatatatatatattctcatatatatgtaaaaataattgaagaaataaatatttcgaagataaggtaccttttttgaagtgagtgaacatactgtaacattcagttagataaaaaagagaaacaatgttagaaaatgggtttcttgattaagagtttagatgtaaaatactaaagttaccaagcaataagtgaataactaatggttcaataacatagtcttcattatcaagacgtaatcaattgggtaaggtcttcctttccgcttacctaatagactcaatacttttagcaatttgattttgcaacttgattatgagatgtggaaagaaagaactcaaaatgcatcaaatgatttttaagccatattgatccaacatatccataaaacgattcacaacaagtttggatcgatcctcctttagctaatcccatactctcatattgcatgcttg

SEQ ID NO: 20342 - DNA, 881 bp, Arabidopsis thaliana landsberg
ttcagtgttttaactcttagatcatattacaatatcggtatattgttactttctcaactacttaaatattaatgaaatatttactcagatgttatagaaaagttggaatattgttagaatatcattcattttctaaaaattactcatatgttttgtgctattgtgtcattacaattaacactcttgataattttcttaattatgattcttttaattaaaaaataattaacaataattatgataatccatgtcattaagagaaaaaaaacaagtcacgtcattaacgacattaggaggaacgtttcgatttcccttcctgttattgttttgctgcaaatttacctgtcacgattgagttataatgcttcacggctgagttataatgcttgacggaagatgaaaggtcgcataaatctacatattacggttgagttattacgaatagacatatttttcggagccttgttggagaacatgtagctcatctttaactaatggctcacttcattcaatccgtagtcatcgagcaccaacttcacaagcttgtcatgtgttgttttcgcatctatttgcataactctacaccctctattgtagatgttaaatacaaattctttacccaattatcagaaacaacaattaccggaaccggattaaccataccgggagaaggatgaaagaaaatgaagaagaatgaggaagacgataacgaaatggaagttccggtgatgtgaaaaattcaggtgagaagacgagttgaaaaaaagatgtttcatatttcatttgatgatgatgacgtggaatgttgcattcaacgttattttttatttgatgaaatggcaagtagccaccaaaataacatgaaactttgcctaataata

SEQ ID NO: 20343 - DNA, 579 bp, Arabidopsis thaliana landsberg
tcatctggcagggcgatccatgtgtccctaaacagactttgtggactggcttaagctgcaacgtaattgatgtgtccacaccaccaagaatcgtgaaattgtgagagcatttattctaactcaatgttgttagcaaatcttaagccctgaaatgtatctgatgtgatatgtcttggatcttccaaacagagatttgtcttcaagtggattaaatggagttataccacctagcatacaaaatctaactcaacttcaagaactgtacgtatctctataacaaaatgaagatgtattcaaaacacttgttaacaattttttgttgcaacagggacctgtcccaaaacaacttgactggtaaagtgcctgaatttctagccaagatgaaatatttgttggtcatgtaagttgttgaaagcaaaataagccatttttatcataatgttttacatttactaactagatgatcgactgatttgtctatatattcacagaaacttaagtggaaacaaacttagcggtttggttcctcaagcccttcttgatagaaaaaaggaaggattaaagctattgtaagatttc

SEQ ID NO: 20344 - DNA, 1637 bp, Arabidopsis thaliana landsberg
cataaataaataagaatgtacgtatttcccccaatctaattctttaattagtcaatgagaatatccgttaattatccgttattatctctctcgtcccaaatctctggagactcttttgacttatgataacctttcttgccctgactgtcgtacatacataagtcaatttagcttttgttatcttcggtgagaattaaaaagacaaaaaaaaacgctccaaaacctatttactagggtacattttttaccaaatcttaagttcgacgcaagatcatgtgtttacggtttacccaccaagcaaccgctgaacacgagattgtcacaaacgtaatgataatcgtccaacctctccagcccatagagtccgtgtggttttcgccgtgtgttgtgaagtgatacggtgccgatacacggtggatagccacaacatcgtcgacatagacattaggttgaaaaattcgacatcttctggtatttaatatgacgattaaaaaaagagaaataagtctatttatccttggaattattaatgacgctttttaatttatttttcaaactaataaaactatgaataatagcatcagaaatcataaaaaaaaaacatgtaactttattgcttatgagtcaatcaaagtatatatttatttatgttgtagcttttcaatattattaatcatgtttgttttcatgttttttatttttacatcagtaacatattttcatgccattaaaattttataacataagataattttattttataatattcaaatttccaatttcatctttagtcttaagtcttaacatgtcaatttttgtattaaaaaaaaaaacatgtcaattttttgtacaaaaaaaaaaccatgtcagtttaggaggaaaaaaaactggaaaagcctgacaaagaaaaaaaaaccatgtcagttaagggttggattgatattttaccataaagatatttaaacaagaaattattgagatttcatataggtaactaaactttggtaaattttaatgaaaaacattatgtaaactatagtgatattgaaacattttactttaccacaatctataaacttatctagtaacatctcatttaacaatattgattatgatggatgtttaatttacatatctttaattaatttcaaattttacatttctctatataattcattatattttaattggtttttagtaattcacttaacatagtgatgtagaaacagttatttgattacaattcaatggactttcaactcctactttttttatattataatttttgttttcttttttacccatccccgcattttccttcgttatatatatatatataaaaaaatctactgaaatttggaaaacaaatgtgaatgttagtagttgctgtggatgggggtaaaacacatcaaatatatgtgttttatccaaattcacaaacattactaagtgcgtttaattatattttcggatttgctatctatgggagaggtgaacatactctggaaatatgatatatgtagcattgtagcaataaaattacttcaaaaagttttaactactttttgacaaattaatagtgaacatactctgatttgctaatttctcttaactactttatcgacaaattaataatt

SEQ ID NO: 20345 - DNA, 703 bp, Arabidopsis thaliana landsberg
  unsure (1)..(703): unsure at all n locations
aaaaaaaaaatttcnaggganattataatggatatgctcagaagaacaagaaattaagaatctatgcttgaagtttctttatttagttctctctcatctcactcaacttaataccaaaaatatcctccactcgcgttaacaataaattantcagataagcggtttaganaactatcaatgatgattgtgagaaatgaggaggtaaaagtgacaccgtcaatgatgatttcatgtcacgtgtggtggactggtggggtaatggtaataccaacatcgatgatttcacaagcagtggtggcgttggtcagaaaattacgttagatagagacagtgatgaaatggtggattggtggtggtgatgatgataccaacatcgatgatttcacaagcagtggtggcgttaggtcggaaaactacgttagattgagatggagatggaagagttaatgattgaagattagacactggcggcggaaaaacataattatgttgttttctagatttaccttgttggtgaaaagaattagaataaagcatgtttttgttattattatcatgttaacattgttatacacgttaatataaatattatctatatatcacatttcttagcataaatattatcaatggtaatataaatattatcataccaattataaagttatcacgatacaatatgatttcacatcatatatttgtaaat

SEQ ID NO: 20346 - DNA, 665 bp, Arabidopsis thaliana landsberg
ggattaacgtcgtggacaaacaaaatgatctcaaggttgagtgtacaccaagcgtccatgtagtagatatatatttaacagagcatatacacatttaaagttgaagtagaggaggtgacttcgatggagcttgtctttgagttccgaacaagcaatttcaagtggtatattagagaatgcgggctactccaaatcttagaggtcccttcatattcatgatgaaagcttctagatggcatcaatgggggaggtattgaaattctctgccattttcatcttgtgttgaacttgtgtatgatacaaaaaattagttgaaattaatgttggcttatgtttaattgaaattagttgcagataaggaaaaaaaatacaaacaaagatagagacgaggagaagtcatgagtagaatctgaaaatccatggttatgtttttgaaaagagaacatagagagtcagcttcatgtctgaaacatgagtaccgtttctttctctgattttttttttcttaaaataataatatttgagcagattcttattgactaatatgctgtgataattgattgcactaaaaaaaatgtaagtcttgtcgccgcccccacataacaagcagcagagtcttaactcaaaataaaaccatgcaaccaaagtacataaaagcatacttg

SEQ ID NO: 20347 - DNA, 1219 bp, Arabidopsis thaliana landsberg
aaagtctactagaaatttattggtaccagttccatcttcctatactcctttcccaccaaatttaatatgcgcagaggttggctcagaaatttacacgctcggcagccatatatatcatgcgatgtgggtccataatgagctgactggcaacggtcgtaaagcccctagcatgatggtgggtcgcatggaaccccatgtatgcgttctcggtgagaaaatatatgtaatgggagggttgtcgaccagatgaatctaagtattgggctgaggtattcgacccaaagactcaaacttggaaacctttaactgacccgggggccgagttacgcgtatcttcaattataggtatggcggtgagcgaaggaaagatttatgttaagaacagctatgtgaaggactacgtttatgatccggaagaagataaatgggacgtagttgcaagctcattcatgattgagagaaagtgtgagatagagaatgtattgtaccgttttagtagacaaagttgttcgtggtatgacacaaagcataaagaatggagagatatcaagggtttggctacattgaataggcgtcgtcgttctagtattcttgaagtagcgaagtacggtgacaaactcttaatcttgtgggaaaactttgcgaagcctttttatcaaaacaagagtatttggtgtgcggtggttgcgcttgaaaagcgtaaaattgatgaaatttggggaaaggttaagtgggctagtattgtgcttacggttcctagatcatatgttttcttgcgttgtgaagtgaaaccggtttgataaattctagagatcatgcttttgattttagtcttttgtgcatcgccaatgggttgtttcagtcattctctttaaaccatctctcagttttttttttttttttttaattttcttttatcattttatttttattttattttatcatttatctatttatcatttgttacatcatcattagaaatatgttgatttaatcatgatataaaagtataaagtatgaacgatcgtcggtaatttaaaataataatattatgttcaaatttaaattgttgacaaaatcaataggtaatatcaccaaagtaatgccaatagacatcaagaatactagccaacaggatagccaaatagactatttatacctatgtaagtatgtaacttatctattgctttcttttaaaaaaatatctgtttgcaattta

SEQ ID NO: 20348 - DNA, 493 bp, Arabidopsis thaliana landsberg
catcttcacctcttgctctctactcttatccacaagtctcttcagaaactctcctccaaggatggaccttttctccatctccgcatctttaacatccgcttcatcctcgtctgctcggactcactggcctatgagatcttcagggatcacgacgtgaacgtctcctctcgcggtgttggagcgatcgatgagtccctggcgttcggatcttctggtttcatacaggctccctatggagattactggaaattcatgaagaagctcatcgcaactaagttgctgggaccccaaccactggtgcggacacaggattttcgttctgaagagctagagaggttctacaaaaggctgttcgataaggccatgaagaaggaaagcgttctgattcataaggaagcgtccagattcgttaacaatagcctttacaagatgtgcacgggaaggagcttttcagtggagaataatgaagtggagagaaaaatggaacttactg

SEQ ID NO: 20349 - DNA, 1487 bp, Arabidopsis thaliana landsberg
tggctcttggagttatttcagggacatagtcttcatccccaccaagatcttcatccacgaggcttctctcttccgccatggctctcttacctcttgcaatctccgctcttctcctatcacgagctaggaccttggcggcttgttgactgaaccgcatgtattcttccatctccctctcaagcctagtagatcaagattctgcctcatccacgttgaagtcggcgtccatggaagattcgttgttgttcaaactcatggtgaaactaaactcttagaaatcaaaactaaagcttagtagctaaaaaacacttgcagttttgatcgagtaaaataggggggggggagtgattttttgaagaaaactgaaaactgaaatgttggagatgatttgaagcaaaaatcgaatgagagagatgatagttaggtgcgcacaaagaagaaagtgagagagagtgatatcttatctttggtttcgatttgaatgagtggaggagaatggtctcccatgctttgatgggataagaaagtttgaccgaatactatttgagcatgatgggtaaaggctttgtccaccgagtaatagagtgatggagaaacaagtgggccactcgatcaccatgcttgatcgtctagtcactatactcgaccaattgatagagtaaaatgatgatgcaaatttactcgaccaattgatagagtagaattgcttctgtagcagatatttcttgatcacacacttcataactctacaaatcctgatttatttcctgaattccaaaaagactaaaaagcatatcaaaaatataaaaatcaaatatgtttagagataggcatgggatttcctcccaagtgagctagtttaaagtcttaagctagacgttttactattttaggcactcatggactcctggaggtgaacagtagttccttcaggaatagggcaatctgccactcttgaccctctgccaattcacactaaattcataacttcccttccgggtaatagtaattgccccatatggcaatacttccttgatggtgaaaggtccggaccacctgcattttagctttcctggaaacaacttaagcctggagttgaatagcagaacttggtctccaatgttgaaatcttttggtgcgaactttttgtcatgaaaggcttttgttctttctttgtagattttcgaactttcatatgcttctaacctaatctcttccagctcatgcaagttaactactcttttttcttgagctcccttgattttcaagttcaaaagtttggttgcccaaatggctctatattccacttcgactggtagatgacaagatttcccatataacatctggaatggggttcttccaatgggcgttttgcatgcggttctataggcccataaagtctcatcaagtttagctgaccaatcccttcttgagacaccaacaactcttgtgagtatagcctagatctgactgcttgatacttccac

SEQ ID NO: 20350 - DNA, 1086 bp, Arabidopsis thaliana landsberg
attagattatatatagttaggctaagtcacaccaatgatggttttgctacaataacatatacgttaacagagagaaacaggagttttttttactcttctttaacgaagccttttcattagaatttaggcataatctatcaaacacatccaaaattcaaggcgaggtcgactaatatctgctatcttcaagcaggtcaagcatcatctggaatactctgagcttaactgcaaaaatgataccaaaacattgaaaggtaagtttaaggagccatagttcattgattcattcagattcagcagaagagcaagagaatctagttgtttgatatagcaatgtttgcaaattgcgatatgaaaacaattttcaaatcttgatgattacaggattagagattgtttatcattccaaatcctaaaaccttaataaacagagaaatcttggactaacatgattatatcccaaacaaaccagacttagagattgtttatcattccatctcctaaaaccctagacgatcatgtaatcaatcaatgtatatcacattgcacagaaaatgaaactttacccttggccgtcgagattcccttgaccggaacttccaccactaccataagagacatcatctcccgtccccgtcgaagtctgccaaacactctgccacgcctgagacggaggctggacataaacaccattcggatccatagctggtctcccaatcatcatccctccaggaccagctggttgtcccatcggcggataatagtaaggcacgccgctcgcggtaggagccaccaccattccaccaccgaggactgcggcttcgtccttaatctcatctctaggaacaatatcaacaaggaaatcgaagatatcagtcctagtaatcgcagcagcgatatcgtttttctgaagcgtacgacgtttattctcctcagcgtgaagccaagatctgatcgtgagctcgagaatgaaaagctcacaagctttcgcgaagagaatcggtgcttctgcggagatcatacgaacatcttcatcggcaatcatgatcttttttatcctagctagtggaagctgatggtttttaa

SEQ ID NO: 20351 - DNA, 466 bp, Arabidopsis thaliana landsberg
gtcctctcgggtttccagagctgagaatacttgagatatttgattataagtttactggaagcttgtcgtcaagatactttgagaattggaaagcatcgtccgccatgatgaatgaatatgtgggtttatatatggtttacgagaagaatccttatggtgtagttgtctatacctttttggatcgtatagatttgaaatacaaaggtctaaacatggagcaagcgagggttctcacttcctacagcgccattgatttttctagaaatctacttgaaggaaatattcctgaatccattggacttttaaaggcattgattgcactaaacttatcgaacaacgcttttacaggccatattcctcagtctttggcaaatcttaaggagctccagtcactagacatgtctaggaaccaactctcagggactattcctaatggactcaagcactctcgttttggcttacttaa

SEQ ID NO: 20352 - DNA, 850 bp, Arabidopsis thaliana landsberg
ctccttatttatcacaaatagcttatcacagaataataacgtttcacacagatcaattagttcgaaacgtttaagcacacaacacgaccaatacatagaggtcataagcaaacaacacacatatagcttaagtaaaaagtctgatagcgagtatatatgttgctcgagattaagacacacagattgataaagacaaactaaagaccacgatagtatagataggagttgatcaggatgagattataaaatctcgatgatcaatcgatgaccaaagacataatcttttcctgaagatttggctgaatcggttgcactctatatccaaactgcccatcatgatctctcatcatcattcctcttgcgttgcttgctatagccatctcctgttgttgctgcaatttccaaaaaccatatccttacataaacatactaatagtttcaaaccaaatcattattaaaacttataaatgcatgaagattcattatatgtataccagctggaaagtgagttgccgttgctcctccgccatcatcttctcctgttaagaaagaatgatgcaaccattaatacatatttcaatccgaaagctaagaagtagagtactataagattagttatatgctcacatttctcctctttgatataaggatctccatctgtgccaagcagaccaaataagaagttaaatatatacatgtgtatgaatgtatgtagaaatgtatacatacctggtggtctcggactttgtcgaggccatgttcaatggcgtgctcgacagccatcagatttttcagttgggagactgtatatcttctcccttcaaatgcctgtaggcacaatttccatgaa

SEQ ID NO: 20353 - DNA, 1100 bp, Arabidopsis thaliana landsberg
gttcacactctaagttcaaatggattgaaaactagtgtgttcgtcgctagattcagtttttttagactagacaattcttcttctttttctttcttttcggattcttaagttccgacaaaaaaaaaaaactagtcaatctcgttttccacacactcaacctggtccctagaccctaggcacatatatattcctctaatcaaatatttcaacgttaacgaaattatgttcagaccaggagaatgtactactaatagacataaactctttgtgatctgttcataattgggtttgtttagaataaatatttcctcttattcgtcagagtagataacacattttccacgacgtccttgtcgtttaggatttgatttcggaccttttgactccaagaaaacatgtcccatgcgttggacaaaaaatagtgacatgcacatgcatttggtattcagaatttatgattcatttcccactcaaagacttcacttagctctaacttcttctaagtcaacttgtagctccaaagcaaaaccacataccgtttatttataccaatcttctctctcactttccttaaaccataatcatttaattttcctaaaatagttctcatcatgaagaccgtgtttaaatcgcttctgcttttgcattttctcttgctactcttactctgttttgtcaccccttcgagctttttccttctaaaagttccggttggtggtcttgttgcttgtcgtctccgccagagccaagcctttatgcagttcaaggacgagattgatacccgacattgcaaccacagtgacgacttcaatggagtctggtgcgataactccacgggtgcggtcacagtgctacaactcagggactgtctcagtggaactctgaagtccaacagtagcctcttcgggtttcatcagctccgttatcttgctctcaatcgaaacaacttcacctctgcttcgctcccttcaaagttcggcaatctcaacaaattaaagctcttgtctcttttctctaatagctttataggtcacgttccttcctcatttaataacttaagtcagctgtcctattagatctttcccataatgatctcatgg

SEQ ID NO: 20354 - DNA, 1065 bp, Arabidopsis thaliana landsberg
  unsure (1)..(1065): unsure at all n locations
tccaaataaagttgttaagcagattggtttgatattgagttggtatcctaagggagcagccattacagaactccgtgagcagctgagaaagaggaaagtactgttagatagagacttttacggatataagagtttttcgaggtttctgttatctatgccgaatatcttacaggttgttccactgggagatggtatgttttctattcatgctgttacccagggaatgaataataaagccttattgccaaaagtaagttgcgagaatcatgcagttgttagtgtggaaaagatgtgtcaaaatatgaaacagaatgataaagatgtcaaagaggaatctcatcaattacaagagagttctcaagagtttgttcaggtaatgaagctgatggatgttaaggcaaaagaggaaccagttaaagcaaatcagctagctataactgctgttgatgatgtttcttctttcgaggaaaaagacggatttcttaagaagctaaatagactatggtttggttcacctgaaatggaattagagcatctccaagaaaggaaacatatttccggaaatggagctcttggtgaaggaaaagtggtggataaggacttagaatctcgaattgcatcttctacctctagtgaatctgctgaggaggtaaaagtagacaatgaagtaggcaacgggaaatctaagagcccagggcttatatgtcgacttctgaagagattcaagttttcttggggaagatatacagagcttagcaatgcagcagcaaccggacctcaagttgatgacgtttttgttaaagaatttttttggaatgatgttgaatctttcattaattctccaagaggcttcgtcgttgtttctcactcaagatcaaggttcttattcttctctttcccttaccaatgtttctgcattggctatcatagaaatacattcaattaatggtaagctgctttacgtgtccagagaaacantggctaagaatcttaanggagaaggaccttcatcactcaaaccgctcgatgtaccaaaaatgcttgattaatatctatgttatatca

SEQ ID NO: 20355 - DNA, 292 bp, Arabidopsis thaliana landsberg
caaatgtatcgtatttagacggtgccgtcttctttaatagaaaattagagcgcatgcccgacggatggttctaatagcatgcccatcggagagttctagttaaggactccttataattttataataataaattttgaagaattgaaaatttagagtttttgttgaatccttatattttttgttgcccaatggtcaaatccttaattgggttttttttaaaacaaaaagttatatcatattataatatttttatttgacaaaacataataaggtcggactgtgatttcagttt

SEQ ID NO: 20356 - DNA, 915 bp, Arabidopsis thaliana landsberg
ttactatatttttatttggatttccatggataaatgaagagatgggggatactttaaggctgagttcaagtatatatgcttcaagaaattttaataagtttccaatcaaaaaggagtaacagagacttaagatgaaaactctacgacttgtacacggcctctttgagcttcttttcacatcctcctgcatagcaacatcgatgcatgcagcctccaagctctctgtcgtccaccttcgagcttatagaagtcctcccttgaagatctactcttgttcatcatttttttatcttatgttctctctactctttcttatactgcttttggggagacgagttatcttttgtgacatctagagaagtttcttttgaaccctctttaatatttgatttgtttatgatgatatactttattgtaatgattttatttctttgcatcatgagcgagtagtttacttagggttttatggggtgattcaaaagcgattcatggttaaaatcttattaggttgttagatccgatttattcataatttgatgcttttgggacattgtttacttaaggttttgaatggttacggcgatcgaggtgtgatagaccacaattttcaccaattctaggtatgatttaggtataggttttagagtctttttgttatttctgaaatcttttctagttattttcaagtttttgcactttagggatgcattggaatttcatggactattctggagcttgatataggtcaaattaatcctaagaccactctctcaaataaagaggtcagttgcagcacttagggatcgaattcacaaagttctcggatcacgcaatagacgaatgacaaatcgaattatgcttaagtaaaatagtaaataaaataaacagcatcataagtaagcacatataaaattt

SEQ ID NO: 20357 - DNA, 540 bp, Arabidopsis thaliana landsberg
  unsure (1)..(540): unsure at all n locations
acatggctcaaatgcactcacgaatgcatcttgcagtgagcgatgtttccgacatagatcgagtgagcgaagaaaccaggcgcaccccattcacggataggatctcccattnnnnnnnnnnnnnnnnnnnnngaatccgttttccagagtacgacggaacgagcgacccaaaggctcatctgagagccttttgtctggctataacacgagcgtacctgacagacgaagaaaacaaaacaggtcactgccgtttcttcgcagaaaaactcgtagatcacgccctcgaatggtttgctagtcttgaagggaactctattgataccttcgaccagctcgtcgtcgcctttttaaaacagtactcggtacttatcgtaaacaggacgtctaaagccgacctttggggtctcacccaatgtcaaaacgaatctctgcgatcttacatcaaaaaattcaaagcaatcaaatcaaagattgtgaacctatacgaggaggtagccatagccgcccttcgcacagcttgtggtttttctaaggtttcgc

SEQ ID NO: 20358 - DNA, 1583 bp, Arabidopsis thaliana landsberg
aaaggagtggcttcccaaaaagtttgggaataaggttatcacaagaggattcccaaaaggtgactatatcaatcacctttttctccagatttggatgattatgatactatgttttacaatgcctggaatgtggaaatttcgccaactcgtgttacggatttcagtttgatgcaacgtttgcagatagaaaaaactattttaggattgctagatgacataggtgtgggaaccattggttttaggcagtacgatttgtatcctgagctagtgcggcagtttatggcttctgttaggatttactatgtgaatgacaaaaagcgcgatgctcaggaaggagctctgatcttcttcattcacgatgtctgattgctcgagtaattacccgaaatatctaaccgttaagtataatattcgaggtcgaactacaaggaccaaagatactctaaggatttccaagactcgttcttaagtaaagcgaagaggttgtttgtttggttttcagattgtaaattaaaatacaagaaaagaaacgattagatttacatgataaaaagtattgggcaatagggtattttagaattcaatgattaatgaaaataataaacaagtaattcagcataaaaaaccgttctcgaacatgaacacaagtttagactaattctctctcaagacattaatcactaaatttgactacttaactactaaactttcatttgtaattttgtagtcaaattcgcattagaattaggttcattaggttcacaatgcattctaacatcaactctcgctggctagaaatatattgattcagacattctatcgaacatttttgatgcatagaaaaacctaagttctaaaacagggtgatcaatcctattctaacattaagaacatatgaatcaaagaacttaaagattaagaactccaaacaacaatcaaaccatcaattcattgaatcccctacttagaaccctaacacacaattaagagacaactcactcataaaaaaatgaacaacacaaagagatacgaaagaaaacataattcaaattgaataaatgagataaaggttcacaaatcttctccaaattgtcaagaaggaatgaatctctaatcccaaatgtgcttacaaaggaaagctctccaaaagttgcagaaaagaagcgtaaaagaaaacgtagaaataaaattaggattctagggtttttatacccaattacagaaaatagaaaatcagtctggttaaggaaaaccaaaaccagtcgtcagaaagatggatcgacagatccaaaggtcgatcgactgatccagaggtggagcgaccgatccccacctgggatcgatcgatcctgagctggcaggtgagattcttcaacgttagagagttgggatcgatcgatcccatcctggcagatgatttatcttcgatgatgaacactggatcgatcgttctagtgataggattgatcgatccaatgttgctgactccggtttctcgactcctgctatcgtttctggtccaaatgagcccaataagtctcgaaagcatatgtgtcccccttaaacacctaaaacctgcaaag

SEQ ID NO: 20359 - DNA, 512 bp, Arabidopsis thaliana landsberg
tgattttatttcaatctcctactgaagctgttttgaaggattgaagaacggaggttttggttcataggaagtggccacatgaaacaatgtaagtctcatatagtcttttttgttttttcttatccattttcacagaagctgctatcttgttactgctacaaagaattagctctttaaagtagtactcattatactatatactaattgtcatatttctacaaatttttatctctttcctttaggtgcaagtggattattgtaaggaaactgaattacacacagaagctgaaatcaagttgtaacatcatatggataggattcctacacaatctatatagcgtcatttagattaataattgaatttcagattgaaatctaattgcaatgctcattctctgaagtaatgaatatagttgttttaaccaaatgctgaagttgtaaaccgaatgtatgacatgtttgcttaaaactaagagttgtgattaaactctaagtggaaaaagagacgtttt

SEQ ID NO: 20360 - DNA, 577 bp, Arabidopsis thaliana landsberg
  unsure (1)..(577): unsure at all n locations
tcctctgatgcgtccacagaacgaggtctcaaccccagggagcttgattcaggtcctaaatagacttttgtcatcgaaggggaagctcttctccttaaagctatctcctcccacccagaagtctttgtnnnnnnnnnnnnnnnnnnnnnnnnnnnnnnnnnnnnnnggtagtcagttacctgctgaggacaataagatttttaagaaacttatcccaagtcctaaagtcagagatgctttaatgtttagaaagtcagctgacaaagatgatgaagagagtgaaaaggaaggattcttcaagaggctcttgagggacagcaaaggtgagggtgatgaaccaatacctaactcagagggtttctttaagcgccttttgaaagacaataaatcagaagatgaggacataacaaacagttccgaggggttcttcaagaggctcttgagtagtaaaggagaaagcgaggaattgacatcgagttcagatgggctggttaaaaggctgttacgagataataagggagatgaagaggcattgggtgcacattcagacagtttcttcaagagatcgtacgggaga

SEQ ID NO: 20361 - DNA, 584 bp, Arabidopsis thaliana landsberg
aagaagaaatttatattaaaagccaacgaacaaaggattgaaaccacaaaaaaaaacaagaagtttgagtttctctcaccctttgatatgcaagttgttcattgggtcatctacattttctgcatcgttctgtgttgatacattcatccatggatgatccaagcactgttgagcagttggtcgtttctccggcgcaaactcaagaatcggagtcagaaactcagcaaactcctttgcttctgcttccggaagcttatatttatcaatcagcaagcgatcaagtggccaatatttcaaccgtcggattctctttaagtccccgtgtctgtcaaagtagtctttcgatttcgcccctccaatggcaatctgctcaaacaagcatatcaaaaagcagactataaaccaagaaaacacagtgggaaagcaaaaaaaaacacatacctttcgaggcatctttcctaggagttccatcataagagcaaggtgatcctaaatccaaaaccagataacaaaaacgtataagaaatcaggctaaaacaatgaagcagcaaactcttgaggttagatttagatcttccctcgtc

SEQ ID NO: 20362 - DNA, 1129 bp, Arabidopsis thaliana landsberg
tcaatattttcttaatccttttcaaaatttaactaagtataatactttttttgtgtgttatttcgttgttttggttaaagaaaaacgaaaaaaagagagagttattcatccttgcagataaggctagggttggttgaataaagatgtgcatatcttataccactagaccaaagaaacagtcacaagtaaaaggccgaatcctttttataaaatataaacagacgaaagctaatgcttcatgggcttggcccaagtgcaggctctcgctagtcgctacgctacaactatcccatatttaattagtgaagagtattttattattttggtcaacgggctatctttgttgacaaaactatcccattggtaaagaaatagcaaaataggcgtttcattctctatatttaaacttgattttatgaagagttgaatagctgaaccaggaagatatttaagaagcccgtacttcacgctttaactgtcaatcgatagatcataataaatgactatctatggataggaactataactgaattcagaaagaatctactactactataaatactaaaagagtattaatacaacggaaaaaacaaaacaaaaaaaagggggaacaagggagtttcatgttaaaaagaaatgaagctctcttgtttggtttttctcatagtatcgtctcttgtttcgagttctcttgccaccgctccgcccaacacatctatatatgaaagctttctccaatgtttcagcaatcaaacaggtgctcctcctgagaagttatgcgacgtcgttctgcctcaaagcagtgccagcttcactccaaccctacgtgcctacatccgtaacgctcgtttcaacacttccacgtcccccaaacctctgctcgttatcgcggcgcgttctgagtgccacgtccaggccaccgtcctctgcaccaaatctctcaacttccagctcaagactcgcagcggcggccatgactacgacggcgtttcctacatctctaaccgccctttcttcgtcctcgacatgtcctatctccgtaacattaccgtcgatatgtccgacgacggcggctctgcttgggttggagccggcgctactctcggcgaagcttattacaacatttggc

SEQ ID NO: 20363 - DNA, 567 bp, Arabidopsis thaliana landsberg
tggacattgttgagtacatctgcactatcactccagaccagaccactgagaaggttccagatccaggtatgttttgttcttgattgctttacttcacaagtaggttcagccgctctttgagtgatctgggatcaagtatcaacctcatgcctaagtctgttgctgagagactaggcatgactcactacaggccgactcgaatcactctcctcttcgcagatcgttccaaacgaatccctgaaggaattcttgaagatgttcctgttaaagttggtaactccataatccctgctgatttcgtggtcctggactatgagaaggaatccaaggatcctcttattcttgaaagagcattcctagctacagctggtgctaggtttgatgtgtagagaggtagaatctctctaaaggtttgtgatttggagatggagtttggcatggatggttcagagcttaataagcatatcagtagtattgcctctagcatagacacaccacctctgactactcagaatcccctgaaagagcctcacacgacgcttcccatagctcaactcgccaatgaga

SEQ ID NO: 20364 - DNA, 325 bp, Arabidopsis thaliana landsberg
caccgacttagtgtgttatatactcaatgcgtacccaggtctgcttatgaagtcaaatttcatgggggaagttgctctccatgttgcagcaggtgcaggccatctcgctgttgttgaggctctggttagttttatcaaagatatatctatgaataagcctggtgttgccaaaaagatatactttgccaaggacagacaccaagacaatgctttacatgtctctttaaaaagaaaacatttgaaggtggcttcctgtttggtttgtgcagagcaaagtttgtcttttgtagcaaacaacgatggggtttctcccttgtatttagct

SEQ ID NO: 20365 - DNA, 3137 bp, Arabidopsis thaliana landsberg
  unsure (1)..(3137): unsure at all n locations
gatatgatcctttctagtcatgtgttttcagttttaactctctttctattttcctgtctatggtttttgtttgtaggtacttcatccatcagtcggaacttcatctatctctactgtacatggaatagagcaggtaaaaacacatttgtatatgttttaggaggggaacatacatattcaggatgaccttcctaaaccagaggtgattacttccattcgactttttcgcggttgtaaatgtctgttcatttgtctatctatgtttgtgtttgtagaaactgatataacccgattttcaccgattttatctatgttttaggtatacaattttgagtctttatgttatttctcgagtctttttagtgtcttttcaggtattctatgcagtgggacaataatggagataaggagacattttggagcaaaagttaaggaaaagagctaaggacgattttggttcaggaatcagcgaggagtgtcgatcgacacactcttggtgtcaattgacaccaattttggcccagcagaagtccatgatgctttcaagtttacagaagaggaaatttgccccagaagacttcccnatttgcattattagtccctggacgtttttagggtctttatgtattgtttttagacctaagtttcatttatcaagttctttgcaaactctattgtgagagacataagctattcatccattgttcttgagagattcattccagatattaatacagtgaagagatcccttctttccccttctctatctactgtgtttatgttttcgcactcaaatatgatgtttgcttcatccaatatgtctgagtaatatgcaggtaggaatagggtttctcattagggattcatatggtttagtagatcgccccctttgctaggttatctttagaattcctcatctttgattattcttaatgctaaatctagagtaattaactagatcttgaatccagacaatagatatacccgcgataggtatctgtagttggatctattatttgatgagcctggtttataggtgtgtaataagaatcggcctatctactaaggtgaacaattgaacttttttaaaatgcatgtttaagttaaagatctctcggcttctctggttattcttagctataggcataggaagttttgcggaataccaccagttattccataattagagtttgagtttaagaatggttcgataataacctagctatcattagatctactaaccaataatttcctgagaataccctactcctatctctttatttaatgtttcacatcaaatcaatcagatgttttcttactttgtttactttttatttcagtcattttctgctagcttaatctggacgtttgattcatagtatgaacaaaagaactttgaggaaattcgacccttaagtgctacgacgatctcttatttgcgggagtaagcttaacgcaatttgagctatatcaacctctttatccagattgcacaaacaacagtaatctctactattgtttcactctttaggctaaagactcagggtggttggtctacttgagtccttgtcaaatatgctacccaagggtaatgtcttgcacatatccttgtacgaggtgaagaagttttttaaaacttttgatatgggttatgaaaagatacatgcttgtgtaaatgactgctgtttattcagaaatcagtttcaggagcttgacacttgtcctaaatgcaattcttcacgatggaagattaacacgcgaactggtgaggtgaagaaaggtaatccatagaaactacttaggtactttctgatcattcttagtctcaagaggatgttcatatcagaggacatgaccaaagacttacagtggcatttcactaacaagagcaccggtggaaaaatgtgtcatccggtagattctgtgacatgggatcaaatgaatcagaagtatcactcatttgctgcagaagaaaggaatattaggcttggactctccacatatgcggttaatccgtttaacatgacgaatgttcattatagtgcttggcctgttttgctagtcaactacaacatgtcacctgacaagtgtatgaaggaagagaacatcatgttgtcattacagattcctggtccaacccaatgtggaaacaatatagatgtgtacttagaaccccttattgaagatctaatcgatctgtaggagaagggaaagtcaacgtataacgcattcagtcaaaccactttcacattaaaggaaatgcttatctagaccataattttcctgcatacggaaatgttgttggctataaggtgatgggcaaaatggcatgtcctgtttgcggaaaacatacagaaaatatgtggttaactaattgtagaaaacaagtatacatgtgccatcaaaagggtttgctacccacacatgtttatcgaggaaagaaagcatggtttgatggtaaagctgagcatgggataagaggtcggattctgagtggtcctaacatataccaaatactcaaaaattacaagaatgattttgggaatgtgaaagtaacaagaaggaagagaaatatgaaatagtgtgttggttcaggctcaaacactaatgatgataccagtgaatcagaggaagatgaagaacaagtagatgacgatgagttatctagttggaagaagttgtttatcctttttacgttgccttattggaaagtatgttcctaaggtgttttttaatttatcatttcagaattgatcgattttcaatgtctttagggggggttattggatcattgatttgaatggatttgaaaatccaagtaacatttggaaatccacacagaatctattgttttaaaaatcagacaacgtggatttgaaagtcaaataatatggaattgaaagtcaaataaagcagatttgaaattcatacaaaaggattacaaaattaaaaacattacaatctttaaaaataatctctcacgttctgatctatgaattctcaattgaatcattccacatgtttgatgttatcgtttctctccactgattggcatattctctctatttatcttgggttgtaagaacttcggcaatattgttaaaaatttccacgacaacttcttctacactttcgtc

SEQ ID NO: 20366 - DNA, 2024 bp, Arabidopsis thaliana landsberg
ataaatgtaactgtaattggaccaaagagataaagcatttttggttttgtaagcttttgagctgatgatgctgagtgtgagggatgttaatataagaattagggaacaatcttgttgttaataacaatacttataacatttaaatgcccttaagtatcgtcataattacatctttgtccctatccttctctttttcacttttcctaatctctaatataaaaccaactcttctcaaattcaacaaaattctcacacaaaccgacccgacccgaatctggccggtgagaaaatggaggtccaaagcagcagcaacaatggtggtcactcttctttctccagtctccgcgtctacctcaactctctttccgcgacgccttctcgcttatcccgccgcgctatttccgtctccacctcttccgacgagatgagtcgcgtccgcgccgtctccggcgaacagatgcgccgtactctccggtggtacgatctcattggactcggaatcgggggaatggtcggcgccggtgtctttgtcaccaccggccgtgctagtcgtctcgacgccggtccttcaattgtcgtctcttacgccatcgccgggctctgcgctctcctctccgctttctgttacaccgaattcgccgtccatctcccggtcgccggcggtgccttcagctacatccgtatcacattcggttagtctcccgcgaaaatcatcactactcctccgatctgttcacggttttctgaaattttaatttcaaaatcaaaaaccgtaactgatttcttttctgttacatttccgttcaggtgaatttccagcatttttcaccggagcaaatcttgtaatggattacgtaatgtcaaacgcggccgtttcgagaagcttcaccgcttatttaggaacagctttcgggatctcaacttccaagtggcgattcgtcgtctccggtttaccgaaaggattcaacgagattgatccagtcgcagttctcgtcgtcctcgtaatcacagtcatcatctgttgcagtacaagagagagttccaaagtgaacatgataatgactgcatttcacatcgcattcatattcttcgtgatcgtgatgggattcataaaaggagattcaaagaatctatcctcaccggcgaatccagagcacccctcgggattttttccgttcggcgcggcgggagttttcaacggagctgccatggtttacttaagctacataggatacgacgccgtttcaaccatggcggaagaagttgaaaatccggtcaaagatatccccgtcggtgtttccggctccgtcgcaatcgtcaccgttctttactgtctcatggcagtctctatgtcaatgcttctgccatacgatctggtccgtacttcaaatttattattttcttattgtatatttccgttttcataaagacggcacgtagtctgagtctaaagctgaaaaacggcggggcatgtgttgttgtaacgcagatagatccggaggcgccgttttccgcggcgttcagaggatcaaacggctgggaatgggtgacgagagtggtggggataggagcaagctttgggatattaacatcacttttggtggcaatgttaggtcaggctcgctacatgtgtgtcatcggacggtcaagagtggtccccatttggttcgctaagattcatcccaaaacatctactccagtcaacgcctccacttttcttggtacgtttctttgtcttcattcattcatcaaaaaaacatttatttaattactgtcaaacaaacaatgatgaaatataatcaaatcatatatagttaaaaataaattttggtccagaaagtgagatagagtagtagtagttaggttaaaaggggaccccaatgagaaccgtttcggttgtttccatgatctttttattgatttgaacttttaacgttttctctaaatcatacgatccacgtgatttcattattatacgtgtccatttcaatatattttaaagatcgaaagctttggacgtacca

SEQ ID NO: 20367 - DNA, 1297 bp, Arabidopsis thaliana landsberg
gcatttgtaataatggtttctaaacggcagtttatattagtaatatcgtaatggaaccggtaacgaactgaaaggccaaagctgatttattaaatatggaatcggtaaacgacgagtttttaaacgatgacttagattttttgagttgctagccgatcgccatttgtccagcggggaataccattctattttgtactttgtcgtggtatttgattctagttcaactttagaattgatctaagagttggctgattttattaccataaattaattacattctcagttttttcattccacactttttcttcttgaaattttcatcataaacttcaataattcctaaaattgtaacatgtacttttggattcatctttaaaaatacgttttcaattgaaccggtcattaaaccgggattaaccacaaatccgcgtttactgtaccgcaattgcgatttacccgactaatcacccacacccgttgagaaaaaggttggctgattttataaccataaactaattgcattctaaccgttgtttatgaaaacttcttttcctaatcggatctatactcaattaagctatattcattcaagatgatggatagttcttgaggattgtagctgagttaggtagcttgcagatccaagttagtgaagaagtccatgcaatcttgatacggaattatcttcctctcaactatgttcagctgaagcatgctctcaaatatggtaacaagactttgtcgttgcaatatgtagtatcttcaggaaagtctcttgaacgtgaattggctgagcaaaaagaaacaattagagctcttgcttctacttctctatataccacttaaaaaggcaggccagaaacaagaaactatcagaataatggtaagcagaacagttatggtcaaggtagaggaaggagcatgtcaaacttgaaaactaagctgacttgttggttttacaagaaagaatggcatgttaagaagggattgctatgcaaggaaaagaaagcttgaaaataaaggtccaagagaggtagatgtgatcactgaaaaactaatgtacttaaaggcgtttagtatgtatgatcaagaatccaaggataaatgggtgattgattctggatgtacatatcacatgatatttaggatggattgattttctgagtttagtgaaaacgagactacaatgatcttgctaggtgatgatcacacctgtgaatcaagatcgtcgtactggaaagatcaatacacatggtggctctatcagaatgctcaagaatgtcaggtatgtacaaaa

SEQ ID NO: 20368 - DNA, 581 bp, Arabidopsis thaliana landsberg
catctccatttggtaatgactttggatgacccaggccttagcttcttaacaaactcagacttctacgcgcattcgaggaagtggtataagctgcatttgggttggttgggttgtttcctttatcatccttcaccctttgcagttcatcctgcacagtttacattagatattatattcaactttgtatttacattttctgagataatccaaagagtgcataccctcagctggcgtatcacttcccgcaagaaatttacatcatcttgcattacttcattgacaattgccttattctgtatcgccttagcacgctgagcaaatctcaaggtgctgaaggtttcactcctacaactgcaatttatgatgcaatttcattttgcagaaaagtggagggagggtggaataatttctgaaagagaaatttgggttctcggtttacctttgcgagggagaaactgcacaaaccatagctaattttgcattccctcctagagactcttgtaatagaaatgtcaacctggaatctctgtagggtatatgcctttgcttccctgtttgtgaaatttctgctagaatgtgat

SEQ ID NO: 20369 - DNA, 1148 bp, Arabidopsis thaliana landsberg
  unsure (1)..(1148): unsure at all n locations
aaggttgacacacatgctctagtggactataacctcggagtaccacatcatatatgttttgtaacctttaggagactccaaaaagtagtggaatgtaagtgtagtgatcatcacctttcttgcaaaaccatacacgactggcaggtgcgtcaaagaaccaaataacaatgtagtcttgtgttttcttctctacccacaaaagatgatgcagacataaaccttacttcacaaaccgctgaactacaacctgtaccacatcatgttctacatcctgtagcagaagtcctggagggtaccatgacacgttcaaaggctaaacaactgaagaaaatgttcaacttagttgtgcaagatattttgagctccctacagctatgagtaaactggtccgtagcaccccataccagatatgatctaatacccgaagaagagcttgctgaagcattcacccaaatgagtcttgaacgaactactcccccaggtatgaaatatcgtttgacaggttcaaggacccctagaaaccaagagaagactttggagctntaagagacggacgattagagtgtcacangtgaaagtgattgagagagtcaagatcattaccatgacatcaacgacgtggcagagctcgaagacattgatcaagctactcaagagggactctagaactacctttacttcaaggaaccgaccagcaaacgagcacaagacgtgatttcagaagtatctcaacgaaatctacaagaagtgactcaaaagacatctactaggcctaaatcacatccatgtaaggtttattcaattttactttgcaggtccaaacatcccacaaacggctagaatcgttatcaaacgtgctcctcaagaaagtttaagtagtttccttatttagtttcttttctttctaaaaataatcgtttttgtgttttgcttttatttgtttccttatggtgtttatgcatttattttttggccttagggctagctgaaggactcttataaagtccctcttcaacaattgtacgaattttcacccttaacaaagaagccgcattttcttacttattctctttaagtgttattgagagagtaaacttgttctaagtcttgtgtgtgttattcaccaaggttgagtactgtatcagaga

SEQ ID NO: 20370 - DNA, 1074 bp, Arabidopsis thaliana landsberg
atgaaatgtgggcagtaacagttgcgttgttgatccctggatgctcttctaacacactctttcttgcgtctttgctgtaaaaagatttgagattattaaaccagtttaggatctgattgttttgtggattcagggttttaagtatataccagaagagaaagtatgaagaagtaggctttttgggtttgttaggatcaacattctcgttcttcttcttgttcttcgccgtctctttcgtcttctgcaagaaagaaaacatgtgttgtgttagtttctgacttatatcccaaaaaagcttaatgtactgtgagtatagtatagtaaccttcatgatattgtcggttttctccttcttcttgagaagttgaagagcttcttgtttatggagtttcatgaattcttcttcttctttcttctggctcattgcttcttcttcctttgttcttttatatccttccatttcttgcagatatatctccttgttcttctttgccatctgttacaaaagttccaaaacatgcacacatacgttagaacatccctttattaacttcactttgttgacacagcaatgtctatgatgagtatggatgagctagaccttatcataaggagccttctgttcttccgacaagttcttccactcttctccagttatcttagcgacctatactcatcattcacccacacaacttagcttcaagaatttcaaatgtaagtgacaaaagaaaactctgaattcttttacttacctcaataacacttttgttttctccttttaaagcagctctcctctcgtttgcatagatcaggtaagcagatattggttgtttaggcttcaggggatcctttatcttcctgcaaaacaagtaattcattcagttttataacttatcattcagatcaaaacagttctcgatttaaatacttgaatcagtatcattacctggcctttttcttgttgtcatgttcagcttcgtgaacaaagtgcatatactgatcccccacccccattgcagttttctgcttctgctcatcatcaagcagcttcattgcttccgtctcacgcttctc

SEQ ID NO: 20371 - DNA, 1495 bp, Arabidopsis thaliana landsberg
ttcatagaaaataaattattacaattaaacccaatacacatgactatatgagttttataagaaagtaatatgaaaaacaattgagtatataactttttagtctaacttttgcacggtaatttttaaattcaaaatcaaaattttaataaatatttaatcaaataaaaattaatgtttttaattgataatataagaaacaaactaactattgattaaaaatatttagtaaattaaaaaaattaacttcttaagaaactaactattaatattatgaatagttcatatcttaaaattgtttattctttgcacacaaaaaaaaatgtttattctcttaatttaattttgaaattgaaaaaagctaactattataataattatctagacgaaaaaattgtttaaaaaacaatacagtttttagattttctatgcaatattattaattactattgataaactgtaaactttgagaaaaaataattgactatcattggtttagaattgtagaaaaactgtaaatcacaaaagcatcatatatatttataattaacttttaatatattttttgtatatgtgtgaaaactctaaaatatcgattatttacacaaagagtaaatttaaacataaataaaactgaacaattaatattaccccacatgtttataaaaccaataataataaaatactacatcacatgattgttttgtatgtagactctcaaataaaataaaaattaatttaaaaatatttcgagttacgccaggtatattttttaaattttatcaatttaaatataatttaataaatataaaatttatggtttaacataaaacttatttgaaataattaatatgaacttgaattaaggttttattttttgagtgacgttaattattaaagaaagaaacaggaatatcataaaaatagtttctagtaacctttaaaaaacgttgtaattcagaaaaacgtgaaaccaaacgggctacaaaatatattaaaacacagagtacaacaggcttttggtttgagcccaaacaagcccatttaaatctatttagtctgtaacataagtcacgtgcacctatcacgtgatcatcttctttcttccttttttcttgtcatctgttacacatcggttagggttttagtttctcttaccgagattcaaatggcgcttagaggagtttggcagctcaagaaactcgttgtgagctactgtaattggggtggtagcagtagaggcatcaggtaattttgtttacctataatttgatttcgcaatctatgagccgtattttttcatttatcatcgatctaccatttttcctgtaattcactttggaacttgagactatctatacgaatctatgagtctgtacttggtatttgtgaagcaaattaacttttcatgtcaatgtgggtttagaaatgtgaagcaaaatgatttagtaatgaatcgttaccatttcatcctagtttggtactacgcattttctta

SEQ ID NO: 20372 - DNA, 459 bp, Arabidopsis thaliana landsberg
cttcacaatgtcaagtgcttgctttactatatcaaagggtttgtttttttttcagcctgtaaaacacctcggatacctttggtgaagaaagacttgacttgaattttgcaaaaaatgtatgtagttcctccgtagaacctgattgctgtttttctccttgagaggctcttgtgcctgatgaactcgctgactctgcattctcctccttcccgagcttgaatgactccttgacctcttcactggctgctgagagcttgtctttcacacttgaagagacctgcaccgtcaaagctgttttgtaagggacgattgttagccttttacaatgtacaattttggctactcatacacataaacactgacttcttattcactaaagcaatttcatcagtaaactatttggttaccaaaactaaaagagaagaaagcattatttttacataggaagcatcaaatcta

SEQ ID NO: 20373 - DNA, 698 bp, Arabidopsis thaliana landsberg
atgcataaggtttatacaggttattcaacataatctaaataagttaatttatatatgagttgtatttagtttgtaactaatgaaattaaaatggtttaattataagttaaaacatgtcaaatttttatataaataagaattgatgcattatttaagtaaattaaattaaacaataaatgtaatatgttgatatgacaagtagcattctctccattgctaatgtggcggaaagatgagagaaagttgataaacaagaatttcttggtcccgaagtaccttatatgagtgctatcggtagatttatatatcttgcaaattgtactagaccagatattgcttttactactaatttgcttgcaagatacaattcatcccctacacgaagacgttggaatgggataaaaaacatattccggtatattcgaggtactattgatttagaattattttatcttagaaactccgagtttggtctagttggttttgcagatgcatgatatctatcaaaccctcataagtctagatcacaaaccggatatgattttaccattggaggaactgcaatctcgtggcgttctcaaaagcagatatattcacaaaggcgctttcaacttttacatttagaaagcatgttcaaagtattggaatgcgtcatctacgagatttgcgaggtcttttcgaggggaattttacgtcac

SEQ ID NO: 20374 - DNA, 652 bp, Arabidopsis thaliana landsberg
ctactataatttagttctaccaatcaagcccatgacatacttacacagcaatctattccaatagacttgagaagctcataacttttcaaatgaactcataataacttatttggtaattgagtattacaatctaataaacaaaagagggtataaccaattttaaaagtaggatttgatctgagaaaaatgaatttattttctcgagggagcgtgttcatatattttacactggaagtaaaggtaattcaacacacacatatatatagtaaatgtgcatttcctcacttgttgccacttaattttgagttagaatcttcttaaacttgatacatatataatatctttttttgaaagaatgtaaaattttattcaatcaaaaacctttgtacaatgaatgcaaccgtgtgttgagtgttttaaaggaaagacagaggatacaaagctgaaattgcaaaaacagaggatacaaaaacagaggatactttagagaggttgcagagatgagattgcaaaaacatatataatatcaaccggtactaatgcgaaatgcttaaaatggaggtggtaaaagtggtagaaatgttagaagtggagtgaactatagattcgagataaacatatggttaacttaatgagagtgatgaatgatagt

SEQ ID NO: 20375 - DNA, 1733 bp, Arabidopsis thaliana landsberg
  unsure (1)..(1733): unsure at all n locations
tattgttatataaaatagccggatatttaaaattttcaactaattattttgaaactgttaaacacttgattcttagatgctgaaagaaaatactaacttgcagattaaaataggaaaaagattaaactgaaaccatctcttccaaaatgaacacaatttatgatcattcttacaaacaatagttcaaaagataaaaccaatatcaacttaagaatgaacaatttgattgttaaaagcagtgtaaattgcttatacaaatccttcttcagacgaatctgactctaggattagtccttagcaacatactcaatcctcccttcaacagacccatctggttcacctgcaaaaaaattgttgtaacaaaaatagaaaaagatgtcaaacttcttgaaaaagttagtatctaatgaacaaaaacaaattatctaatgtcttttacatacatgtaacatgttacatcaaagtctggaaacgattcctcaatgaagacccttgaacacccatactcgctgattaaggccttagatcctataatatttgttatcattctgttgattagttatatatcacaggatttaacattttaaggtaagagactaacatattaacgaatttccactaacctttaaacatagaggttctacagaaccggagcactgtagtgattggctcgtagttgtaacttttcataccaataagtcgataaaactttgacagaaaagactcacacgcactccctctagcaacacaagttatgatcctctcactacaaccaaagaaaatacaaatttatcatactacacatatatgtctgttcctaacgaatttcaataccattatacatccatgattgttaactcactgattatctctgatggtaaatattacatatctggcctcatagtctgtttccacttcacgacagcaatatggaaaactcgacatagttgagacagttgttataactccaatagcatctaacaataacagaacaataaatcagaattaatcaaaatcttagtactaaggaataacaattccaagaaaccatatactatataattaagacttatattaccgactacatgatcctcagattcagcattgacttcatcagcatggatgaatttgagagaactttcttctgctctatcacttacaggccacattttagtgtgccacataaactcgatttcataatgaaaatctgtgtactttggtattgttgttgctctcttcaatcgaaagtgttgaaggtaataccactttccttcaaataggttagtcttaaaattgttcatatactcgccccaaggtattctagcatcgattttgtttccctgactaaaaagagaaccatataaaattctttggaaaataatagaaagcaaaaaccagaataacaattcaaatatacatcatagatactcaccttcacatcacagaggatcatggtagtaggagttggtttgatcatagactgattgtcccagatgcttaatattttcacgtatataacatgattgttcctgtgtaaatttagatctgggatataatttctctcggccattggaagtttggatcttaattttaacagattttttagaaaagatagattgagggaagttaacctaatattgggncttatatatatatatatattgaaagaagcacgaggaaatatgaatatagatttcagtggaatataaatgaaaagggtttctttgctatat

SEQ ID NO: 20376 - DNA, 515 bp, Arabidopsis thaliana landsberg
tcaatcttttctggccggagaacaaagaaaagagcacataactaggttaacatattataaaaaagttatttctcataaggttttgagtgtttagctatcacgttttcactggtatcttttctttgttctccatgtctaaaaggaaaaaaattcttgaaactcaattttcagatttgtctaatgttattcaaaacacaactgataagcagtttagacatgaagaaacttctgaaaatacacccccgtcattcaatggaccaagtgtgaagaattcagtgccagttagttctgtttttaatagggttctaagtgatattacaaatcaaagagttcatacaccaagcattagccaaacgctggcactttggagtcatgtttaacatcaaaaacaagttaagtttactgatcaatctatattatatatttaagctttataggttttcctatataacataactacatttaacaagatttatttatgaaatgttaacaatgccagcaggaatcaatctttc

SEQ ID NO: 20377 - DNA, 586 bp, Arabidopsis thaliana landsberg
tctctttgacttcatttttattgtctcttctctattgaccttggaattctgataacaaacacatactaaaatttaaaataaaataatcacggtgataaaaaatggctggaggtggtggtggtggaggaggcgaaggtccaagacagctagatcagaccccgacttgggccgtttctacagtttgtggtgttatcattttgatctccattattttggaactcatcattcacaaagtcggcgaggttatttcatagagaactttataccttatgcatacattctttgcatttgttacttttttggttacacttcattccatgcttgtaggttttcgaacgaaagaagaagaaagctttgtttgaagctcttgagaagattaaaaatggtaacaatctagaaattatttttttggtttcttgaaatcaaggaacaattgttttcgctcatatatatatatatatatatatatttatttttttattaatttaaagacgaaaattcaaatattatcattgagcacacagattgaaaactctcaaaccacacaaccaattttgagtggtacacaagtattcgaaaaaatgaa

SEQ ID NO: 20378 - DNA, 597 bp, Arabidopsis thaliana landsberg
cccctctcgagaagggttcaacataatgaaacatgtgagagttagtgtataaaagtgagcaatttttctctaggacatcgatatagacaggtaaagtaacaatacaaattaaaccttttgagtaaattttcacgaggttattcaaaaaacgataaaccctaaaaacgagtcatcaatcgacaatagaaattttgtgtgggaaacttacaaggatctaaaaggtatgagagaggatctttatgaatgatacatgtatgaatggaaggtgctgatgaagaaatcatacatatcaatgagacagcgactcccattgaacataatcgttttgtccttcatttcttgtagtaaacttcaccccattgaatctgcgttccaaataagttacaaacattcagttaataaattattgagtcgacattagaaattatatgtacttactatattaaccgcaccaaactccacctaatcaagagcaagatcagtttgtttgttttctttttttttttgggttaaaaacgaatctattaaacttgaacttatttcacaacttgtaaaacgaatcttcttcagctccttctctatactacgaagcacacg

SEQ ID NO: 20379 - DNA, 874 bp, Arabidopsis thaliana landsberg
ggattccacaaaaatcttcaagtatgaaaaagctattaaattggttttattgaaaaatcatgtaatgtttaattaaatttagtaacagtacattaaatatgtaaaataaaataatatatagaattaaataataaatgtatcattaacatataaattagaagttgaaaagcttacattaattaattaataaacatatgacaaatgttaaagtgatgatgtagcaatcttatggagagagttgaccaactttcatatatatgatttggtgagtttttatctagaccgtataaaccttaactattgttctctttactgaatcgacccattacctagtctccaaaacaaatattattttccaaaaattaacatcgacatgaaaacactcggagccaaagatatgtccaataacgccaatggtttagtgccgaaagcaaagagtcgtgcgttcttcattgtgataagggcaagggccctagttacgccaccggtttaattagtctaggcacatcactgtgaaggcatcaaagaaagcactattaatagttcctgcttcttccgtttccacatcctcgacattgtgcctcacaattaatttattgatttactgctaaatgtcccgagacctaccatatattataaaccatgcaactagtgaaccatattatcatcgtgggaaacgcaaaaaaattccaaaccaaaggaactagcttgtaatcttatggagttggagagatctctttcaatagcatatttagatttttgtacttttaatttatatttattttcataacaaaaactataataattagggtatcacaaagtttgcttaacgagagagttgtcttttttttttcttttttttgaatgtaatgtt

SEQ ID NO: 20380 - DNA, 1323 bp, Arabidopsis thaliana landsberg
cacacattattcttatggaggaggttactgtggcgattcatggctcagagtcttctccatgttcaaatgatcttgaaggtgattcaacagactctgctcttcgacttctgcttgatttcccgataagtgatgttgatatgagcttcttggaagatatttcagtttttagttttttacactttctgtagcaataattacatataatgtttgatatacctctcaagtaataattttcatgtaacttttttttttttttcttttttttttcatttttttcatgtaacttgatgatcaatgtaacttgatgatcagtacatctggaaagaaaggagaaagccgaaaaagaagctaaatactatgccactttgcggctgtatcttcaagaagaagtgaggatccgatcattttaattaagtttgcttacataatttattacatggatttatttttttaactgaataaacgttttgtttggctttcacttttttctttgtgaaaacagttggttttcgtcgaaagactcaaacaaaaacatattcaagcatcgcaggatagagatttcgccaccgcccaaaagactagacaattttgtttcttcttcattaaagaaataatactttaccccaaacatagataaattatgtatgaatgacgattcgtaggttgatgaaatttcctacaatttatgcctagtttcttatttactatctgcgttgactcgatccctgcccaaatttcttaacttggagaaagctgatacattaatcatagtagaggtaaattgattagtccttcttctccatgttgtttgacttacaacacccaagcaagtgactagtcaaatctctttgtctaattatttttaaaaaattcttttcaggatttcagattattttttattttcagaatttatttagtttacagagaaaatagataaacccaattagatatagaaactatgaaccctaaaaagatcaactcatctattgctaaagtcaccagttttcatcatctgaagaaactccttgtaatcgactctaccatgtccatcttcatccacttgcttaatcatttctttacaacactctagggctttaccttccttgagcttcaagggaagccaaaaaggatcggagggaagtgaattctaagcttcttggggactaaacaatacgaatttattaaccaataggacctgctattattagtctatcacaacatttctcccacgtggctttatctttcaaatttagcagtcacaaatgaagtgaccatttgcaataagagagcgttggagtggggaatgatgtcaagagtacaacc

SEQ ID NO: 20381 - DNA, 1195 bp, Arabidopsis thaliana landsberg
acaattcaccagccaagcatagatatcttcgaagcatttgatgaggtaaaaactctgaaagttaagaaaaacaattcatctcattttaacatttctcttatgtataagtacattatgtgacccttcaattgcagctaattctgatgaaaaatggaggaaaaattatctattacggacctcttggacaacattcaagcaaagttattgaatactttatggtcagtttctatataatactgaaactgttgcaaaaaaagtgtggtctcttctctacttacaaattattacaataattttcaactttagaggattcatggagttccaaaactgaaagaaaactctaacccagccacttggatacttgacattacttctaaatcatcagaagacaaacttggagttgatttggcacaaatgtacgaggaatcgactttgtttaagtaagtctaaacacaagtatcacttaatactttggatgtttgcctgaaactgattttgttatttgtttttagggagaacaaaatggtaattgagcaaacgagatgtacatctttgggatcagaaagattaatcttgtcatcacgttatgctcaaacgagttgggaacaattcaaagcatgcctctggaaacaacatctctcttattggagaaacccttcctacaacctcactcgcatcattttcatgtcttttacttgtatgctctgtggcattcttttctggcaaaaagctaaggaaatgttcgtgtcttcccccatctttcttgaatcggctttgaaccgcgtgatttccttgatctttaaaggtttagctatttaacctttttttacctttcttctttgcagaaacaatcagcaagatctattcaacgtatttggctcaatgttcacggtggttctattctctggaataaacaattgctcaacagtgttatttagcgttgcaactgaacgaaatgtcttctaccgtgaaagattttcccgtatgtacaactcatgggcgtattcacttgctcaggttaaaacattttctcaatcaaacaatcaaaacaggaaaaaaaaagggaaaaaaatatcagctgatcgatattgactctaatgcttaagtatgcaagtgatggattaaattccatactccttgttccagcctattgtgtatgtaattaatcgatatcctatgggtggctataactgat

SEQ ID NO: 20382 - DNA, 1276 bp, Arabidopsis thaliana landsberg
ttcttgattatttaaaacaagtccgtgataagaagaggacgtggagtggaaaataaaatgttacagaaaaggcgccaatacacaattgtggcgacattatgaacttgctcaataagagaaaactttaaagaaaagagggggatattaaacaattataacaaatctaccaaaattttgactataaatagatcactacacatatggatttgtctcatcgaagtaaatattaaattgaaagagcaaaaaaataagtcttaataaacgcaaagcattaaagagatggcaaagaacctcaactccgttagcttcatcgttctcttgctggttcttttggtggcttccaccggtatgaatttattctctaatctctattatactttgtgtgtatatgtatatgcaaaaaagttacatttacataataatcttttgctgatgaatttactgaaatgtcaaaatgtagaaatcctgaagagcgatgctgcatgcttcacgttcttaggcgagtgcgggccggagccgtttacaggttcaaatgctgattgcttagcgtgttgtgtagctctctacaagagtccaccagtttgtgctggacgtgttgagggagtcccggctcactgccattgctacaaatcgtaaagaggttcaaaataaacctcatatatataattaccaagtgtaacttttcttttcattcggtgtgataaggacattacatgtgtgtgtgtgtgtgtgtgtgtggtaaactggtgtctggtaagtttcttttgaatccaaataaaacatcaagggcaaagcttcactgcttccccttaataaatgtaagctcatgttgtcttcacttttgattcgttttgaataataaactcgttttgtgttccccatttcattcgaaactatattcaaatttctgtcactacaaattatctaacaaatattgaccatttattggatagtaaaatctgatttaaacatgtatgttgcatgctcaaaagagtatagatgactatcataagaaagcatgagctaatctatatatttgaaataggttttgagttggaaatttattactctcgacttccaacctttttactttccaaccttttggaggaatacttacgtttctaaaaatgtttactctcgacttcccacctctttacaagccaaattttgtccataagcacacacagaaagaacacgtttaagacaatttttttttttgcatgactaggaaagtggactaattaagttgttagagatatgttaagatgacataagt

SEQ ID NO: 20383 - DNA, 601 bp, Arabidopsis thaliana landsberg
caggatggaaaaatagactatgaggagttttgtactttgatgttaaatggcatcttgcaaccacaagggaaacttgttgggatccacatataaaagctctgttttttgtttcacccaaaatcggttttgttaaacccgaactaaaccggagaaaacagaggtgatagtagtttatctttgaaattgtttgtatgtctttcttgtaattttcttgatcattgcaaatcttctggcttttgaccaaaacataaatttgaatatttaaaagaccattgagttagagaccaaatccaaatgtacaaagaccttgagagttgagaaattgagatgatgattctccataaaacttgggtggaatttaggtgagttccaatagaagcttcaagaatctagaattgtgctcactatctttgtggagttaaaccggcactatatgaatcttgaagaactcaaaactgggctaactagacttgggtctagactctctgaaactgaagttaagcaactcatggaagccgtaagttatcttcagcatcttggcttcactttccacagttaaggttttgaaaaagacatagcttgaaacacatgctgataactt

SEQ ID NO: 20384 - DNA, 907 bp, Arabidopsis thaliana landsberg
ccacattatacattggttccgactaaaaaacgtactacatgatcttttcaagaaatcgaaagctcgaggttaagaggagattttacttacaacgaaagcataatctcgcttcatatccacatctcgcactctgcggaagaaattgttggcagaaaagtaaggccatcattactttaaggtacttctaaacaccatttttgagactgagtctccatttccatcaaaacacattaaaaaattctacaaacagaatcgccaaggcgccctgtcccctaaacacttggcgagaatttccaccaagtccacccactcatcaaacacctccaggttaggcaaaatcccagagaccttcaataagatcattcaagttaaaaacatacactaatgactaaacctagttccacaactttccctcaagaacacaaatatcaaaatacagaaccaaaactatgcccctcgatgcttaatgacgactttctgcatctctccctcgcactaacaattttcataaccaagatatatagaaaggcgcatgaagactctcatttaactaaccccaacacatagaaatcaatatgtcaagataaagaagcattatgctcctcgatacttttaactttctgcaattgtttcctcgcacaatagcaatttacgtactatataactagaaaaatcacattgagaccatcatttattccaattaccgagaaatcaaaatacttcgtccataatcatagatagaagagtcaattaccttccgtatctgctaaaaagacgttcaaggtctcgggtcctagttctcgatgataatcggccaacgtaaagacgagtgatcccatagcgatcatcatagcgaggcattgtcaagctacaaaataaaaaaaaagggacaaagaaaccacagatt

SEQ ID NO: 20385 - DNA, 1185 bp, Arabidopsis thaliana landsberg
ccaaattcgactctgtgttcgtgacgagaatcccgttcctactggagattctaagaataatatgttcgccactgcgaatccacacgtaaataatacttttaaattttgcgggagattctaataataaatatagtactatccaaaaaaaagaagatagacgaaagattccataagaagaaggtttgtaccgttgttccatgaataaggattggtatagagtgttttgccgtcgccatatatgcggaatggaccaagctcttgaaatgccccatatagggaggaacaaccaggtcctgcatattttaaaaatagatatatatataattgtgtatgaatatttatgttttgtggacaaaattcatcaattttgttacttgtatgatttctcaacgaataggaaaaaacaaaaaaaagtagaactagatggtagatacatacctccgtttagccatagaacaaggggtaaagactttttggttttggtggcttccacgaaataatagtacaaggatcgacctgctgactcattcacggtcacataaccgccatattgtctaaaactaactgaaggctgtccgggcagattctcaattagatctctctccttttgctcttgttggttaacaccgctggtgttttggggtgaagacacgcttaagtgacggatggcatttaaatggttcgtgtcaaccgacgaaccaaaccctcgcttcgagcggtacaaaagacggtttaaaacatgtgtttggctcgtgcaatggatttgtgacgcttgaaacaataaaaggaggagacaagtggttaccgaccagtcttgtagttctcccattcaattatgtttgattggatctttatgaaagaaagcagaatgaagtttgtatgaaagaattgagacaatgaatgaactgattttatggatacatttttggttattgacaactattttaatcacacataaccttttgtaacaacttaacaattaatttccctctgtaactactccaaacaagctttgcttttttcaatttttgtaacccttaaaagttaaaccaaaacaaaaagttttcagaaaaattgcattctaaaatttggcaaaacagaattctctatttttgtaactaattttttcttttaattaagaaaacaaagaccgcaaactctttattttatactttctccatgacc

SEQ ID NO: 20386 - DNA, 862 bp, Arabidopsis thaliana landsberg
tctgcaacactcctagaaacaatttcaatgtgcacatctggtataattcaacgtacaaggactatgcaggaaatagacttataaagttggtccgggttccccgctcagtcaatttggtaagaacacaacaatgtactcaagacatccttcatcattgtattctcactatgctctgtaccatgtagcaccactttctttattgaaccgatgcttacactttaccaaactgtacgtgtcaaatgcttaccttcaatttctacaaggcccggggacaaggatgttgtttgaatatgtcaaagaaatgcctaaaccagaaacacgtcttcgtctggacattgcgtctctaattggcccccttttcttcacctgggttattcttcttctgttccctgtaagtttgccttcaataatactcaccctcatggataaatcttggaaacaacaagaattctgctttctccaagcgtaagatacgaaattcatatctagagccatttgtatgcaggtgatcttgtcgtcattagtgtatgagaaacagcaacatctaagaattataatgaaaatgcatggcctaggagatggtccttattggatgatttcctacgcctatttccttaccatatccgtgttatacgttatatgcctgatgatattcgggtcagcaataggtaattgaagcctttcggttaatacatttcttacaatacattatgtttttttgtcaatatgagtctttaatgttgttggttccctgcaggactgaagttctttcggcttaattcaaacagcaaacagttcgtattctattttctctatttaaatctgcaaatcgcccttgcctttcaagtttcttcagtatttt

SEQ ID NO: 20387 - DNA, 1030 bp, Arabidopsis thaliana landsberg
gtggaatagtttggaggcgctaagatacatgtctatcattttagaatgattttgaaagatacagtgacaatataattttttgttctttttcatcgtcttccacctttatttttttaatcaaagttttcggacaaaaatacaacataagtattttatggtctaaatggtaactgttagtcaagttttctttggtaagaacttctgagttctgaccacatgctgacattttttttttttctgtttttgaaagtaaacatgctgacatttttgacgtttaccttctagtacatatattgaacaagaaacggtcaatatgattcttcttatttttttgaatattctttccatacatgatacattaccggaattgcgaaccaaagtttagattcatctccagagttttgtggagtatagactcaatcgttggatctgatgtatacacgttgattctttttccttaaattagcgggcctcatggatagacccactgtaaattacaaatttatgtggataagcccgtcgcagattgtgggttgcccacaaaagagaaaccaactcttttaaaaccctttgattctcatagaggatttcaaatttttttatctctgttagaattttttgtgcagttcaaaaaccctaatcaaagtatttcacgatcacttaacaaggaatctgaagagtcattctctatctcttaaagtttattttttacgaccacatccaaaaaatttaaatcgtcgaaacttttgatttcaagtcaaaacagagcatttgtaaactacacacttgtaatggtaagttatttgtgactacagatccatgattagatgttttacttttgtttgattgattcgcgagtagtgactagttttgtattttgttactgataaaattcgtttgaatccgagtatttgagatcattaaatctggaatatcagagagtcattaagttggaaaatgctaaatatgaacgacaacaagctaacgatgaacgaaagggacctaaaaggttgatagaaactaagagatg

SEQ ID NO: 20388 - DNA, 685 bp, Arabidopsis thaliana landsberg
attaaattctgtacagtcttattgactggatccatttgatatctacacccttatctaggagaacgaatgggctgctgccccatattaaatatttaattttctttcttcttttttgggcaaatttaatttcttttcaatgtcaaattggctccttaaaaaatattttgggaaaaatatcatttcatcctccaatatttaaattatgcctattttaaatataaatttatgatatattattttaaacatcagactgcgttgatcgagttgaccaatatagacaataacgttaaaatctgataacagaaccactaatgatcgttatcaaagattaaccactaaccaccaagaacaaatttttcatttagtgcctaacactaaacatccatctaggtgaattccacaccataaacactcttatatatgagcattcctcctttaaaaaagaatctatagaattcaaaaacgacaaactcacttatatcgagataatatcttcattttgttccatttgcatacatatgttatgtagcttcatcatgcttcccctcaaattaagtattcatctattcatttttctcaatttttttttataattgtctaatgtctaacgtttacctcgatctcaccattcatctgcccactagtaattaacaacaaatttctcatttttggttcctagtgtctt

SEQ ID NO: 20389 - DNA, 613 bp, Arabidopsis thaliana landsberg
cctattaagaatgccaatctaccaaccgaaaaagagactgtagaagaagaagataatgatgaagtttatgaaacagaaggggatatccattctgtgaaggctgcaagtccaatgcatcaacagccaaagagacgctgaggaccaacaaagatgaaagacatcgccaaagatcctaatacaagaataaaagttgacttcactgaacttggagaaccctgtggactaggttcagttaagttatcatcttacataggttctttggctagggaacatgttcctattataattgaagattggaggaagattggcgaagagcgcaagactgttctatggaaatctgttcaggtgattttgtcatatattgtttcaatatttgttgctgttttagtaatgtcttaaaactattttctttacatctaatgttgccggtaagatttgagcttgatggagagtatgcgaaggctgttgttataaaaagtatgggatgcttgtggagattagatcaagcacccttgcaggcgtatgggattgagtcgagccgcctgaagggaaacattcacgtgcagattgttttttttgggggtggcgagggtcagcactggtttcccccctt

SEQ ID NO: 20390 - DNA, 353 bp, Arabidopsis thaliana landsberg
atcgcggatgctagagactgatattccaggaggctaagccaattgtttgaagcggagctcagatgcctaaagagatcccaatatggcaaaacaaaaaatattctaaaaactgaataatcaacgaattttatattatgtgaccaaaaaatgaaaacagaaactatgtaacaatcatcaaatacagtgttttcagcatttatttttttctaaattttccagcaacatacaaacataacgttactactagacataaaaatactccctctgttccaagttatttgatggtttggattattttatttgttccataagattgatgttttgtaaaaattaaatatgactattaatcttgt

SEQ ID NO: 20391 - DNA, 1040 bp, Arabidopsis thaliana landsberg
aaataaaccattagttgaatgacaactctcaataaatgctaagaatcgtctctcttgccagaaacggttcgccacttttctttctttctctcttgctttttttctttttaattattatttatttgatgagtatctcaatcagatacttcgatggagatggtataaaattcttaaaaaagaaaaaaactcgagtgacccatgataacaactcattttgatgtaagtaccaaaatgcataattattttctcacatcgggaaaatatagtctctaacacaataatcacaacacaccatttctatatagtattttaaatggaccaccgccatctacaaaaaccgtccacgagctttcacattattttcatttatttcactaatagccaaaatttcatctttctaataagagcaacaataactcccaaataaggaaacagaaaactctaagaaaatgacaaaatattatttcttcacttttaatatatagaaagaaaagatcttaaaatatttgtaccaaactcacatcaccatctccatgatatcacacatttcttacactgtctatcattacaatcagttttaaacactaattaaccatcttataaaataaagaaacaaagcatcatcacataatttataagaaaaattacagttttacccctgctgcgatgattagtctcactcacgatgataatgatgtgaagttttctaacagttgaaaacatcaccagcagtagaagcagaagccatgattggttgattataaaaccctagattcataggattcatcacgccgtcgaataatccaccgtcgaataatccctgaccggtctccataccgaatcctgaagaagaagattcgacgaaatcaacgatctcgttaagagattggagacggtggttaagttcaagaacctgagctctgagaatgtcgttctccgcctcgatagtgacgtagtgctgcgtcgtgacggcgatttcggcgacgatctgagcgttttcttacgtagatgagtcacctgagcagtgagatcatccaaat

SEQ ID NO: 20392 - DNA, 151 bp, Arabidopsis thaliana landsberg
  unsure (1)..(151): unsure at all n locations
gacgatattctcttgaagctcgggattcgagtctacctcatcgtttaaacagagagcggagtgagtaacctggtgagcgaatcagaaagtttctttgataaagaagtcacggannnnnnnnnnnnnnnnnnnnnnnnnnnnnnnnnnnttt

SEQ ID NO: 20393 - DNA, 3182 bp, Arabidopsis thaliana landsberg
gggaaaataagtctcaaccttggaaagcatatcaagttgcagtttggcatcaacaaaactccacaagggtcaactgaagatggaagaacctctggaaatgatagagcgatctcaggagaaggatatgagactgaaggagtgaaagaacttaaaaagaggtctgataagcaagatgaaactatagagaagctagcccacactattgaggaacttaggagtaagctaaatcagatgcagaaggaagctcaacctaaaggcaggattaacactatcccgagaaaagaattcacttcaagatggtctcaagagacagattaccctccagaagagaaggaagcctattttgaagaaaggggaattgagtattctgctgcagacctctccagggaggacgctgagcatgatgatggtattagagaggattatgctgaccctctctacagttcattttcttcttgataagtgtgaggagtcaagctagagacttaaaacaagctcacttgggaggaagtcccatgactatccttgtaaataatttttactttcttgttatttttgatttgttttggttatgtttatggttctcaggaagaaaggggtaacgtgaaggtagagtaaaaattcaaaacttttactcaactgatggcctagagatcgagtatagtgatcgagtatgagtgatgtttaaaaacctaaaaaatttgaatcatcattttactcgaccaacagaagctacaaagtcttccagggaatctttcaagtttacagaggattgcgggatttcctggagtttttctagtgaacggagaatacagagaagagacaagaagacattctgggacccgcggctgacgcccatgtcctccatgcaacagaccaaaggacaggaaatctctcctcatctcttctcctccactcgacgtcaacgccatcactcgacctccatccctcttaactcgacctcatcgcctcgttttctcctccacaaccccataaactcgacccatcactctcattcatcaccaccgacaaaacaaactcccatccactcgacctctccgccttcttcttccttaaaaaaaaaaacactcgacttctccctttcattttcatcccaacaccactcgactctcacttcactcatcaactctcactctcaagctcaacaaacactcgttctccgtccccatacttctcgctcaaaaccactcgaccactcctcgccaatcccacaaccatcactcggccgaagctctcatcacctctccactaccactcgaccactccacatcaccatcttcttcatcgtttcatcactcgaccatatcgccttgtccctccatcacccgacctccaccatcactcggtctcttcattgttgaacacttatcaccttcaagctcatcatctctccatctacgacatcactcgaccaaggtgccatcgttctctcatctctcaagtccagccatcactcgacaacaccaccgtttcttctcttccgcgagttcaagttcactcgaccgctgctccttcacagcttcatcgctctcgatcgccaagcacaaccaaggaatcactcgaccgcgagttcaccaaaccgaaaaaaaaaaaaaaaaatttggtacactcgatcggtttactctgttggtttgtgtttttggttttgttgggactaacgtattaacgtctatctttgagtttaattttgttttcaggttccgtaatgagtaacaccagcggagaatcctctatggaccctaattacaatgtggatgaagctgagtcctggtccgctagaccgagagagcaacatgtttaccagagcttcagggatgaatttgaacgctctacagcccgtcgtaatcagagaagagctgaaatcggtagaggaaagagagcgatcttgagtaggtatgagttgattgattaggacattgagactgagtatgagccagagtcatggcgcaaggagacaaagctactgaacaaacccgacgaggttccagtcgaagagtatatcagactctttgagctgaaagatttctagggaacgaggtacccctgctatgagactttaacccagttggggctaccagaggacgtgcaaaacctgttcaagaagtgtcatctgaagacactcatgtcctacccatacgctgcctacaaggaggaaacgatcgagtttctgccacaatgcaagtggagatgtatcagggtctcacaaagtatgagttggagagtataggattagggttcttgacgttttcggttgatcaacagcgctatcagttgtcgatcaagagtttggaaagactgtttggcttccctagtggaaagggaaccaagcctaagtttgacatggaagagcttaaggatttgtgggctactattgggaacaatgtgccgctaaactctgtacggtccaaaagcaaccaaatccggagtccagtgattcgctactttcagcgctcaatagtcaatgttctttattccagggagtctacaggcactgtgtctaacacagacatggagatgatagatttcgcacttacaggcattctccgccgtacaaagcgaaagaaggtcctgagaggcgatctcaatgacgcgccaccagtaatgcttctattgatccacctggtggatacaggaagtgagcgttgacaaacggcaagaagaaggtgagaggagcactatgcataggtggcgttgtgacgccaattctggtagcttgtggagtaccgccgaaggaaccaaggtaagaaccaagaatgatggatttagatcatttgcgttgatgtgagttcttggagcatgacatggttggcgacttctaccgctacaggtttgagcattcgtcgatcaaaatggccaatattcttctcccctgcattgaagctattagaattctcgagggaaagaacattgacttcaagcctgcgcctgaagatatttattttgagggcagtccgccaactgaggagatcactcacgaggaaggagttacaacagaggaggttgatgagactgatgaaacagatgaagtggagtatgacacgagcatgtatcattttagtgagcatgtacctccagcgagggagagcaagagtttgagtgaatctcacagaaacaacagcaagttgcaaaagtggttcaagaaacaagataagttactcatt

SEQ ID NO: 20394 - DNA, 802 bp, Arabidopsis thaliana landsberg
actcttacccgacatctatttcatccctgagcttagaagtaacattcttagcttaggacaagcaaccgaacatggctgcgacattaggatgagagagaactatctaacgctacatgacccaaatggaagactcttgataagagtattgagatctcctaacagacttttacaagattaatctccaaattgggaaaccagcttgtctatgcttaagaattgaagatgaaacattgagatggcatgcgagacttggtcacatcagcttcaaagctctcaagaccatgtcaatgcatgagatggttcatggtttaccgagagagaaaatcaactatgcgagtcatgtttagttggtaagcaaacacgccatgttttcccgaaagcaacaacctatcgatcttcacgaccattagagctacttcatgctgacttgtgtggaccaatatctcctgctacattagctcataataggtatgtctttgtgataattgatgattatacaagatatatgtggactattttgttgaaagagaagagcgaagcatttgagaaatttaagttgtttaaaactcttgtggagaaggagtgtgataagatgatcgtgacactacgaactgatagaggtggtgagtttacctcaaaagaatttcaagattttcgtgaaaaatgggatcaaaagataactaacagttccttacacaccgcaacaaaacggagtagttgaaagaaggaatcgtacgttaatggagatgacaaggagcattcttaaagcaatgagggttccaaaatttttgtggggagaagc

SEQ ID NO: 20395 - DNA, 836 bp, Arabidopsis thaliana landsberg
ccaatatatcattaagaactcaaggctaaaaagatttaagcattaaaaatctagatttggaaaatcagatatgattcttttggaagaaaagaaatgttcacggttctgatgctgggatgccaccagaatcgtaaaaactaggcggcgactcctttttatggagagaaggaagagcttttagtgtttagagagaagggatgaagacgaattctcttttgaaatcatattatactattttgaaatatttgaacctcgattacttttttattttttcatttattttttttaatactagaaggttctgggccgaatcccataatctcccaaacccgaaaccatagcatgtaatattagtttcgtcctaagcgtcactcgaaccgacgacctctagacgaacgcgtagaatctttaccaattgagctaacgatacttagtattacgttacgttcatttttactggttccaaatatggaaacattctttatcgacaaagacttgtacgtaattgtgtaaaatttttatattggtcattgtaatattcatttttggagttcagatgtcacagttagattgatcaatgaaagtttcaaaatttggactttcggtctaaaagatcaatacagccggagaaattcccaaatctctcaatcatatatttcaattttcactaaaatttgtatttgggctatattgtaagttggattgggcttttataagtgtaaacattttcaccttttcctgataggtttacttatagacgtgagagctcgctcactcatcttccaacaagccatatacattagagatttttgcggtttctttaacataacttggac

SEQ ID NO: 20396 - DNA, 1589 bp, Arabidopsis thaliana landsberg
atatttaccttttactaaaatacgaaggtttaaaaacctataaagaaaaagttgaaatttaaaaaatatttttaagaaaggtaagatttttatttttaaaaaaattgaatgtaaaattgtattaaaccaaaaaatgtttttacaatgaatgcatctgtttttgaattacatttttgaaagaatcttgaagtgataaaaaaaacttgatgactgccttacggaatggagctgagggtgagccactccatccgtccgtagtcgtagtttctgtccattgtttcacgtattgagttgagtcgatttctatgttcttgtcgatgagcttgagtagccggttgtgagttgattttatttccccatatcgccttgcgtttctttccctccaaatgcagtaaatcgtcgattggaagacataccttaggaggaagagtttaatccgaggtaagagttgagttatgtagagaagagagaacctaattctaattggtgtggaagtcaatcccacgaaatttatgcgtaagaaaagccatatttatgatgagtatcaaaaagagaagaagaggtgattttttctctcttcaacattataacaaaaacattgtctatctattaggaatgtggtctaacttaacccaaaagctagctcaagagttaagaattgtcacatcgtttatataatacctaaagatcttaatcccaagcaatgtgagacattctgatactatcccatgtatcaaccatgcaaagaaagagagtactcgggagttgcataagagaaccatatatatgtctttgggccaataaccccacgtatatgtttctttcagttcatagttagctaagtttatgcaggaatcggctgttttgtcagatttttttacccagtttttctccaaaccagagtataaaagtgtgagagttcaactcgaaagtaaaaaaaacttttaaaatgtcaacttcaatactaagacggatactcgacccgacccggaaacccaaacccgatgcaatcctctcaatctctctcctcactaccgtctcttctccgccgtctccgccatcagatcctctaatttccgacgccgtctcaatcctaacacaccaccgctccaaatcccgttggtccactctccgatcactccacccttcaggcttcacaccttctcaattctccgaaatcactctctgcctccgcaacaatcctcacctctctctccgtttcttcctcttcactcgccgttactctctctgctctcacgacacacactcctgctcaactctcatccacatcctctctcgatctcgtctcaaaagccacgctagtgaaatcatacgtctcgctctccgtctcgccgccaccgacgaagacgaagacagagtcttgaaagtgttccgttcgttgattaagagttataatcgatgtggctctgctccgtttgtattcgatttgttgataaaatcttgtcttgattcgaaagagattgatggagctgtgatggttatgagaaagttaaggtctagaggaatcaatgcacagattagtacttgtaatgctttgatcacagaggtttctaggcgtagaggtgctt

SEQ ID NO: 20397 - DNA, 1016 bp, Arabidopsis thaliana landsberg
  unsure (1)..(1016): unsure at all n locations
acgctaccttcgcccggataaggattatttatctttctcccttatatattctaacaggaagcggactcttgacttggntagtgaatgaaactcagttactttctcttcaccgtttatattatgcctctgtatatgtgaagtgaaaaggttgccttgtttgcagatttgcaaggacaaagttgaggcagaggtgtggatagctggcctaaaagctttgatatctggtcaggctggccgctctaaaattgacggctggagtgatggaggcctttctattgctgtaagtaataagcattcctaaagactatagatgtttgcaaatgtatttctgaactttgtttttgtttcaatttcatcatttccaggacagtagagacttgacattaagcagtcctaccaacagctcagtttgtgcttctcgagattttaacattgctgatagtccctacaattcaaccaattttcccaggacttctagaactgagaattctgtcagttctgaaaggtcacatgtggcatcagatagcccaaatatgttagtacgaggaactggatcagacgcgttccgggttagtgtctctagtgttcaaagcagctcaagtcatggttctgctccagatgattgtgatgctctaggtgatgtttatatatggggtgaagtgctatgtgagaatgttaccaaattcggagctgataagaatattggttatcttggttcaaggtctgatgttctgattccaaagccattggagtccaatgtagttttggatgtccatcacatagcatgtggtgttaagcatgctgctctagtctctaggcaaggtgaggtttttacatggggtgaagcatccggaggacgtcttggccatggaatgggaaaagatgttactggaccacagcttattgagtctctagctgcttctagtattgattttggtgcctgtggtggggtccatacatgcgctgacacagagacagggaagatttacacatgggttgatggaacacacaatgca

SEQ ID NO: 20398 - DNA, 849 bp, Arabidopsis thaliana landsberg
attctggttgctactaatggaatggcagctgtgaagtttatacgtagtgtcagaacatgggcttacgaaacatttggctcggaaaaagcggtaaagttggtggcaatggcaactcctgaagacatgaggatcaatgcggaacatattagaattgctgatcagtttgttgaggttccgggaggaactaataataacaattatgctaatgttcagcttattgtggaggtgattagtgcaactttttggaaaatacttatgttttgttattcgtcattcatatatgtatataaatgatatgtgcagatggctgaggtcacgcgtgtggatgcagtttggcctggttggggtcatgcatctgagaaccctgaattacctgatgctttaaaggagaaaggaattatatttcttggtcctcctgcagattcaatgatagcattaggggataagattggttcgtcgttgattgctcaagctgctgatgtacctactctgccatggagtggttcccatgtaagtaaatttactcttgttaagcttagcttgtgtaccagaggtatatattttcatttttatatactgaattcctatgttttcaggttgaaatacctcctaatagcaacttggtaaccatcccagaggagatctaccggcaagcatgtgtctacacaactgaagaagcgattgctagctgtcaagttgtcggttacccagcaatgatcaaagcatcgtggggtggtggtggtaaaggaatcaggaaggtcagcttctgtacatacgccttttgattgtggactaagccaaaaactatataagtacttattctggttttaaatttataggttcatagtg

SEQ ID NO: 20399 - DNA, 780 bp, Arabidopsis thaliana landsberg
tcttcccgcctcgtaagtattcattcatatcaatccaaatttcaccaaagtttttgtgtgttttaagtacctaaaaccgttggtttggtttgcaggctactccggagctggagtatggacgtatgaatattggaagtagaccttcaaagcgaaaaccaagcggtgggatcgaatctctccgtgcaatcccatggatctttgcttggacgcaaacaagattccatcttcctgtatggttaggtttcggagcagcatttaggtatgcgatcaagaaggatgtgagaaaccttcacatgctgcaagatatgtataaacaatggccctttttccgagtcaccatcgatctaattgaaatggtgttcgccaagggagaccccgggatcgctgctttgtacgacaaacttcttgtctcagaagatttatgggcttttggagagaaactcagagccaactttgatgaaaccaagaacctcgtcctccaggtataacataacaaaaaacagggtcctctgtttcatatttgttgggtttgttcttgcaataacactaaacttgcgttgttgcagactgctggacataaagaccttcttgaaggagatccttacttgaaacagagactaaggctacgtgactcttacattacgaccctgaacgtttgccaagcctacacattgaagaggatccgtgatgcagactacaatgtgactctgcgaccacacatttctaaagagatcatgcaatcaagcaaatcagcacaagagctcgtaagcttaaccccac

SEQ ID NO: 20400 - DNA, 549 bp, Arabidopsis thaliana landsberg
cttaaaccacacaaagtaaaaagatacttaacgaaaaaaaaacagatattgtataattaactagagtcatgaggtagatatatataaagagaagaacatcaggctaagcgcgaacctcaagccaaactccgtcaatgtaagaaacgctaccagcgagaacaccggtattgtagttgtgcactctctcgcgatcagttttagtgccgataaaggctagagttgtgggactttgtggagataactgaagtcgatctttcacctgattaagagactggtcgtggaaaggattccattcgataggatcattctcttgaatctctgagttccagtgttgggtttggaaggtgaagtcataacgatcgggtctcggatcaggaaatagtagaactgatattttttccgaagatggggagatgaactttataaatctcattcgagttaatgggatagggatagaagtcactgaccaattcttagcccatgctccgttcgttctggctacataataaattttactatgtagcctaggatgcaagcgattaagtatgt

SEQ ID NO: 20401 - DNA, 740 bp, Arabidopsis thaliana landsberg
tctctttgaaaaaaaatatttctcattattatttttcaaaataatatatcattttttttttttttggtaagtatcaaatttcctatgatatgtattcattttgaatacatcaacttcttattattgtaagccaaaaatgtaaaatttgatcacctatatttaatcgacatattagtgatatttaataaattacttgcacccatatttttttttttgacatctttgaatcgataatatccgatctataaccaatctctataatacgggataatacggcttaatggaattgaactctgataggaaaggtgtaatcaaaatggagttaaccacttaactaaaactacatccctgaccatatttttatttatttaaaagtgttctctccattaaacaaaggagaaactcttatacaggggaccaacaatcgataagaaaaacgactgaaacaattaatacaacataaaaatcgtgagctaaatattggttttgcaggaatatcatattacgaaactagtcgtaagaatatagcggtatcaacaacatattatatgtaaatttacatttagggataacataacgattatcgacgattttaacacaaaccaaaagactccaaattcaggtcatttgtatacattttctacaacaatattttcttagtttgatcaaaaaaatattcaacacttgtgtaaagtttagtaaccatggtgaaaaccaggcttaaattggattggggtaag

SEQ ID NO: 20402 - DNA, 892 bp, Arabidopsis thaliana landsberg
  unsure (1)..(892): unsure at all n locations
atcaaaatgatgacactaataagagtggtttggtgtgaaacttagacctttcttacacaaatttggtaaagccaaaactttttttggtcatggggatttatttttttttactttttttttttttttttgtcataaagaaattatagaatcttgttgtgaaggacgtaaaatataatgcccaaacaaaaaaaaacgtaaannnnnnnnnnnnnnnnnnnnnnnnnnnnnaacataagctggcggaaaaaaagaattcttcggaatctagatcctaaataaagaagatgaagtaaactcaaattataatgcaaaaaatatcaaaccaatctcgaaaaaggacgatagtacaaactaagatccatattaacaaaacaaaatcttaaaaaaataagagatccaaaaaagcagaaactccacttcttttaacacacctgcaagtacgattgatcaaatccaaaataacatttaccacctcctatcacgttgagagccaatctctcgagaaccaaggatatcataacccgacatgcaagaccactaaaagaaacacaaacaccattccagatacgacgatgaccaccaattcgtcacttaacgtctagatagaatccttcaaaaaacaatcagattacgacaaaattgtaaaagaaggacaagaagcgaggcaaaacttctcaaaacccaccaatcacaagatcaccaatcacgagtaaagccacaactattttaattaaatcatacaatatcctaaattaggcttttctttttgataaattaaaaaaaaaaagataggatcatccaacaaaaatagtacaaacaaaaaatgtcaaaatcttgcatcacctctagaaacctttcatggtaacaaaatcttgcatatttttgcctatac

SEQ ID NO: 20403 - DNA, 1687 bp, Arabidopsis thaliana landsberg
  unsure (1)..(1687): unsure at all n locations
tgacgtgcctttggatcctagtgatgtagagataagtgctatgcttgatatgctggccgaggactcttctgatgctgctcctgctgggacattggtggtggcgcctctcccggaagctggtaaaaccttggatattcagaggcctgttagtgttcgcccgaagcgcccttgccgagccaatcagcttgatcctcctgctgatgagcagaaaaagaaaaagagacgtctccggcgagtatctagcttggatcgggatgttggtccttcggttcctgctgctgaagaagttcacgtgcctgagcttactgtcgctgaccccaatgggtgtgatccgtctgttgctgatcccaatgggtgtgctccttctgctgctgaccccaatgggtgtgttgtctgtgttgccgatgaaaacgacggggaggaagaagatgaggtccctttgactcggaagaacagtcagcaatatgccgccagtggtgaaagtagtggagttccttctcctgctttgtctgccctcatcagtctacaagaattgtccctggccaactttgatcagactctggaggatatggtcccagaggacctgttatcggagccagtggatgatggtgcaatggaggcttgcgctgacgtgcccgatgctgggttgaggtcatcccgtgcctcgtcgaccttagagcacgatctcgagggccgggagactgacttggatcgtcctggtcctatggaagtagctgagggcccgtcaaccttagaggtggttactgcagagagcttggacctcaagaatggtgctgacacatgcccagcccccgagggtgtcgccggggatgacttagctcgggtgaagagtgtaagccactgcccagcccccgagggtgttgccggggatgatccggctcaagtgggcagtgccaattgtgaccagcccccgagggtgtccgagcaaggtctccttcctgcacttccatggatgttcatgcgggttcacctccacactctggcggtatagtggtggcccaaactctggatcagggggtcgctttagagggcagcatccccactggtctggcgttaggctctgctgaatgtattaagctcgttcctgctggtctactgcaaactgcttcgggtggtggtctgacacctgactatcagctgatttctcctgacttggggatcccttcgttcttttccaaccttcaggtactgtgctgtattttagcttgatctttatgttgcatgaattgctgtcgttatgctcatctgttttcctcattaggctttggtggatgggatggctagccagctgaggctacagggtgcttccgtcccagaagtagcattatcccttgcatgttggaatccagtgtcacttcaacatcgcgtctctgaattggaggcaaccaacgctggttagtgcctttttgcttctctttgccttcactgactgctttaccttctaaccccgttttgtttgattatcctttgctagggatgactcggcagatttcaactcttgaggaaaaacattcccgagatcaggctgaattggtccagcggtgtgctgacttcgaggagaagtactctcagagccaacctgagctcggtcaagtctctcccgctttcgatgatgccaatgcgctgagttaaaaatcttcgaagatcggaaannttcntagataaa

SEQ ID NO: 20404 - DNA, 576 bp, Arabidopsis thaliana landsberg
  unsure (1)..(576): unsure at all n locations
ggtcatggcgagtaagcactaatggatgaaaatgatgatgaacgtggaggacaaagatcaagactctgtgtgggattttcggagagatgccatgcacacactctgattcttcatttgctgaataggcaggtggtgaaggtaatggagtttggagtggagtctcccatgtttatcctcctcggaacacacttggtatgctcaacaacctcttctagatgttatgagacttgcttctggagacagttgagatattaagacaatgggctggcaaacttgcgataacaaactggccttcgtatgttggttgaggaatatgccaatacgcgtgacagaaaggaagtattcaaaataatgaccagcagttatgtaaatttctcatcctataaaaatggatagcaaatatcaactactaatatttgagagtttgcaactttttttaacaaaatctaaggaaatagagagaaagcctaaaaaaaaaacaatggactaatatactaacataatatatggacagacaaaaatagccacttgcgntttctatttctttctcttaatcaaaagctcttccttcttctt

SEQ ID NO: 20405 - DNA, 784 bp, Arabidopsis thaliana landsberg
agatcaatctgttgcattttccaaatttcgatgcttttttgagattgggtttctctttcttttgatgaaacttatcactttcaggtaaatcctatagtctaaacacttgcttttacgaaatttcgttactaaactgaagttaaattcgccgcctttgaatttctcagcgttgcccagttttggccacaaggtgtttgttgaaattccggagagagagagaagctcgaaattgggaattctgtaaggaaaaaaaaatgagagattttccttcttgctctggtgaaaatggtgttcagattgcggactcttcgtcttcctcgagcgctggaagaaatgctcagaatttggtaatatgcatctaccgttgccgcatccgaggtaggacttgcttgatcacagtcacatggactaagaatctgatgggtcagtgtgttaccgtgggggttgatgattcttgcaaccgaagtctgtgtaaagtcgagattaagccgtggctcttcactaaacgaaaagggtccaagactctagaggcgtatgcctgtaatatcgatgttttctgggatctctcgtctgctaaatttggatccagccctgaacctttaggagggttctatgttgggagtgttgttgaccaagagatggttcttcttcttggtgatatgaagaaaggagctttttaaaaagacgaatgctgcacctttttcatctttaggggctgtgttcattgcttaaaaagagcctgttttttggcaagagaacgtttgcaactaaagctcagttttta

SEQ ID NO: 20406 - DNA, 1319 bp, Arabidopsis thaliana landsberg
  unsure (1)..(1319): unsure at all n locations
tactagcgcntgagttccacttccagagttgtgaagcatctctgtccaatactgtgtccgcatgatagaaacgtaccattggaatagcgcatgatccatgctgcttgagaggggttgtcggtcgagtgaaacttacagtcaaagttacattttacatatccactcttcggtttttgccagtttgatagtaacggtcgtgttctcgtggtcgtaatgctgtttctcggattgtctaaccagcagtccacccattctctcgcttcttgctctgccttgatgatatcttcctgccagttcccatccttgtgttgataaactaggaggtttctgctcttccaaattctccacagtagccaaagaggtaattgtcggtctatctcagagaggtaatgattgttgtaacactcaatgatggctctgaatttttccgtgaacgttccaaatgggttaaagttactcctttgtagtccaacattgtgcctccatatgtcacgaacatagttacagtcgaagaatagatgttcaattgactcttccgctatgccacatcgtttacattgtgaattggtgatgatattccttctcgtaagaatggtacctgctgccaacgcattatacaagattctccacatgaagtgttggatttttggagctgtcttcattttccatatggccgatttgaactcgtgtagtcccggaggtggaatgatattcgtttcgtttcctggaaggtgagttgcgagccaatatccagatttcacagtataaaatcccgaatcgttgtagtgccatcctagtaagtccggtgaatttgtagggctaagtttgatgttgaggattgtgtgaatgtcttcaggtatcactgtttctctcaaccgatcaagattccatccgttcctttgttcgttcatcaagtcgcacacaaggtagtgattttccggtgttcccgccaatcgatttggtggtctcggtggatgcaacggtagccatgggtctagccaagcacttgtgttttgaccatttccaattagatacttcaaaccattcttcagtagttctcttccttccagcaatgatttccaaataaaagaagccttgtatcctggtccagcgttcaaaatattggtgttgggaaaataccttgcctttagtagctttgagaggagactgtttggtgattgaagtatcctccatacttgtttccctaacagtgctaaattgaacttctcaatatctttaaatccaagacccccttcattttttggtaagctcatcctcttccaggaaatccaatgcattgctcttctatcacggctttt

SEQ ID NO: 20407 - DNA, 508 bp, Arabidopsis thaliana landsberg
aggactattttataacatcatcatatcaaccgtgacttcaaaataaaactgatggtttaaattagaatatgcatagggtaatcatatctaatcatatctatgcatacattctcgagtaaaagtaaatgtatacatatatatccaaattccttggcttaaaagatcaaagtgtaatgatgctttaagataggatctatcataagagttttataaggtaatgatattcttatatatgctactaacctaattacttgttttctataaccatgacaagtaaaatatatatatgatgatgatgatagagtaataacggtgtgaaacaaaacaagactagaatagtgtaagaacaaagaactattataaatttatatatagcagcgtcatagcatagaaattagcctcatatctaaaacactattaaggcatgaaaatctaaaacaactactatctaaaaacactataaaagcatgaaaattatccttcatatatatctggttatatctaaccc

SEQ ID NO: 20408 - DNA, 1366 bp, Arabidopsis thaliana landsberg
  unsure (1)..(1366): unsure at all n locations
caattttagctttgttgaaaatatgactctgtttatgggagatctgtaaatcttcttcatcttcttcttcagtcaacaactattcaaccttcaagaaattttgcagttcacgaaacatatacttgcttttattaagaaagctcttactatccaaaatatttgtttcatcattggaaatcgaaagagtccaagaaaaagaaaacaacagttagaccaaacctaaacggtctggagaagaagctagcctatcatcaccgagagaccgctaaatctgaagcgaaagccgaccaccgatgttgattaaaccaccgatgtcagaaacatagtcggatgaagatgcaaacgaagccatctacagtggaagcaaagccagtctacaccgctgagaaagccggtgcaaccagacgacaaacccgcttcaagcgggacaaaagtcacagattaacacatcagtgaaatcaaaattgataagcttcattctctctaaaagatgaaagagagagaagagagagaagccttttcttggcatccttccctaaagattttcattttgcgaacttagatggggtgacaaatagaagtcacaatttatgagttttatctatgcaaataccaaaagtgttaaattgaaaaaaaagactagttaccgaaaggttccatacacggtaatcgagacatcccttgcaaccatgccttcctgagccggtgagactcatgttcgtcgcgtaggaatttgccaaatctctgtaatcttcttcagttcttcgtaatcttatggcccatgttatcttcctctttaagtgcatcttccttgcaaaatcctaagcttttcccttcttttggtcttcttctctgagggtcttctctacgacggaagagtgaattgatactctacaagctctgttccgaatcataactccgacgaagatccgcctttgaacccgataaaagaagaatcgcaatactccaacattgtcttttcccaaactccagagtagtccttcaccgacacgtcatttggctctagatatgtactagcaccggcatcgcctttagttccttctcaccgggtttcgttgatggcccgcgaatatcttggaccatcagttgtgctttttccggtgagaaagtcgacggcacatgacgagctcctttgttggcaggtggtttcccaggtgcttcacgtcgatcatcacttcagatttnnnnnnnnnnnnnnnnnnnncgtcccttctcccaaccgcagcaaccctagggtttggtgggatgggacttaatccttttgaccgccaaatgaacaatcttcgctcttggtgggctgggctcaatccgctggctgtcactactctaaactaatttaaccata

SEQ ID NO: 20409 - DNA, 357 bp, Arabidopsis thaliana landsberg
aaccggttgcatcatcaccaccacttattgcttcatcatctatgcctggaccggggggggcatcatgggcaccacctactgcatcagtataagcatcacaggcttcatcaccatgaactgcgcaatcatcttcgtagtcggggtcgggatcaatttcagcctcgacttcgtccgtcactcttatcgtgcttcggtttcgatgccggcttggaacacaatcttctcctccggcaacaagctctattccgactggagcttcaaccggtggaacttcaactccgtctccgacgacactcttaattcgactgccacttcaacttcacgatccacaacactctctgattcccctgatccaat

SEQ ID NO: 20410 - DNA, 393 bp, Arabidopsis thaliana landsberg
aatcaataagaattggtgataaaaacttcgggctcatggaccttttaaatctcttctaaagcatttggctgtcactctcatgttggtaatggtgaaattgcaagcttctggtatgatgtgtggactcctcttggtcttctcttacattactttgccgattttggtccaagaagcctcaggattccactgaatgtcacagtttcctctgtttgcaacgagaatgactggaatttacctcatgcgagctctgaccaagctttttgtaggctcatctaacaactatgtgacatagtctatgtctctcccttcacttaactccagggacgaaaattatggctggttcgctgacggtcttaagtgtacaagttttttttctgcgaaaacttggtcggc

SEQ ID NO: 20411 - DNA, 416 bp, Arabidopsis thaliana landsberg
tatttttcgggttaattaaaaaagacttaagaattaatttgttttttatttccgtccttaattctttttacttgccacatatagcatgaaccacgacggttggataaattcaacggtcacaatattgccacgtgtaagctttgtatctacatcctccaatcaacggccaagtcctggttaagttttagccaattagagtcactcagctcatattagcctttttgctctttctttgcttctctaacaaaccaacttcagcgacaagataacaaaacgctttcacacgatcggataaaatggcggagaagagctttaagtacatcatcctcggcggcggcgtctctgccgtgagtatcttcctttcttcttaagttttttcagccattgcttttgattttcgaagagcttgattcgat

SEQ ID NO: 20412 - DNA, 702 bp, Arabidopsis thaliana landsberg
gaatctttttaaaaaattcaaacttgcaaattttttttcttttcttctcataattatgaaaattatttatttagttttcagaaagcaaaaataatatatccgagacatgcaatcctattagactttgaaagagttttttcaatgacattgtatgatgcaaaaaatactaacataaacgatcactacacacaagaaaaaaaactttaaaaaatacactagaattggtgcacgggaaaggccgattgaaaataatctaggcccattaaagcgaagcccattctcaaccctatatatttgcggggttgatatttaattttatctttcaatcagggatttcgaaaccgaaccgactctgcttatctctcaggtaaatttctctgctccttatctcttcatgtttctttgcaaattcatcgactaattgcatagatagcctacaacttatatatatattctgaatttgtttttttcttttcttacctttaaggccttgaatgatggagggaggcagctgtggccacaatatcggtctattgggagataaaggggtgtccggttccggatggctatgatgctcttcgggtaggtccgtctataaaacgtaatttgaggaagtttaactacactggccctatcaccatcactgccgttggcgtactatcagaggtccctcgagatttccttgaaccactggagagtgga

SEQ ID NO: 20413 - DNA, 1326 bp, Arabidopsis thaliana landsberg
aagggcttgattggttctccctctaccatctcgcaaatgcagcttttgcggttggtagcgggtgttagcgatgggcaccaatcatagaagccgctagatatcgctttggaccgctcgaaatcgccagttttcaaaagctcattcccgcaagcgttttcggttgcgggcggtagcggttaggttaaattaaataatcttttttaattaattaaaataattatggctttcatccaaaccctaatcactatcattcaaataatctaatcttttatatatcttatttttattagaaaaccctaatcaatatattgtaaccatattctctcaattatggcatccgatgaaaatcaaaatcaataatcaaacataagtatcatctatccttttatttattcattagctagtgtaattcttcgactatttcatggcattgcttttatttattttattttgcattcttttgagtcttttgattgaatacatgttttgatttgttttctcaattagaaaatcatttggtcagacgagatgacccgtttcttgttagaactgataaccctagagaatcaagctggaaattatagaggcaaaagtttgattgagaaaggaaaagaaaatgttcttgtgaaatttaaaaaacgatttccaataaccttaaattggaacaaagttaagaacagacttgatactttaaagaagcaatacgaaatctatcgtaaaatcatgttttgggtcaactggtctcggaactaatcaaaggacaggaagtcttgatgcccctgatcattggtggaaagataaaattaaggtatgttatcacatatgtatatgttaatttcttattttatattcttattttgattggatttttgtttttggtttattgggcttatcctgaagctgctaaacttcggtcgcatccactgcggtttataccacttcttgatgtagtcttccgagatgaaactgttgtcgttgaagagtcatggcaaccaagacgtggtgtacatcgtcgtgctccagtactggacttaagcgacagtgaatgtccaaacaataatggagatgagagagaagatctgatgcaaaatcgtgaacgtgatcatatgagaccaccaaccccagattggatgtcacaaaccccgatggaaaattctccaacttcagctaactcggatcgccatttgcatcacaagagagatcttcacacacactcaagtgaaaaatgtaagcaggaacagaaagcgtaaacaaaattcagcagactcgacgctcgaccgtattgctgcggctatggaaaaaatttgagttggagatgtgttaaaa

SEQ ID NO: 20414 - DNA, 635 bp, Arabidopsis thaliana landsberg
ccaatacgatactagcatctccaagtttgcgatccgagtttgagatcgttgcagctctgcatcacgtcgagcattttctgcgtcatgtctgccatcttttgacgaagttgatcatgaagctctgtaagtgaggaagaagagatgtttgcatagctttcttttcttttccctttgttaagggtcaccataagagatctgatgccaaaatagtttcctttatcatctgtttcagtacacttaagaaaaacaaaacaaaatcatgctcacaaacaggaagagatcaaatacataatcatgttcagcaaaaagtaatgattcacaaaccatcaaatatatacataagcaatctaagacgaattacacatacaaaaatgacaaattcaagcaacattaagtatatgaaacaaaagactgactatggaaatcattcaagcaacatcaagtactaatcatcaaacatggaacgattatattattaaaagacaaaatcttactcgaaattaccttgagaaagatgtcaatcatttcgtcaatgttgagttcccgctgagttgactactgattggaattatctgaatttgctacaccatcctcttacattaaagaaattctctcttctatgctcttccatagac

SEQ ID NO: 20415 - DNA, 845 bp, Arabidopsis thaliana landsberg
tgcataggtcgactctagaggatcccagagagttattttggttctatagtagtgggaggtctagtagtgtcatgattgttgcattcatgctgctgcatagtctttccaagtgcaagaagtgtttgaatcgtgtcaatatgtcttgtagaagtcgcccgtaaatttttatatttttctgaatatttttctatttttagaaattcaaaatctatttatttgaggcacttaaaaacatttttaaagttgtaaatatgttttttgagttcattgggtgccaaatcatgtctaggaagtttcctagaatttttagagtcttcgagatatttttcggatatttaaaaaggattttttcagccttttctaaaaatgaattttaattttaaaaataggataattacgaaaaataaaatatcttcaaaccctagcaatatatatggctggaaccctctcgtcgaaccctttccatatcctgaaacggtttctccagtttcgattcacaattcctggaattgctcgccgaagtttggagcggttctaactcccgcgagcaattacattcaatccgtgcgtcgttggcggaatccaagcgtaccactgcgttcgtcttgtcgagagcttcatcccgattccttcgattcatcgatccaaccgtcgattcgcctccaatcgacaattttcttctcggctccggcgaactccatcttctccggtgagcttccctccattgttgtccatggagttctccatttttccctccactccctctctctgcccggtagcggcgcccccttacccccctctcccccccgcttggctctcccccgcgacggtggtgttcagcggcg

SEQ ID NO: 20416 - DNA, 1119 bp, Arabidopsis thaliana landsberg
cggtgctccctggttctttatttaaattacctttcctattttctttaactttaagcacaatgtgaaataaatgacaaactctaccttaatggggtgtacagaggggtttatcatttttaaacaggttagtaggtgatcaagtacttctctaaattttcttaacttcagttaaatagtggaactattgttccttatttcttttagcttttgaccagttaatcatttaattcaaaactctaaagttttctgtatcacttaggggttttatattttttctaagtagtttacattatttaggatctggcaaaattggtttgcttgatttgagtaaaccaaactgaagttatgaattttccaagttctgtttggatttaaatcataatttttaaaaggtttcctagaaaactactttgcaccgaagaccctgggttcttcctaaatcaatccattcatttctacccctgcgctactattcccctgagtcactgacaacgcacaaaacccactggcctttccttcttcttgcccgaggtccctccccttatttaaacagtaaccgtggaaataaacagggcggcgcggcttaccggcggtgagggaggtccggcgatgggcggggttggctccgggaggttcttgcggtcacaacgaggtacgactagacggcggtggtggccggaatcggcggtccacgtgcgcaggcgggtgaactcgtcggcggcgagtgctccggcctaaccacggcgacataggtcaatccaagggcactgggagcttcacggggtgttgatgagtcgactcgtgcaaggaattgaagaaaactcaccgttgagctcgatctacgttcaccggcggtcgggtgaagtccggcgaccgtgaactggcttctccggcgaggcaaagttcgattcctcgctcggggagcttcatcgaggcattcacggtctactccgagggtcggacgcggctgggagaggctctgctggccggtctacagtggcgggggatcggtggctgcgggcacatcgtcgcggggcaacaccggtgatctggtgctcggtgaggtcgagcgcccgggggagtcgactaagtcctggtggtttaaggccgagcgggcaa

SEQ ID NO: 20417 - DNA, 918 bp, Arabidopsis thaliana landsberg
  unsure (1)..(918): unsure at all n locations
aacccacaagtcgacttgcaagctcaggatcgtgcccataggattggtcaaaaaaaagaagttcaagtgtttcgattctgcactgaggttggtctcctctccgtgaatttcaagctaaaacagccatgagaggtttaaaattaattatgtgttgtttgtttacagcctgctattgaggagaaagtgattgaaagagcttacaagaagttagcacttgatgctctggttattcaacaagggagattggcagaacagaaaagtaagtgcgttatacagtgattgctttatgcattgattcatctctgacagaattggaatttatcttaactatgcagctgtcaataaggatgagttgcttcaattggtgagatatggtgctgaaatggtgtttaggtctaaagatagcacaattacggatgaggatattgacagaatcattgccaaaggagaagaggcaacggctgaacttgatgccaagatgaagaaatttactgaagatgcaatacagtttaaaatggatgacagtaagtgtgctatttatccctttttccaatggtaactcccttgcatgggtaatgggatgtccatataagatagtttttggtttgttgcaggtgctgacttttatgattttgacgatgacaacaaggtattcttggataattaattgaatgattgaaggaaaggtttaacgcatactgtggttatgctctgcagtttttcgaatatcgtttcctgatttcttttttaattttgtttggtaggatgagagcaaggtggattttaaaaagattgtgagtgaaaattggaatgatccaccaaaaagagagagaaagcgcangtaaatattacttctactttttcattacgtggtctatcctgtcttccctaacaatatctaacttcaacaattacttt

SEQ ID NO: 20418 - DNA, 1764 bp, Arabidopsis thaliana landsberg
  unsure (1)..(1764): unsure at all n locations
aatacatcttttcacttgttgtaatcataatcttcgccactactttcactaccatttatagtatttttcgatggtacttgcccccatagatccatcgtcaccctgataatcatcatatccatcaccatctttgttgtccccatcttcatcctcatctgttttaccgtcttcaacgtcgtcttgctaatctacgacctcattattttcatcaacatttcaaacactatcacacacacagtcactttcagcatcgccaccatgaggcctagagacatcattctcgagagtcttgacggttgtaatgaacgagacaaacaagttgagagaaggatacccaccacgaataaaaaaaaaagtatcccaccctcacttgactgtcaatgtagacagaatctatcatcactaacatctgtcccagcatccggggactaattatgggattaatctctatggacttcaaactgaaagcctctcggagtgtacggacaaagtccgtgtacgtcatggtttcctgaacgcgtacacaacgaccaaagatgccttcctcaggttcaaatttccattctccttctttgcatttccactcaccgaccatggtaaatacgggaatatccataacccacctgcatcataaattcaggagacacacattaaatgcaactgaaaaatactatacatataaaaaacaaatggaatgtcgatactacacatttataaacctaaataccaattatcatttgactattttaaacaaacaaatatagattttgcaaatattctgataaaaaaatggagttcgaacacaatcaagatcctaatatgacataacaaaaaacttcttaaaagaacttcattacttacacgagcaatgcttgttttggctcctaacttggtacaaaaacaagatcaacacttcttcagcagcaatgtacgttctcaataattctttgttcctgggttcatcttctttatctcaacaatttttttattaattattatcaataatttttttaatattatttgatgtaatgatgattttgcattaattgtgacaatagtcacatctaaactttttgagggcattaaatgttgatgtcacttcggaataatggaaataatctcacttgtaacggaaccgaatcgcgtcaacgtgaaacaaaaaatcttcaactgaaccggaacagtgtacttaactaaacctgctaaactaaaccgtacatttcaacagttactaagagagaagcgcaagggcagaagcgtcattttgcaggcaaaaagacaaatggtgaaaaccacttttcactttgtcaatctctgaaaataaaacatggtcaaagggtgtcgtccgcaaattaccctttataataccatgtcaatgtgaacaaaagaagaagaataatgtgttggtcatgagaagaagatatgacaaatctatnnnnnnnnnnnnnnnnnnnnnnnnnnnnnnnnnnnnaatgaagtctagtagagcaggcatgaagccaacatgtcaaatacatacttggggcctatggtggtgcggtctaaacatttaactagtgtttgtgacatattgtttcaaggcttatagccttgccaaagggaaggaagtaatagaataattgaagacttctcttggcttgtgattgagttgtaaaaagcaggggctgggcttggcctcctaggggaatccagacactagaaaaacaatcgtcgatggaactctcaactaaaggaaatccacacacaatactacttgaagaatct

SEQ ID NO: 20419 - DNA, 2908 bp, Arabidopsis thaliana landsberg
  unsure (1)..(2908): unsure at all n locations
ccgaaaggtatggccctttatactttactaagctgcaacattcgacatgcttacactatttgcttatgtgtaagtttctttattatgtgttagcaaacaatattacgaaacatatgggttcgacgatgtgatgttctactctgttatcatggccgaaagaaaggactggccagacgagaaacatggatggctgggtgatgatgtaagttactgttatgttctgtctgagtttggctaatgttatggctgagttatagtgtcgttatgtctgagttacagtagataatgactgatttacgatgtaagttattgttatattctgtctgagtttgtctaaggttatggctgagttatagtgtcgttctgtctgagttaatttagctaatggcagatttatttaggtgttaaggctgagttttacttggttacgtctgagttaatgttgtgttttgtcttggttttattttttgttcagcacattgctgcgtatgtgaaagtcctcacgacgaggctcctgcgagatcctaccccatactacagcgaacgcgtcatgattctagacccgtggttcacgtcaatgtggactagggattacggacagtggaagatgaagccgaagaggttttctttcaaaggttctacgtatgaaacttgggtcaacggtacgggtggagacgacccgacaaataagaagtggataacagatgtggatcacttgtatactatcctccaaaccggaggtaatcattgggtgaccattcacgtggacttgcctaggggtcacatggactgctatgactgcatcgtcggatgtcatacaccggaaagcgatggaaaaatcctggaacactgtaggccgttcacgaggatgattccacagatcatgagcgaacttatccctcccgaagtccgtgtcccgcaatannnnnnnnnnnnnnnnnnnnnnnggaacattacaagggtcccgcagaatattatcaccggggactgcggcgtttacacgttaaagattcttgaatgtttattgcttggtgtttcttttgatggccttactgattcaaatatccaggggctacgggttaggatggcaacagagatctacgatgaactacctcacagaatgctcattcggttttttgagacatgatttgctttttcgaacatgtctgtgtcttttgggatttttagcatgtgattgtactaaatattgacactttaggatttataaccagaattatgtctatatgaatctattattatgttaattataacaaaaaccaatgtaatggctgacttatcatcgctcgattcgttttacggctgatatatgctaacgtgaaggctgacttatcatcgctcaactcgtgctacacggctgagttattgttgtttaattcgatgtttagctgagttattataacgcggtggctgacttgtcatcacacaaatcgtttgatggctgagtttgtataacgtggtggttgacttgtcaaacccaaacttccctcccatcaaataaaccagacgtcactttaggactatacatacaccggtttacgacacctgaatagtcaagaacccaaacgtcattagaggaccaaacgtcgttacgttagaggaccaaacgtcgttagaggactatatatacactggtttcctcttgtcttttcacttgtcgattcttagcaactacaactcttcattcttctcttgtcctttctctgagaaacaaaaccattccgagatcatggatgcatcagattcaggttcaggttcaaacaagcggcggtgtgtggatgacggtcccaacaaggggccgtctgtggatgacagccccaccctaaagctgtatgaacaggagaagcgtttcaaatccgtcatctcttacatcaggagcaacataagggagacggcggaagcacacttgcttgatatcaaactgcatgagaaggaagcggaacttaaggtcttaaggaaagtggagaaattgggggacggatttaacgtgaaatacgagatcgagaaagtgctggcgcaggttggcaaggcctacagagcgcagcgtgaacgcccggtgagtagtattgattgggagaaactggggtatggatcgaccgggcgtccaatttcggagtccgacgaagaatgaagatggcgattgatgtaattgtatcttcattttttattttcaattatattatatgtatgttgttggattccagtactccttatcctatgttatcataaactctgtcttttcaattttcaaacttcactttttattttatactcgcgtgtgtgattcaaaaactttgtctttcagatttatcgtagattaacttgatgtttggctgagttaaacatgtgactcaatcattgttattctaacgttaaggcggacttatcgtagattaacttgatgtatggttgagtgaatctaacgttacggctgagttattatattttaattcaacgttggttgagatagtattgagttgtggatgagttagtctaacgtaacggccgagttattataaatttaatccgattgtacgttttggctgagttataatcgcacaatttcgttgacttaatgataattgacagtacaaagaagttcaaattgagaaaaacagattaagctaagatcatagatacttgttcaagctctcatacttgttctctagcgtttcaaacttcttttccnnnnnnnnnnnnnnnnnnnnnnnnnnnnnnnngcacttattggctgcttccagatccttcttcatctcactcgtctcctcttttatcatgtcaaactcgtcacacaatgcaacagtccaccatctcttgaaaccgcatccttgacaaggacccttataaaaaaaacaggaggttgattcataggaatacaaaatgaaagaaa

SEQ ID NO: 20420 - DNA, 1003 bp, Arabidopsis thaliana landsberg
  unsure (1)..(1003): unsure at all n locations
ctcgattctaagattaagggagtaactagcctccaagaaaaactgatttcttcgttggcttcatgaagcttcttatactaaggatctcgttntgggtaacaggtctttttgtaggtatggtctccaccattatttcttgcaacctcttcctctactttcaggaagttgatacaagcccttaaactaacagactccatctctctcttttctttgtatgtgaaaacttttttttagcgtcacctcatacggttagctaacgactttaacttctcggcttcctaatactactaggcttggtctacgaatcctaaggttccatcctaacttttatggttctttcctaactcttttgaaatggtcttcccgttttctagactttctaacttctttgggcaaggcttcaaggatttgatacttggttaagtacgaaacgaaacaaacacatataaacgcattaataacttgaaagtaaatcaagcaatcacacaaaataacatttgtataaacataatataacatagcataagttaacaaccataagtggaaaagaggtggttttgactatcgtacacacccacttattcaagcctacagacatcatcaaaaagatatcacattgtaacgaaggttactattggctctcctgtagccgcaactatacatcaaaaatggggttagtttcctaatatttactaaagttaggactcctaagggaatcacggtaaccctaaactacacctggaacaggtacatccaagaaaagatcatcattggtagcgggaatcggtggggatgatggactaattgcgtgagacgggggagtacgggttggtgcaggaatctgagcataatctctcaacagcatacatgtagcagcatagtgtccgtactcacaacaatagagacagacaacggtcatggacatgtactctgtctagaaccgacaatctgcgggtaacgtccatcttcgccatcttcagatatcgtactgctttatatatgg

SEQ ID NO: 20421 - DNA, 154 bp, Arabidopsis thaliana landsberg
acttgtttgccttccaatttttgtacgaagtatctagtcgagctacatatgagtaacagcaaacttcagaacttgtggcaagcaaatcaggtatagaattgtggtgtttctctccaattttataatattgggttctctttcctcacatctttca

SEQ ID NO: 20422 - DNA, 360 bp, Arabidopsis thaliana landsberg
agttattctcataatttgtaagcaaaatgtgtgttgctcttttcagcaagcttggtacagttgcattttaccttcttttttgtcaacaagcttgttttccatttgtttgaagcaaaagttaatttacatgtattgttattaataagtgtcactaaagatatttaaattatatttttaatgataaaattatatgttggtagaggacaaggttggtcatgtagccaatatttaaagatagacttggtagacgactttttttagattttagacttttagtagaaaaatgcaatagttgtccttataggcattattgctaatccgaaacaaacaaaaaaatggcaaacgactacatttcctttg

SEQ ID NO: 20423 - DNA, 810 bp, Arabidopsis thaliana landsberg
ctaaataacgtacgatttccggtgatttgctgtaaaatcctacacctaaatatacatgctaatcgagtttgataagttcacctaaataaatagactgatcttatttgggatacctataaacgttggctcatccataatagttctaataacaagtacctatggtgggtatacctactatctaagatcaagtcataggtgatcaatctagaactagcagtaagaacaattatagatgaagaactctaaaactaattctaaggggttatcgatctactaattcagctaaatccatagtgagattccctaaacccaacaaggtgattactcagacatgatcaaaggaacacaaatcataatctgaataaattgcattaaattataatatgaaaaagagtaaaaggagttcaaatcttgtttggagggatcggattattctctccaaaagtgtatctcttattaaaaacaagcttaggtctaaacaatgaccataaaattatgtatataagttactaaaaacgtgcagggtctatcttgcaaatagggaaaacttcaggaactccttaaagacttggtgaaacgtggaaattccctttgccgaataagagtgtcgatcgacatagatgtggtgtcaatcgacaccatcttgtgaaaaagtctctgatagtcttcattgctcaaaaacttccaaagttccttattatgctccatagctctcaaatgtttaattgcacttgtaatgactcaaaacatacaaaaatgactagaaagactctaaaatatattctaaaattatgttaaaaatcgataaaa

SEQ ID NO: 20424 - DNA, 821 bp, Arabidopsis thaliana landsberg
  unsure (1)..(821): unsure at all n locations
ctcatgcaataagcaatgacatttagtatgaaaatattttttgctaaccacattctcaacaatgcatggtacacataatttctaaacaatatttgtcttaaaccaatttaacagagggtagtgttggattctataaacctaagaatttgatgatggagctccttacatattcttcaccctcagttatttattatataaatatcaatttaagagaatataaatatcaatttaagagaatataaacatcaatttaagagaataacttagttaaattattaagtaatatactcatactttgagtttggattaccataaaaatcttcgagtatgagaaaactattaaaatggttttattaaaaaatcatgtgatattaaaataaatttagtaagagtacaattaaatatgtataataaaataatatgtaaaattaaataataaatatatcattaaactatagatttaaaattgaagaggttacattaattatttaataaacacatgtcaaatgctaaagtgatgatgtgtctatcatatgaagaaagttggccaactttcatatatataatttacaaaaaaaaaaaaaaaacaaatcttcaagatctctttcttgatatgggccaattnnnnnnnnnnnnnnnnnnnnnnataacctttcgttttactttatacgggctataggcccattatgggttaacgtgtaggcccaataaggtggcttttcaatttggtttgcatttggtgtgtgtgtgtgtgtcaactacaatttctcaaggagaggcgcgtgtaaatcaaacggataatcctacggttttgatgaaat

SEQ ID NO: 20425 - DNA, 1594 bp, Arabidopsis thaliana landsberg
ttgctagcggatgtttgaagaaactaacaaacgattggggaaattctttattatgtgttctttgtctcaagaaacggggcaatgtataaaacttaactttatgtttaacctaattagaatggaaacagataaacaataagtaaatattcttaaatcttctaatccttatcacaattgaaattctagaatttaaatagaatttggagtagcttgatcctcccttagctcgtgagaccgaaatattctaccttattacgaaggtatttttggcacaaattatttttttttgtcatcttatctattacaaaataaaagaagtaaaaaaagtaaaaaaaaacaaaaaaaaaaaacaatcgtaagtccaaaatgaaactcaaaactgagcccaaaagaattgccaaaagggaaaattgtaaaacacacaattcacgtatcagtaactcagcaagcaggcccggtcctgtaaagaaagggctttaggcaccaacaaacttaagttgtgttcctttggtgtagtgttttttagtatcttgtaatgggttgaagtaaactcacgcgtttcttgtttaacagtgtaaacggttttctcgtattctttctaatccaatatgtatattttatctaaatttcgatattatataagcggagctaatccgaaccgaatgactaccaatcgacacaagggagctaccatggtgcaagctaatacgtatgatgctaggaatgagcttaaaggtgtaaaggaggaccttaatacaatgagactggataaggagcagtcaatgatagaataaatcaagagtaagggtctaaggttccatagttctatctcagggcacaagttcgtcgtagttatcgggagcaaccaacaatttaatctccaatgagatagcattaggccttcaacttcccatgagagctacaaaccacgtttcgattttattgggacagaggcggtgcatagaaagcataggggtcagtctatgggttcaagaagtagaaatcactgaggatttccttttattggatttgaccgagactgaggctgatgtgattctaggctatagttggctctccaaacttggagaaacatggcaggatcatactttcgctttctcccacaaccaagattggatcagttttagcaataaggaggaagagctgaagcaaaatactaacaaaatgaagatgtggagtgagtatgtgaaaaaaggaattgaagatgagcagataagcgattgtggaatggttgttgatgactaccttgaggacaagtttggtttttcaggggaaggtaatggtagggtatgcaaggttggtttgtattggtagaacagatgaggctaaaggtattatagaggttaatattcacctagagaaactacgagcgagcaccaatgaaggaatcacttcaagctcattgatgaggttcaagatcatacgtccataataaagagcctttgacgtgatcgatatatgaaggaaacgttgttcactcttggttgtacttgtaagccaccttcttacgagcatctctgaaattttgcattccttgagaatgattcattatgataccaactgggccttggcgggc

SEQ ID NO: 20426 - DNA, 807 bp, Arabidopsis thaliana landsberg
acctagaatgtgcagttcggccacccttctaataaccgagatgcaatgccgcttgatgcaacatttaaacaaatatctcctttagatcttatcgatgaggatagaaccttccacaaaaagttttttcatgttcctccaaatccatataagaaaaaaacacctcatttgtcattaaggacaacatccattattccattatataccttcttctgttcagcagttagcatctttaaccaattatcatgttttgttttcaatgactcacagttgtagttgcgctcatcgaggatcaactgattaaaggcaggttcatcgcctggttcaagctgaggcaacatcttatacctccaaagatctgttccatgcctttttaatattttttgcagctcttgtaaacataatcgaatcctgtcttcgtcaggcaatatgtattctgcatataaattaatataagattgaatgtactaaaatatttctaaaaacatctataaaattgtatatttaatttaaaaataataatttaactaacctgcacgttctaactgatttcttagtttcctcttaaaatcttcagacagtatcttccaagtgtgttcccatacaacggctggggaactcaagctttcggaaataagcataataacaaacaacttgcaaacatacttaggagaataccaaaaattagcctcctcaataccgtggatatattccttatcatcatcaagcaaacctagagcataacatattagcatgcatctttgtatgattcatgaacaacaccctcgacataatttatatgaacaaatc

SEQ ID NO: 20427 - DNA, 1284 bp, Arabidopsis thaliana landsberg
gaggacagcggtatcggaggttgttaatagtaaacagcttacttttgtggaggtgaggtaaagagagtaacattcttgtaaagaaatgaaacttgaaagtctccttgaagacatatatagtcaccaggaagatctgcagggatccttatggacaaatcccactttgcactaagacgagtctatgtgatattaagcaccatgaagtccatataagctaattctacttttggcgccggacgtttgcattcgttgatgagtataaaaacgaccaaaccaataatacatgcaatgacacaaacgatcaagaataagctgcagatcctctttcttgtactgggcgtgggtggtgtttcatgtgccattgtgtgctattggtttaaagagagacgagaagattttgttggagtgcaggaggaagatgagagagtttgattaatgttagagatcctcctcaagcctcttgctctcactacttaatctcatcagtcctcaactactagattaaaggctttcaactacttatctgatcttccttaaaagtttaattgttttattttcattttcttttgtaaaggtaaagaaatactccgttttattctcacgtgattttattatcgtaggtacatttaatacaactccaagttatgactgggaatatataaggaaaaaaaaaaaagagagcgtaatctccattggtgagatatctcaaaaagtttctaaaaaaaataaataatgatattttattatgatttaacttctgtccaattataaacacacatatacacatagtctcttaatcattattctaaagtttctctgcagagaaactattctcaatctctcttctactttattatcattttatattttttagttaatgagaaactatatgagagactactgatggagatgctctaatttctgactactcctactatgtttgggactcttcccattgtacagtgttaaggtcaaggtctgatactaacataaatttagaagtggcgtacacgcaaactagtgggattaaaaaaaaagagtattaaagatttaagaaagagtattatatatttagtcaaatgggttattatatactaaataggaaacaaattaaattatgcaaaccgcacttaaaaagtttttttatgtataagttacttcattatctagactcttgagttatccgatccattgatattaataaacactgaaagaatttgtttccattagtttaaaaagaaattaagcttttaagtgcttttcacattttaaaaatagaaaaga

SEQ ID NO: 20428 - DNA, 853 bp, Arabidopsis thaliana landsberg
  unsure (1)..(853): unsure at all n locations
tccaaattcattgtcttttctaccaatttcccaagccatttgtacttcacaatcaatctccctatcagatttttattgcagtgtaaaccaatccaaaagtctccagttgatgtcagccggatgttgtcagggtaacctgggaccttcgcaaagatatcacgagtcccggctttgggacctttaatccagtatcggtggacaagacttgtgccggactcgcatgtaattagaaaagaccggtctttgtttagagccaaaccgttgttacaaacgagattgtccatgataactttggcttctttcgtcttcttatcgtatctgatcactcttcccgaccgctccccactgacagccacgaaaaatacgtccctgaccaacacacatcacataaagtttaatttaatacgctatttttgcaaaaacaaacaaatattgaagtcgtatatataactctatgtcgcaaatgctcggatcattattcctaagtacatgtataaaaaagcctattgaatacctgaaatgatacttgtcactactatcattgaagtaaaagacatcttcctcttcgtctatatccccttggttagcaaacataactttacgaccttcggcttcatcaacaattaactcggccaagcctccctctggtccaactttcatgagccccaagtaaccatcacatatgtacaaatctcccgttttcttctcgaaagtaagtcctaatgngccttcacaagtaggcactacttcagtttttgaacagttccctcttcatatacaacaaggttataaagtatcattagttaatttacttatttgattttttcagaaaagcctacataaacaatacata

SEQ ID NO: 20429 - DNA, 2970 bp, Arabidopsis thaliana landsberg
tagctttcaatttgattatgtggttgttgtaggatatctcattgtcgtgatttctaacactaagaccctactctgactctctcaggatgtatgatgaatgcagagtaaaattctttgtagtgcagaaacttaataataagattgatgtgtatgattcaataaatctatcgaaaaaactttgaattagaatcagaaatgattatagttcaagaacccaaataatttccaaacggaagagaagatagacatcaaactttttttatacatctatcctacaagcacggaccaatggcttcattcccctaacccaacctggggcataacaacaatacatctcaactcaccggttccaaccaggtgaatatccttgaatcagttcttggcaacatctcaactctatgatgacctataacatcagaagaaaagaatgcaagatatgaaaatgttctcaacaaagaaagtaataatattgaacaaaggaaacccaaaacaagattacacactttatgcaacagctcaaacaaactgagaataaggtttcctgagaccctcaagcctataaacttagattaagccacactaaattacttcatcataaattcaactttcaagttaccacagctaattgggggtttttgacattaagctttagaaatatggtaagccattacacttaagatatactaaaccaaagatgacaaaatgacctaagatttgccaattttgtgatttacagcttccggtaaataaaagattcaagcttcttctagtaatcatattaacaaattagtaacgcatttcgaaataatattacctagatacagggcaaaatcaccaacacaaaaccatcttcgttcacattttaaaacctaaaatcaatgatgaagctaaaaccctaacaatcgagaaacccacatagataaacgaccaacattaaagcatcgaactagaaaacccaacaaaattgagatcagaaccaacaaaattgagatcagaaaactttaccatttccaaggaatctataggagcttggaagaagtgaagccatgggcgaaactgtacagagagatctggtatcggcaactagaagatagtctcttaaaccctaagagagagagatttagagagcttaataagatggagaaagcgaaagcgcacagatatcgatggaagagtgaaagagaaagagagagatttgttgccgttacgcgagtccaaggtctctcttcgtttttgtcgctgttttattcctaataaaaaaatagaaaaaccccgcgaacttgagtttgggcttctaatgggcctaatggaccgatactaggctttatattagaacactctctacctttttatttgatcagattgactcaattgagtgtgctctttactaataatttatcttcttaaatctttgtgtcatgcagggaactgatataagaaatctgttgaagagattatgaagaatattcatttttacctattcagaaattaggtgctaaataccaaaaattgcaattaacagaaaccaatatttaatcaaacaaaggattaggaagaagaagaagagggaagacttcccattgaactgtattagctctaatgatttaaagtcttcttgtttttcatcaaagtttaaacctcttacgtacatcatatactaaattattgatataagctcctatcatttaggttctacatcagatttcgtatgatccaactatttatacatattgttccaatcattagaatgttttctaaaacttatatatgtaaacaataacaactttttccaaattaaattgccattagaaaagaaaaagcatagtattgaaacataaattaagttaaaatatcaagtgcaaataatatgaaaagagaaacataaatgttgaaaagaaaaataactaataattatattttgcctatgactacatagtagcaaactcatccttattatttaggcttcttaagaacacagacaccacccttgcatgaacctttctttgaagatggcttcgtgaaacaactaaaaagcttggagaagaaacccatctttcttgaaatctgaaaagaatattggagctaatgaactttttcaggatctatgtgtgtgttatgtatctctattagactatttgcatggctatatataacaataatgtcacaaattatttggtaatgaattttcttgtattaaatgtgtttggagatccaaccgtcgaaatgactggaaatcatgaaaaatataattatacaatattcaaaaaagatatgaaagaatattaatatgataatttaggaagtttaacattttttctaaatgtatagtttacattttattttatcgtatattagaaaacttagattcatcatattttatacgatgacgttaggagcagaaaacagtaggttgctattgatctgacttctaggtataagaatcaaaaaagaaaacacccgcgcattcaagtatgggcctttaatgggctatagtaatgaaacaatactgggctttacattaggaacgaactatctctcatgtccgtctgtaaactaggaacggactgactcgacggagcaaagtgaacggaaaagtaactgtcaagcgagcgagtgagaaagagaaatcagaaatggtggttgttgattcttcggggtcggcgatactggccgatcagaacatcgatcctaacaccacgacgaaccctagccttacagagaagcatgttccttcctgcgattaaggctatctccggcgacgagaaagctccgctgaaggagaaaaagaactacgcgttgaagaaatcaactaccgtaatccagaaatcgcactgtttccagaattcttggacattttggctcgataatacttcctccaaatcgaatcaagtcatatgcggaagctctctgagatccttgcatacactcggaactatcgcagagttctggaggtgagagttatgtgaccgt

SEQ ID NO: 20430 - DNA, 1627 bp, Arabidopsis thaliana landsberg
  unsure (1)..(1627): unsure at all n locations
tttttttgaagtacatacttatcccctaattcatgttgaattctattttaacacattcattatgttcccgtcttgactactagccctctcgaagctttcctctccatcttctctctctttttacgagacttttcatctttcacacctccctacagttcaacgccacatagacagagaaaagctttctgcattgtgtaaagaagctaatactacttaaaactaaatgagatttacctctgaaccttgtgacatgaatcctcgaataagaccagaagctttatacactccaaacgcaggaatctaaaaaccaaacaaaagttacatcatttcaatccaattctatgtatcaattcgtgtttattaactaagcaaacacgcataccacaagatacgtgtaccaaaacttcccagagatgatggaagctagctgaacaaagcaagtgatatagatgacatcgtgcaaatatctgcaaaggtcatcatatgattcaaaatgcataactcaaacatcatagtatgcaaatccataacacagaagctagcttttggttcttgttgattcatttaacacaaacgtacccgcagattccaccagtggtcatgtcaaatccaccatcaataagctcaccatcatcagtaacactaggtttagccatttgatcaagctgcttataaggaaacgcgtaagccagcgaagttatcactaaaccgatccaatgtttccaagtaaagcttgagtagaaaatcaacatcctcacaacgaaatacacagcctgtgaccataaattacaaaatccaattctcaattcatgaagaatcgcgaaaaatcgtagaaatctgggaaacgtatagatgggagaggagaaaatacattggaagcgatgatgatacgacggagcttagccatgtgttggcgnttctcttcctttcgtttcttcgctccttgattcgccattcttaatctcggattttagctctcaatagtcgtcgtctgtttgtttttccggcgaagcagaggttattgaaaaagacaacgacgctcattgtttcgcttccgatgaatctagtagtatatgggcctaagcctgtaaataggcccaattgagctttcggatctgcgttcttgacaatccacggaaagttgttttgagggatccttaacaagaagctgcaaataatgaatatcccgaattctcaatgcaaaaacactttaaccatatatacctcatgatcacaaattattaagtttgatgtctccgtgaatcacacattttccatgacaataggccagtgcctgactaagacttgcaatgtactgaaatcaaggaaaagccatcagcttcaccacaagaagcatgataatctttcagggagagggagggagagggagcgagagagagacactcacagtggcggcttgttggtttcgtagaattcgcttgtccgctttacttttggcgctttgggaaagatcgtaaaatttaggttctgtgcttgacagtgacacaatcacattttcaagttttgatacacattctgtttcaagttcagtaaactttgtgtcaacatggttgaaatcgatgtcgtcctnttcgctcntgatnaatgggagcctctcggcaattac

SEQ ID NO: 20431 - DNA, 989 bp, Arabidopsis thaliana landsberg
acaaaaaaatattttttggggggaatccaattgtgtgaaatttggattgacaaaaaaggggtgggcacaggtgatttttgggtggtattttgggtgcaagggccctaactttcaaacccccaacagggtgatttctgatgaagtgggtttgatcggttttatgaataaaggagatcaatgtcaaaatagcatttgagaagagctttcgtaaaacatgtcataattgacccaccacagaggctttaacatttgtagtttttgtcacacagaagtttacattgatttgtagtataatattctttgtacaagttttcatatacttgattctgcaactgcaaactaataatgaaacagaaaacataacatgaatccactaacaacaattataatactttaccaaatactacaaaatacttgcagttaccaatactacaaaacagaactcaatcataaacaaaatcaatcataaacaaaaccattgtgagaaaactctacatccgaacaaagaaacggatggtccacgagttcaccgatgctccacctcgaaccaggctacttaaccaaacacctcattagaaagtcttgagcttctgcagataaccgagtcgagatttgaggagtgagatcactatgaccaattaaatcaacccaatcatcatgaaccaaatcaccatgctctccccaaaccgtttttcctgttagcatctccaaaacagaacatccaaacgcccaaatatcaacagcaaaatccacaagccgaccgcctattaactccggagccatgtacgtagatgagtgcccgcgctacgcacgagattttgttgttgattttcttaaattttttaatatatatttagtttatcatcttttcttagaaatgttatttttataagagagattgtattatgaaagatgaaaactatatatttcttattaaccactatatgtatattggttgttaatttttactcctatgtagaagctttgag

SEQ ID NO: 20432 - DNA, 601 bp, Arabidopsis thaliana landsberg
ctaattgaacgagtagtgtcgaattgatttaaacaacatcaagtttcagaccaaaagaccttctgcaatcagaagagcaaataaactttgacagaaaagtaaaaatcaataacaaacaaactggctcacctgtcgaaaccacttttttctcgttgtcctttggaagaagaaagatgattgttctttgttctttagttatgaagtctcagcttattcttagatatgggagtaaatatgaaatcggtagctgttgtgcatgtgcagtgcacgttaaaacttggggtcaataaataaaaaaccaatatctttactccggtacttttaacgtttctttaattatttgatccataatctccgttgaatcttaatcttgacaaattacaaaaaataaaaacaaaaaaggttggacacgattactattagttatcactcgcttcatagtcgttacttgacttttacccggacgaagaaaataagtatccgtaacaaacaaagtggataccaactaccaagtattaaaatttcaatactagcaaatacaagtcaagtagtatatatgaaaaataatataactacttgatccatttacccatacacattt

SEQ ID NO: 20433 - DNA, 1332 bp, Arabidopsis thaliana landsberg
gactacactgaaaatggacttcactagcttctgtaaacattacatcaacttctactctctctagtctaggctcctctaattgtccaacacaaaatgacaaattcgttttgtttttgttcagatagacaaaattgcatgtcaccaagatttttttccttttggtcaaattgtcaccaagttctgtttattaattaactcaacactctgttaattctttcaaggctttccacgtctttgaaatcaagagacccgtctccttcagcatcatagcttgcatgaacactataaaacacatacacgagcaccactaatcccgagaagaacccgaatctgatatacgaaggagcatccaatgatccaagcaagaaaatgttcaaaaatatcgaaacgcatggagtccacggcatcaacggtacaccccaaaactcagggatcctagcttgaggtacaacacaatggaatatctggacgatggctatagccgtgaccgtgctagctccaagtatgaaccatttaggtgggcccgacggtgcaagttgccagaccaaggtaaacaaaattgaggttatggagaataggcagaggaaggagagtgttggccatggctccgtgtatccgaccgttacgtaacggcgaaatataacagcgtttgcgaccatatagaagacgaagagcgttccgatggagactaggtttaggaggacgtttaggtcggtgaagagggcgagacccgccgtgaagattcctgaacaaaaagtatagacaagattaaagagttaagcagagggatatgacaagatccttattctttagttaatttaatcaatcagattagtgtctaataacgtagatatattccaagatgtttaaaggtcgattatataaataaaatgaagatattgcaagaatctgttccattagttcacttgtggaataagacacctttttgtgaaagattttgagcttttgttccacgttcaagatctctcttggtctttgttcaaaaatattataaatcaaagtctagttacattagtggatgcaaaatttggtaaactacagttgttttatttgaggcttagagtatgtgtacaaattcttttatttatttatttttttagtttttggtttacagaatatagtatccaaaacttttagaacagcactttaaatttggaataaatatataagaaaccaatgcttataagaaggaatatgcaattgaaaacaaaactgtgggtctagattcgcttccacgactcatgcattttggtaaaactatagttttaaaaacgagtccaaaatcttactgcccaatatcttaactaagat

SEQ ID NO: 20434 - DNA, 397 bp, Arabidopsis thaliana landsberg
ggataaaaacttgtttttctagacacaaaatatggaaactctccataatcccaaaaatcaaatatatgttatggagaactatatcaaaagccttatctacgtgttcaagattaatcacaagaggtatgaatattagtccataaagccttatcactttacaaagtttaatattatatgatacgttatgcgtttttgcatgttgacaatgttaagtttgataacaatgaatttcttactatttagttgtagttaaaaacaattttgactttcatttttcatatttatgtttgggttttagaaaacgatcaattgtgaaagcttaatttttgtttttatagtattggatgagaccatatatttacataagatttctaaaaaattgtgtgttttactattt

SEQ ID NO: 20435 - DNA, 551 bp, Arabidopsis thaliana landsberg
aggaactacttttctggtcccatccctgatacgattggcgaatcacaggtcatggtactcatgttgttttaaaacaacttctcaggatcagtaccaaagtctattacaaagatcccctttctcaagttgttggacttgtcaaagaatcgattatcaggtgaattcccgaggttccgccccgagtcataccttgagtggctcgatatatcttcgaacgagttctctggggatgttccagcttactttggaggatccaccagtatgctcttaatgagtcagaacaatttcagcggcgaatttcctcagaacttcagaaatctttcatatctgatccgtcttgatcttcatgacaacaaaatctctggaacagtcgcgagtttaatctcccagttatcttcttctgtagaggttcttagcctgagaaacaattgcctcaaaggttcaatcccagaaggcatatcaaatctcacaagccttaacgtcttggatctctctgagaacaatcttgatggatatctaccttcatctattgggaatcttacatgcatgat

SEQ ID NO: 20436 - DNA, 2653 bp, Arabidopsis thaliana landsberg
acgcttgtcctaccgacatagggcttcttggttgggatgagacttgcaagattccgagtctcgctagttgcgatcccaagacatttcactatttcaagatcgaaggagctgatagttttatgacgaagtataatggtggatcaacgacaacggagagtgcgtgtggggacaaatgtacgagagattgtaagtgtttagggtttttctacaataggaagagttcgaggtgttggttgggttatgagctcaagacattgactaaaaccggagatacttccctagttgcttatgtcaaggctccgaatgctagcaagaagtcagctcttgccatttgaagcgtaaacaaaggtttttgtgtgtcgttttgacgaataataaggctacgttgtcctttgttttctctttttctgaaaaagtgttgctattggtttatcttgttttatgattgcatgttgattctcaagctacaccgtaataaattgaagtgaaacgcatcagctaaattcaattattctcattattttaccaaaaaaaataaaattattcattaatttagtatcatcacaaaatatgatatacttaaggattgaattgagaaattgaatcatgaatgagtttaagctttcatgttttctgtttttcttttttttttagcttgagaccatattttgaaggtaatgtttcaataaaaaccttaactttccattgtgaaaaaatgttttatatttttattagtcactgatgcaatgcagtagaacgtgcacacaacactttgcttctcatgacaagccattgaaagattcaaaattttaatttggattattaaagaagcggtataaatatgatacgaataagatgcgtgctacgacgcttcgacgccgcgtcaccttaacagagatggtcatctgtctcgttttttttgaccagtcaacgctcttatatatttattatacatgtacataatgtcttaaatcatgcagactaataactttacatcgttttcgttgttagttttgatttttaaaagtcaacttgaaagatgccaggtgttatttatagtttatacatatcaagcagatgctttctactgcatatattatcgatttttttttacccaaacataataattaattattgaacaaaaggtacacagtacttaacactaatcttcatttttcttcattttgtgagctgatttggtctaattaaatcgatggcataaaagccaaaaccagagaaacattgtttatgaatagaaatttttagaggtaaaaatttagcatttggaaccaaagagtcggttctaatataatgtataaagaacgaaaaataaacgatagaaatattaactgaacatttagtatgacggtttgggactttggggtgacaaattgttgtactatattgagctgcccataagcatttgtatttgtgaaacattgcatattaattggagctgaagtatatacatatgcatagctatgagttaatttttctacctcgtctcgagacaatgcattttgaggtgatttggttcccaaatgatgccgctctaaaaaggctaattaagaagtcaaacttattgttgttttgttgatgcctcacgggaatcaccagatatgaaagctaaaatctgatgataaatgcataacaaacaaggccatcaaattattaaaggtagttcttcaatagaacccacttcaagcaaaaccagtagctttactaatggaagttcaacaagccagaaacttgggttattatgaggtaacgtttgttggagatggcaaagcttaatttgtatgattgtcaccagtcaagaaaaacacagggctaactgcaaaacttctatcaaaactcttgccaaagacatcgtatctctttctagacagcatgtaattatatatatatgtacgtggaaaacaaacttagtaggagtgtgtacaatttagctaagtattattgaatacattctacaggatatgtagtaacttggaactagttatattttctttcttgtgtaataagaagatttgaggacaaaaaaaaagatgctaaatacaagttggcacatggactcggaaaagaataataaaatgttgccaaaagtaatttaaaacaaaaatagctagccgtcgaataagacctgtgcccacacacacctggcaagccgccgggtattgggagttgggacacatgaccacaccaaagtccgatctagatcatttacattagataattatttatccatggtccgtttatttttgtaaaacaccttcaaatttctttattaacaagtggtcagaatagttcagattaatatcagaaagacaattaactataaggatagataaagttgcatgtatttgaatcatatatcaaattctatctgaatcatatcaaattctatctataatctatgcgaatgcgacgtgagtcaataaatattaaagacaaatccaacgagacgagagaatcgactatgagcatcttccaggtggctcgtaattaaaagttgttggtcggtgggtcctcattcaaacgagtgatttattatttcgttcgattcaatacgcaactctagtaatttcaatttaactaatgctgatgcagtgtaagaaagtatagttatcaaccaacaactcgctttgtaaga

SEQ ID NO: 20437 - DNA, 949 bp, Arabidopsis thaliana landsberg
tgatttgaaatactagtaattctcttgtcataaagatgggcatggttctttttagagctaatagccatgggagccttccctttccctttgttgagactgaaagtcatttggcttgttaagttcttggtctccttttggaaaccaagtccatccttaatagaggggtgtctaccaatggtgtaggcatccctagcaaattttagtttctcataattatccttgcaagtcttaagttgagcattaagacttacaacatcattgtttaacttaagaatggtagaagcatgttcattgcaagcatcaatattaaaatatttgcatctattgcagataacaacatgcgctacagatgaactagccacattaaatttttctagctttgtatttaaatcatcattcaaagttttgagactagaaatagaatcatggcaagtgataactcagaagacaatatttcatttattttgatctctaaggcaagagacttttgaacactaacaaatttgtcatgttcctcatacaaaatgtcctcttgcctctctagcagtctatccttttcatttaaagcatcaatcaattcattgatcttttctacctttgctctatctaaacctttgaataagctagaataatctacttcatcatcactagaatcatcatcgcttgaagtagtatacttaggggtttcttgaacgcttacctttttctcctttgccatgaggcaagtgtggcgttcgttggggaagagagaagatttgttgaaggctgaggctgccagtccttcatcatcggagtcggatgacgagcagtccgagtcccattccttgccaagatgcgcctctcctttaaccttcatgtagcttttcttcttctccttcttcccatgtctttcttccccttggtcattttcattatcaggacattgagaaataaaatgacatgtcttacc

SEQ ID NO: 20438 - DNA, 213 bp, Arabidopsis thaliana landsberg
gattaaactcgttgtcatctagacagtagtaaatagcattttatagctctagcattaaatttagacagattcttctcttcttcagtccaatttgcctttgctgaaaggaggttcccagccatcttctacagcagtccaagcatcttctccttgtcctctgattagctgtatcatccgtgttttccagtaccaataccctctgtgatcgagagg

SEQ ID NO: 20439 - DNA, 2205 bp, Arabidopsis thaliana landsberg
cgagtggtctgttgtgattgtgaagcatctactccaccagggggtggagtggtttgacatgatcaggtccccttcttccaattagctcgtcaatagctccgaatcacctgaaatgaacacaaatatgcaacatgcatgcaaaactatcctaaacttgcaaagtgatgacaaatgatgagaaatggtataaaacagtggtgatatgatgcaatagtgataacaaatggatgctcaaaacatgtaaaatgcacacttatcaactaacaataacattggttgcttagaagaataagcactcttaagctcaccacattttgcaaagaagttgggctgcttgacgacttgttctttcttttgtttcagatgtattttatcttgataaacctcaggcagagttatagggaccagaatagtcttccctcctttaaacttaaatgaatgaagattagtggaaccatcatgcattacctttctatcagattaccacggccttccaagaagaataagtccaacttccattggtaatacatcacataagatctcatcttcatacttcccgataacaatgggcacaaccacttgatgtttaaccctcatttcgccacaatcattaagccactaaagatcgtatggtttcacatgtttttgcactttcaatccaagcttcttaaccatagtttcacttgccacattcgttacaactccctccatcaatgatgaggctgcaaactttcccgtgcacatgacaacgcgtgtgaaacaagttgtctctctgttcttgatcatcggtcttggtttggacgctcaaagttctcctagataccaacaactcacccttagccggcagctcctcattctctttcaatgaagaaggtgatctggaatctcctcctcggactctatatctccattatccaagttattcgtgacatttgtatgatgtcctttccctttcccttgacatttgtaacacctaacatcacgaattctagatgtagaaatttcagcctttcctttgtaatcttgaactgcggcatatggttaatttcagcccctgaactgacaatcggcttatagctgctggttctctcctctctttggtaagtaggcttaacaacggttcctgaaccataactagatcatgaagaactctttgtcttaacttgctgctcaaacaaaatcgccttgtgcaacatctcttctatttcaacatagtattgagtctccaatctgttttgaatatctctgttcaaacctccaagaaaccttgacatagttgcttctctatcctgggaaatatcagcccgcaacatcaaagtttacatttctttgtagtactcttcgacataacggttcccttgtgtaatattcctcaacttgagatgcagctcacggaggtagtgactagggacgaatctcttcctcataatagctttcatttcggaccaagattccaatggaagttcttgattacgtctccgtgaagtaactagctgatcccaccaactcaaagcatagtcataaattttggttgcagcaactcttaccctatagatctcggtgtagtgttgaaggttgaaaaccaattcaatcttcttttcccattccaaataagcatctggatcattctttccatggaatggtggaattttaagcttaagacctccaagattgtcttgcaaaagatctctaccttctctagcacgtctatggtgtctcctttgactattgcgagatgaagtgctcctatgcccatagtactgatctgtagcttcggctctttgctcaagctgctcatcaactcttctttgtactcgaggacgagtctgccctaattctagtttctcatgaaactctttggcgaaaagcattcagtttggtgtccatcattttctcaaaggcttccaccaaaagtttgttgttccgattgtggttagtctcttcctcttcagtttcagccattctttctacaatagagacaacaaaataacaccagtaactagttcttttgaaacaaacacgaaaagacccttcagatgtcctagaaccctaattacgatagtttcacttgttgggatgctaaaaactaccaaatcgtttccaaatatttcagaaatatttacaaaaatagtagactcttttccaaacctatgacagttgatttcgcaattttagcacccgcccaataattataaaacttaaatg

SEQ ID NO: 20440 - DNA, 611 bp, Arabidopsis thaliana landsberg
  unsure (1)..(611): unsure at all n locations
taattatcntaaatagttctttcgattttttaaaattcttaaaccgaattaaacattttatctacaactgatgacgtataattttttataacgaatatgtcgcgaaaaggtaatcaacttgataaacacaacagaaagcagaccaaataacttgttttaacaaaggacttacaatacaaacaccatgataataataaacaaaaaaaaaaaaaacagaaccaacgacctgtatttttgttcatttagtatggtagtggaacagtagccagtatagtttgattaggagccaaaacacatcaacacaatgcaacacaggttattattattattattattatattataagcatatatgtagcttcacaaatccaccggataagattttagttgacctgaaaaacgaagagagaataactaattaggtttccatgaaaatacataatcaaatttgttttgcattaaaaaaaatgaagtcgagacatcgtcatttcttttctctctatgaaattgtttctcagattatcggaatggggaaagaatatagtattacctcgttgtcttctggttcttgttgccattcatatcgaataagaggaatgtgttggattttat

SEQ ID NO: 20441 - DNA, 537 bp, Arabidopsis thaliana landsberg
  unsure (1)..(537): unsure at all n locations
ccagggagctcgaagctgacaagctaaccatcaaatcgtacctaggaaggccgtggaagaagtttgccacgactgtgattattggaactgagattggtgatttgattaaaccagaaggatggaccgaatggcaaggagaacaaaaccacaagactgctaaatacattgagttcaataaccgtggaccgggagctgccactactcagaggcctccttgggttaaggtggctaagtctgcggctgaggttgaaacttacaccgtggctaactgggttggtccagctaactggatccaagaagccaacgtgcccgtccaactaggattgtaagaggacaacacaaaaaagttaagaataaaacagtatgtgataatgttaaggtaacgatacgacgtcgtctctggggatcagaactcttttttggatactatatacaaagatagggttctagacgtgttgagatgatgtttgtataagatngcttttcttttcacgtgcaaaaagaggaaaaaaaaaattggttttgttaatttttttt

SEQ ID NO: 20442 - DNA, 490 bp, Arabidopsis thaliana landsberg
  unsure (1)..(490): unsure at all n locations
gtcgtaatgtcgacttccattgttttaccgagctggtcgacgaacattctgttcaccattcgttggtaggtagttccggcatttttcnnnnnnnnnnnnnnnnnnnnnnnnnnnnnnnnnnnnnnnnnnnnnnnnnnnnnnnnnnnnnnntagccgtctcgacccataagtatttggttgtacccggagaatgcgtccatgaaggacaatttttcgtgtcatacagtgggttcgaccagtcggtcgatatgcggaagtgggaaactatctttaggacatgctttattcaggtccctaaagtcgatgcatactctccacttcccatttttctatttaacgacgactgggttggcgagccagttagggtattttacttcccttattgatccgattttgagcaatcggtcgacctctttgttcacagctttagccctttcgggacctagcttgcgacgtttctactttataggccggtaggtcggatcgacgt

SEQ ID NO: 20443 - DNA, 825 bp, Arabidopsis thaliana landsberg
taataaaacacaatgcattttttatagaattgagaaataacaaatcatctttccaaaccataatatcttaacatttgtcaaatatttattttcatttttaaagttttttatgatataattatttttggtacaaagtgttttgtgatacaactatagttacttagcttttccaattaattttgagttttgacgtatgccaagtttcaaaattataacagatattaaatcacttatcccatttttttaaaaagtatgtaaaaatatttgagaaatttaaattatttatttaaattgtttatttaaatcattccatcaataacgacatcagtagcaatcgccaatctagttaaacccctaaacccaacaaaatttgtttgatctcgattctatccattaaacattttccaaaaactttaaccaatcagaatcaaattaaacccctaaacccaacaaactttgtttgatcaaaatatagtccaaaattataaaaagaactaaatctaaaataccaaacccttatccggttaagcccggtccaacgcagaagaaagttcagaaggatcgaagatttgaccagcgaacaaaagagttccggttttgtcttctctaatcaaaaagagaaatggatgatctgccacaaaatctatcttcttcttcggctcccacaaacagctgccggttactactacaacagtagtagcagccgcagcttcagtaccttcttcatcgatctcaatcaaagctttctggtgtaatgacacattaagctaaaagtcaataaaaacacttgaagcttcaaacccgaattcgatcgttaaatttgga

SEQ ID NO: 20444 - DNA, 1466 bp, Arabidopsis thaliana landsberg
aaaacaacatatggggagcttaaagactcattggggtttgtaaagaaaggaataaactagggggatgctcacttggtcagtcataaccgggcaaacccaagacaatacacagaacaggatattctggcgttacctttcaacttgaaaaatattgggaatgggcaacgggacatgcattgaacgcaaattgggcgggagagggaactgttaagaagagccctaacatctatccaattgtaatttcgatcttcgaatgagtacacgccaaaggagaggtagtcatattctgtttcaccaggcttcatatacatgtcttccccaagcaaacaatcaatatgaagagtggtgcaacagtcgtcgcatgaatagaaccctttctttctcaaatctgctattcttctttcgcatacatcacaccactctgaatgatcatttgcctctttcgcttcataaaacttgaggaaatgtttgtcatgttgataccttgccttgtatggtaaggtagcacacttgaagcatatcacaaaatcacattcaatgcaatttagctttttacaattagacgactcatcttcactttcttggcatatgtgacatattgctgacttctcttcttctggattcaaagctagatataagggatgctcatgacctagatattcaaatggttcagaaaccgaggcacatcgtatatctattttaaatttataatcttttgtatcagcataacatcctctgaaatcgtccacatagacgaaaccacaactttcacgctgacaagcatcacaacgaaaacgtcctttgttgtcatgatattcattagtgacaacctttagtgtgagtggataaggattcaacgcatgatatttcttgcaaggtgcatttgcacatgcttcgtggaggatgaagtcacactcatccacacctgaataatagccaccctcgtagatcggaagggtgcacgcttgacaaagcttgttttcatcgtaagctttactggtatcgagtttcagatgatgaccatgagaaaaatggagtattattccatcagatattgttataaatggctcaacaactatctcaagttcttcaggtactccctcgagttctatcccatcccatatgtctctccgcaacgcgcatcttgaatgaacaaaatagtcatcacacttgttgcaagagtaggcaccatagtcgttgtcaacctcttgacgacagactccacaagaccattttccggatgaaagagaggaggtataagagatacgatggtggtggcgagatatttttatgacatacgggaaataaatacaatcttgatggactacgaaggcgcatcgaatacaaatataggttggaatgaattttttgatgaggctacaaacatggcaaggtaagaaagattgtttgggaaaaaaggtgaggggatggggatgccttttggggtgatctataacaaagggtac

SEQ ID NO: 20445 - DNA, 1146 bp, Arabidopsis thaliana landsberg
  unsure (1)..(1146): unsure at all n locations
tcttcaggcgtcgatagatggttatgcgtgttgcaagcttgctattcttgaccacctttgggagtattgagtaaacgtctcaatggaatccatgttatgttgcaaatctttgaatccttgttttaaagttgttgttaaagaccaatcttgaattttttcctcttgttagattgtttgtgacatttctcttctttttttttccagacggtcgtttatttcttccatgaataaattagtaaaagcaaatttctttgattaaattggagactactgtttttaattccaagcggagctgttaataataagctagcagcaaattagagaaacatggaaaggtatttatacagcatttttatcataagctaagttatcaaactaattcgtaaattacatcagaatattacctttctatttttttgggcggatcagaaattacctttgacgtatttttccatatcttcaccatatatttttaacaaattaaaatcaaacttcggaggggaaatactcagcaatttgcgtgtcgtaaatcctatagactatagtacatgaatcttaattatcaaccgtccgatttcaaccctagaagatgcctttagaaagatcaacggtgataattctatagtacaacaaaataaagagattcgcaaaattaatacaataaaaactctccgacgataaaacctaattaacaagaagaagaaatcgcttttctctctaaccgagtcctctaaaaatccagaaagcaagcaagaagagagtttcgatggctacgacgataagaaccggcggttactactctactcaccaagagtactctatcgatgtcttcggaaacacgttatccgtcaccgtaacttcggatttcgccatcatcagccaatggatccatgaggtcgaatacaacaactgtcgtccgtactatctacaacctctcgtcgttggagtcggcgtccagtggacaccgccagtaagttacgacgccaatcctccaccggataggtactactccgannnnnnnnnnnnnnnnnnnnnnnnnnnnnnnnctccaccgaataggtacgacgccaatgatcttccggccgataggtactacgatcatcaaactggaggttactacgagcattctgcgccgagagatcacaa

SEQ ID NO: 20446 - DNA, 1497 bp, Arabidopsis thaliana landsberg
tctaaggttgttgcagcaacttcttccggttgcacttagaggattgttaccaaaaggtccaaggacagccatcttacgtttatgtacattcttcaatcatttgtgccaaagagttattgatagagaagtgatttcagtcatggaaactgaaatagtggaaactctttgtatgtttgaaaggttttttcctcctagcttctttgatatcatggtccacttgactgtccatctgggaagagaagctagacttggaggaccagtccattttagatggatgtacccatttgaaaggttaattttctgaatactctattgttacaaatttattctaaagtcatagtctgttttcttatcagtttaaatatttgtttttgtaggtacatgaaggtaatgaaagactttgtaagaaatcctgcaagaccagagggttgcagaagaatgtgtgcagttctgtaatgattttttgaagaagacaaccaatgtacaagaaaaaacagacagaaatgtagagtatgagaacagctcaatattagaaggtcgtccgatacctgctggaacttccatttgtctcagtgaaacagagaagaatatagcccatatggcagtgattcaaaacatggctgccttggatattgtccagattgatttttggaaaatacttcgggtgtatggcgtagtgaatcataagtatttggaatcttgcgtgcaatttatgatgatagtttataaagctttttgtcaatgtggggttttcaccggttttattacttcgacgtcatcttattaacctgttatctttctgtgttagtcatgtacgctcaatattctatgttgcttctggttgagcgtaggcacgacaagcataccttgttgggaataaggccttagctaaagagctaagtgttaagggacagttgcataatatgcaaatgaaggctgctcatgggaaagctcaagaagccatttaccgccagaggtttgacttctttacctgcactgcatctccttgtaacatgatcttttatccgaaacacacactgatatctccataaatgaaaaacaaaactcctgttctcagtatctctgttctaacctgcctatgagtaaaaaatgaaacaggaacccagtgggtcaaggaaacagtagagggaatgagagaatgatagacttgcatgggttacatgtgagtgaagcacttcaggtgttgaagcacgaactgagtgtgttgaggagcacagctcgagcaacgcaagagaggcttcagatttatatatgtgtagggacaggccaccacacaaggggttcccgcactccggctagactcccagttgctgtacagcgctacctactcgaagaagaaggtcttgactattccgaaccacaggccggtctccttagagtcatcatatactgacagacaaaagccaggtacttatataggatacaagacctggaaagtaaacaagaaaaaggaaaggtcccacgctattcatttgt

SEQ ID NO: 20447 - DNA, 930 bp, Arabidopsis thaliana landsberg
ctccatcatttcttgaaacgcatcgtatgcgcctttgtttgtgttggaaggtgtgaggaaagatggaagatctctgatttccagagaagacagattaggtaactcgaaaacggacttgtttcccatgaaatgagtgtaatagatgttgaaaaccaaagccggttggatccagagaagagcggagggaagttgaaatctacgtgctacttttggagcccaattgagaagaatcgtgtagatcaagcaagtcacgggagagtcaccattcttagtagcttcgatgaaatccgatagtgccttatcgccgttaaccttgagattcaccgaccttttctgacggtcttcgtaggtggaaatgcctccatcgtcgaaaccgtcggagaaagtaaggaaagagagattttcgactttgttgtggtttgcgatcatggagttgtggaagacggagacacaagtgacgaaagtgacacgtgcgccggttcttttgatgagccgacgagcaaaacggagagatgggttcacgtgaccttgcgccggaaacgttaccagtagaaaatgcggtggcgccattttttttctacttgtcttagctccactgaagtgagtatcaatacaagaatctgtgtctctccttgtggatatatctgtgctttcatatgtatatatatacatatatataaatatagatgaggaattggattttgatgtctgcacatgcatgcgtattcatcaaacatacgcaaaattgtaccacataacttgtgacgtctgcgatgacgctcactagataaacgcttcatcgtataaatccaaacttgcggttgtttttttgcagatttgatgtttacatatcaatgaacatacaaacaaaaacaacatatagacaatttcatttcagtcatataaaataagagtgaaaaagaaacagag

SEQ ID NO: 20448 - DNA, 724 bp, Arabidopsis thaliana landsberg
taaaatctcttggttcgactgacttgcattgcttctactctcagtctcagatttaacttccccattatgataccagtcctcttgcatcttgtaactcaaatccattcctcttgttacaagatgatcgacaacaataccaattgagtgacggtctacgttgcgacagtgaatacacatgcaaataaatcatctccatttctcctaaagctgcaaccacagacctcacaaaatccctagcacctctcttataaccaggatcaactcttatgcaaagtaagatgagaccaaaaaacaataagaaagccttaattcttttaatcccacattaaacccataagtataagcttctgaagttaaagtcgttttcgcccgagctagaaaccttgaaaactccttatgttgcaaaaagatccaacctttaaactaatatcagaagctaagaaattctaatagcaacctgcaaactctttatatatgtcttaagattgtaaactactagttgtcaaacgaatataagaaccataacctaaatattgtaaaggagattgattctcttgcttataatcgtgtaaggtcctcaaagatatatctacgactttgattcttgctacaatgagagttaaaatggaaagtacctagagaaatcgaattaagactgagaatgacgataagatctagagttcataattccaaaaatcgtaaattgattaccttaaggtctagg

SEQ ID NO: 20449 - DNA, 2849 bp, Arabidopsis thaliana landsberg
attgtcacatatgtacctaagtgtacatcgttgcagtttagtcgcatatctgccacttcttgatattgtcacaaataattcacttatttacgactaaccttttgtgtccaaaattcgtcgctcataagcaaccaatttcgcactgcaatattttgcgacggttttttagcgaccttctaatatcgtcgttaagtagtcgtaaacacctagtttgcgaccattttgggaccaatatgggagttgcaaatggcaggttttcttatagttatataccgctttaatttgaaactcgctaatctgatgtcattccctatctattaaaacctgagcttaatttgcaattatcatgtgtctgcatttatttatgaacccatggctaccatatacatttttggattatcttattcacttcaccaccctttgttaattcaagtagctgactctcacttttagagcagtttcacataccctgaacttaaccttatttcaagtcaaagatcatttgtgtgtgattgtgagtttttttttcgattgagcgtggtataacgtgttagatatgaaccgacaaaagcagtctttcatgtagacctagcccacgctttttgggttagctagaactaggtggagagttgtatatgggattgggattgtgtatggaatgaatggaaagagaatgggaatgaaaaaaaaagaagaaaaaaaagagagtaggagtttagcgttcttaagggggatacaaaagaaagtgttagtctagtaaatggtttggagttcaaagagaaaagaaagttaggcattgtaattcatagaaaaggtaagacgccctctatgctataagattagaagaaaagctttaagttccccaaactttaaaaccaaacccgctagactcttatatcgtttcaaagaagaaccccttagaacttgacccaaaaaaaagagataaagaatgagaaaaagggtagagttaggacatctatgggactgggatcatcttctgagctatcatattatatcattgggtagatggaagtctgttcttttttgtgtccattggcttttacctttagcattctgctgaagctcaatcttttctgtgagagtcccctgttactcgaccaaatcgttagaggaaccatttttgtctcttagcctaagcccgaaaccaagtgagttcataaccattgcattgcttgatccattgttcatgcttaatgaatgttaaagggaattggttgatgtggatgcttgaatagattaaggcaagttgttaggttgcattgtgacgagtatggctaacgtttttaactaagagtctatcatcttgtaacctagaattagctacctggacattgagcttacccgttctatatgcatgcttcgatttttgaatccccaccatcaaacctctcgttcaacttaagattttttgtttgcttgagggaaagtgatataggtcaaattgccttaagaccactctctcaaataagagatcgattgtacgggtcgaattccataaagctctcgaatcacacaatagagcaaggttttgaattaagctaagtaagatagtaatgaaaataaaaagaaacaaaaggaagcaatagcagattgtgaggttgtaagacaagaaagtaaaaacgtcaggcttagggtattctcaggaaactattggttagtagatctaataatagctaggttgttatcgaaccatttttaaactcaaactctgattatggaataaccagtgggcgtgccgcgaaactccctatatctatagctaatagtgaccgtagaagccgagagactatcaacataaatttgcattcttaacgagttcaattgttcatcatagtagataggctagattcttattacacacctataaaccaggctcatcaaataatagatccaactacagatacctaaggtgggcatatctattgtctagattcaagatctagttaattactatagatctagcattaagtataatcaaagatgaagaattctacagataacctagcaaagagatctactaaaccatatgaatccctaatgagaaaccctattcctaacaagcaaactactcaaacatattgaatgaaactagaaacatgattgagttagaaagcataaacacagcaaataagataagagtaagaacggatctcttcactgtattgacaactgaatgaatctctgaatacaatggatgaatagcttatgtcttgaaaatagagattgcaaagaacttgataaaagaaacttatgtctaaacaatgacctctaaaactatatataagccctataaaacgtcaagggactaataatgcaaatagggaagtcttttgggacaaatttcctcttctgtaaacttggaagcgtcatggactttgctgggtcgaaactggtgtcgatcaccaccaggagtgtgtcgatcgacactcctctgaatctggaactgaaaatcgtccttagcttcctttcccttagcttttgctccaaaatttcttcttatctccattgttgtctcactgcatagaatacctaaaataacactaaaaagactcgagaaataacataaagactcaaaatcctaatcctaaatcatagataaaatcagtaaaaatagggatgtatcaatatatatttatttttttgatagaaagactttttaattaattattttaaattcaattttattatacatatataaataatttaccttgattgtggtattgacatatctccctttgagacaatatctctaatataactagtttgaaaatttcattccggttcaactgcttgacatgtattatctttggcttgatcttagtattggt

SEQ ID NO: 20450 - DNA, 2186 bp, Arabidopsis thaliana landsberg
ttacctactattgttgtgaaccagctaggcaggcccaagaaactaaggatgaaatcagcaatagatgtcgtcgttgagaataaacgccctaggaaggaacacacatgttctcgatgtaaagaagttgggcacaatgttaaaacttgtcgtgcatagtattgtttgcacgaattgtatgtgtcttctttcccttgtttggtaaccgttatatgtatttcatgacatggtagactctaagcaccgtaatatttgcaatttctttaacgtcctggctgagttatttgcaataatgtcttgtcattttacatgttgcggatgagttatttaaatatggaagtcgaaatattcggtcattttacatgttgcggcgagttatttaaatatggaagtcaaaatgtttggtcattttacatgttacggctgagttatttaaatagggaagtgaaaaggttcggtcattttacatgttacggctgaattatttaaatagggaagtcgaaaggttcggttattttacatgttacaactgaattacttaaatagggaagtcaaaaggtttggtcattttacatgttatggctgagttatgtggttttacgactgactgagttatgtggttttacttttgagttatatctaaattatgttactttacgactgagttatgtgggtacttcaacggctgagttatatctaaattatgttactttacgactgagttatgtgggtttacggctatctgaattatgttacttagcggctgggttattctattatacggctgagttataatatagctcaaaaatgaacattttgaaggcaaaggcaatatgaaattcccataaatatttgtttgaaggatacataggaggaaattaaaagtaaacaatatttaacttgaagcagcatgacccgattccttccatcttgcattagtcgacgatcatttttatctcttgcacttcttcgatattgggttcgacagtcacaagtgatatggtcggataattgaaaatcttcatgtgtttggggccagtatgatacctaacgatcctccacgaagtgtgtgcaataacaatgttagcattgcgaaaagatcaaaacctgctatccaagtcaaccgccatttggccaacagcctcacatttcaatctcaccttgctgaaacatataaaacagtgttacaattatacccctctcaagaaaaatacatgatgaaaagaaagaaatttaaaaggaattgatcgaaagaaattgtattatttgtccataatctcgaaggaaagtctcaatctgtcaatcttgacaccattgtgtgaggaatttctcatacatcctatatcgaggagtgcaccaaccaaatctgggagtatgaaataaaagttaaaaaacaggcatgtcaaaggtgaaagtatgaaatctgcattagatacgtattacttaccgaccaaagtatctgtaagaactgtgtcttcaataatgtagtcaaaaggtgtgaatctgttaagtaatacagtttcccttgggtatgagcatgtgacaaatgtttcttccatgaactcaatcacataatggtgggatgttgctttgattggttcaaagtttggactgacacgaaaagttgagattgatttccattgattctcttggagcatatagaagtaaaaaggagaaaaacgtcttccgattgtagcctcaatttgtgttccctatgaaaacaacatcggagggtgagttatatagggaataagaataaggttaaatataacttgtaagaagagtgaagattgttttaccgattcatcgacaaagacgacccgtagttcgaatgtgttcccactgtgaaactttctatacactctaagaaccataacacaaatcatccatctagttgagaaaggagacaactcgtgaagactgtggaaatacaccatggtgaaattcagagtcgaagaaaagtaaaaaaatagatttgattagggcaaccttagatcttctgtttgtgagagtttaggtttggggagtctacgatatcaaccgatttttataggaagggaaacgttgttaattgggctggatgtaaccgttgaataaaaaccgaattaacatcggttagataagtaaaacgaatgtaaccgtcagcattataactattgacaactcagccgtaatacaggtaacttctg

SEQ ID NO: 20451 - DNA, 1392 bp, Arabidopsis thaliana landsberg
  unsure (1)..(1392): unsure at all n locations
cttcttctataaacaatctatatgagcagtctgttattagaaagaagaagctaatcaatagtttgctaagcatctaaacattcacaagctacaagatcaaagagcagtgtaattaggtaatagaccataagaaacactttctagaacataagtaacagatgtatacagagatcacattcctcaagaccaaactggttccagcattgtgtaaggaaatatatattgcagaaaccaatcatgaatcaacaaaaaaaatgtcgataaggaatcaacaaactcttataaggtttttgttagcacccagaaactctctcttttgttctactcgctcttccaagcgtacagaatcaacgaaaaaccaaaactatgagacttggagtttgttgttgtcannnnnnnnnnnnnnnnnnnnnnnnnnnnnnnnnnttgacaagtcctgaacatgaacacagcgtttcccgttgtaggcaacccaaagagccaactatgaacatcccatagaacttccacagtcattttattaacaactatcgtatcgttgcctcgaaacttccacttaagccgcttcacctgcaacaacgtcttaccatccacacgaacaacgagacaaggatcggtgacattcgtgtcacactcaatcaacagatcatgaaatttcccatcagcaaaaagctgagctttcgttgcaaacactctcttaccaaaaacatgctctttcttagcaatgaacacagcacctaaagacgaaggcgaagcattcgtcttcttaaaagcttctttcttcatatcaccaagaagcaaaaccatttctttgtcaacaacaacaccaacatagaatcctcccaaagcttcaggacctgatccgaatttcgcagacgaaagatcccaaaaaacatcgatattacacgaatacgcctctaaactcttagaccctttccgtttagtaaacagccacggcttaatctcgactttacaaagactttggttacaagaatcatcaacaccaactgttacactttgacccatcagattcttagtccatgtcacagagatcaaacaaattcttccgcgaattcgacatcggtagatacaagtaaccaaattctgagcgtttttaccggagttcgaagaagacgatgaatccgcaacttgaactccattttcaccaaagcaagaaggaaaatccttcatctctctctcaggaatttcaacaaacacttggtgggcgaatctaaaagttataaagagacgaaatttgactaagacaatgacggatacagttagagaagaagaaacccagaaagaaaaagtgaaaattttaccttatgagattgattagagaaggagaaactgaatcggaatctggaaaatctccatggatttggttcgaga

SEQ ID NO: 20452 - DNA, 1463 bp, Arabidopsis thaliana landsberg
tatacataactttaactttagtaaccaaaaaagtgaaatttttgaaaagcaattattgcgtgtgaatatgaacatctttttttgggtttggtgttgacgattatgaatatatgcaatctatgcattagaatctaaatcgcacaaatacaatattttaattagcctacgcatttaaatgattacagttttaataattgcaccgccgcataatttacatttaacatttacatcgtcactaaaagtgaaaaaaatttagtagaatttagttagacattatcataaacagaggattttaatttttaacattattattttaacactcatcgtagtctgagagtcgaacactcgagaaggaggacgatctccgaccaccaccactaccaccggagaacaaagcaacccaaatctctgaaaacgctcttacaatcgcgcggtggtggcgtttcgcgtttagcgataggaagcaactaagaagctgttcaagctcagctacttcaaacatcttcttctctactatcatctccatcattgatcctttaaaatcttcgtatggatcctccgatctcttcaccaccgccactccttccaccataaccgccgccgccatcgtacacggcattaatctctgcacaaacgaagacagtctcgccggagacggtggcggtgatgatgattcactttcttcctcgatcaccgccttcttgagaagttgtctcggacgtcttgtgacacgcggtagctcggaagaggaatattccggcgagaggtttgtagaagatggtaagagactctctctatcagtctcttcttcggcggaggaaatgctccctcgccgccgagagtttgatttctccttcttctttaaacgccggcgattatctttctccgacccaccgttgtatattttccgacgaggcgtttcgtattcttcttcagtgacttgagcaatcacgtgccacttcccttcactttcccactgaaacgtcggcgtttgcggcggagataacaccggtgagtttctcagatcaacatccaacggcgtggacgagcgtccgcagccaaacacagttaaaacgtgtagtctgaaagaagaacggcgacgttgcggcacggtggtgacgtcggcggaggagttaaccggtggagaagtacgtcggagacttgaagaaacaggattaaaaggaagagaagaaggatcttttaaacggcaagatttgaatgagaggattcttgaaatctttaatttgaaacgtttcgtcatttttttttcttttcttgttttttgtgttttgttggagaagtgaagaaagtatggagcatttaccaaatgagaactgtttgtgtctcttctgcttctatatatatgcaaacacttttatattggagtatataaaattgtataatatttctctgctttagtatgctttataccgacattacatttactaattatcttttttttg

SEQ ID NO: 20453 - DNA, 781 bp, Arabidopsis thaliana landsberg
atattcaaactatcaaccatattcaatttcacatgatttttttaacaaattaagaattcatcaatgaaatcacaaacaattttatttcattaataaatatattttgtactacatattgtatatataacataatgtatcatgtttacatagtgctcaaaattcaaaaacaaaagaaaaaatctttatgttttggtcagttatcaaagactttaagatatcattaattttatgattgataaagagagaagataaatatatttgacaagaaagtggcaccgatgctaattaataataaagaacgttatcatatcaaatatgatttgtcgtatactcgtaacttacgaataatgctatcacttaatcattttaatagatgttttaacttaactttaaccattatgcgactcggcaaaggttgtcatgcataaatattttttttgtgattttataagttaaatggggttaccagttaccaatcaaaaatcataatattttttttttttttgaatttaatgttaaattatatttaaaaagtaaataaacgtttatacatcaagtgcaacatatgattgaaagagtagaaaattttttgtaaaaaagctcatgatcttgattgaaaccatagttggagagccttatcatatcgatagtctccgcttgctgcgattgtggaaatttgattcctcatttgtttgtcgagccaccggattagatgagtcgctgaattcgaacgttccccatgtcttttaccatttctctcatgccatatggtgtgtaggca

SEQ ID NO: 20454 - DNA, 509 bp, Arabidopsis thaliana landsberg
tgagctgagagtctcacgcgccggtcacgtggaccctttgatgtgaacactttgctatgacggtctttgcgtccagtggctcggattatgtgaccgccttgaacctcaactatctctcctcctccttctccgacgctatatcctttaagtcccattatttttttacctttcaaaatgacattccaagagttgttttaacttggaagaaaaacttgcgtgccgtttttgttgcccacttgctttgtttacctcttcaaaatgcttgccgttttgttgttattgtggtgtttggtgtgtagtgagttaataacatctgatgcaggctggacacagctacctgaaagccgctacaagaagcaactcttctatgcagatccccaaaagatctgccatggcagtcacaagattcaatgacccaacatacccaaatgaaaaaggggaaaaaacgaaaaatatttagaagaaaagagaattggaatctttaagtctaggggtttcccaaagagatg

SEQ ID NO: 20455 - DNA, 727 bp, Arabidopsis thaliana landsberg
aatacacaatccattatgtgaaaatttccactactcacaacattacaaaaaaagatcttttgtaacttttatgtattcaccaacacaaatacgattttaatctaatggtcaaagaccctttttactctgtttcgctaacgtatctttctacttgttcaatcaatcagaaacaatcgcaataattgcaatctacgaattttcttgtctacttgtacaaaacatgagaaaatcatggttaatcaaaattacctttgaggagatgatacaaaattggattggatccgtagattgatgatgatcgaatcaaaaccaaagcaatccaaaggggtagagactcgagaagacaaaaacccaccactgaatttcgtcgagactcaaagattcaagagaacgataacttgagatcgcgtctcacgtcatgtgaaaaagaagaagatagattttttttttccttttctcgttgaagaagaaaataattgggtatccatttattttgagataaaacccatttaatgattggaactaattgggctcttccatttaaactcatttagcatttttctgtaaatgggtctatatgggttaattttttaacaactgacccatataattaaatggggtgttaaacccatattaacatcaccaactgcaaccatgtatttcacccctggatatgcttttcatgtgcaagctcacggtaagcatcggacaacggaaaactttggtg

SEQ ID NO: 20456 - DNA, 827 bp, Arabidopsis thaliana landsberg
cacacatacgaaagagtttgctataaattctcgtcgttttctctcgatattttgctaaaggacttgattggtccaatatccactcgtttagctggagccgtaatcttgccacgtggtatacatctattgcttgatctgcaagttgccaagtgaccttaatttttttttgagtattttacacaggtttgattagccgactcaaaagtgaaaagaaagcaagtaataaacaaaattagtagaagattatacggtaatttgaatataaccaaagttggtatattatatgaacaccattttatccggctattaaactagattccgtttccaacgtttcacaaaccgagagatcagaacataaaccggaatgaagaaggatcctgattaatttctaaaccggaaaattcgaaccaaaacaaaacataagaggaatttgagttttgttaggtccttggagaacaaaaattaccgctaaaccaaacatgatgagtgacgatgtgtacaaagagctaaggaagaatacaaaacacatttcacagttctgaatataacttaagaaaaaagcttaatctcaatcatcctcagaagcagcaaccttctgcttcttccatttgtatgcagcttcaagaatcttgagattcgttgtttgcgattcttctgggtataaataatcgatgtattcttcgtacctgtttaaacattcaaacaatttttcacgttaagctttagcatttaactaatcacattcgaaagataacaaaatcgagatattatatataagcaatgcgtactctgttgacccgtcaaatctaaagatcgcctttcttttc

SEQ ID NO: 20457 - DNA, 584 bp, Arabidopsis thaliana landsberg
acaccgcctaagagtcaaacaattgttctatcgtggaatcatcatgctctcaaaaacttgtaaggagttaaaaccctatttttcaatcttcttccaagttactaggactactttccttgaagcttttagacaaccatatcgcggtttctcttggcgatacctttcccggaccaaatggttttagtaacacgttcagctcatcgtacctctcgtctataagtaatcttgcactgaattcaagtagtccttcaagtgcctcagctcgttgtcgatatgagctagggtcgaatctttgtcttcttgatgcacctgaggaagctctacttgatgctccagcagttgcattttgatcagacaaatcacttttggtttctcgttctggttcaagtgtgaatttgtcttttgttattgagcagtctagtggtggctctggaggcgggctgtatgatcctctggacgatcctttcttcttacgaacaacgggaatgaaaggcatttcttcatatgaagctaacgggaacttgatcctgtcgattcttggcgagtttactgacacatttggagaatttagctgatggagtata

SEQ ID NO: 20458 - DNA, 1159 bp, Arabidopsis thaliana landsberg
actagaacaaaaaatgtttgtgcctacgatgaatttgagctttacttgtggttgcgggaataatgacgggtgtgggtggtacgtataagaatgaaaaacgacgtatttgaaaaaatacgcggtgaagtaacttaattaccggtgagggtttttttaatccatttttcccataaaaacaaattttaaacccaaaatactaaactctatttttatttcttaaaggccacattaaagtgaagttgttactatattttgttatttttatttcaaaaaggtaacaattttacttttctttctagtgtcattgaatcttttataaaatttatttagttaagttagtttccagttcaaatttatacttttcattttattaaatttacaaggtgatatcatttcatgaccacttgattaatgatccgtttaaagaaaaacaacattttagtacgaagtgtttgtacatattaagttacgataggacatacattttatttatgcagcggtgccaaaacggctacttatataaacgaaacgacatagatatgaagtggttacaaggggacaatgccatgcatgaagatagatgcttaagaaggtacgtagtagagtggatttgggagcttaaaaaccctcccaggggtatcctcaaccaaatcagcccattggtctccgatattgccaacgatgttgtatcctttcttcacgagactcttcctcacctttgacttgtacaccacttgcctcaagttcgaaccattaggcctacgtttccatatttagtacttgattcaatcacatatatgatacttataacttatttaattactgtataactacttgactattcttacttcaatatgagatgcttccagtaggtaacgccagcagcttcgagattgtcgagggtgacattctttcacaacttccaacggtcactgagtatgatgggttcaatcccgagctctatgatgttttggtaaagatgcaaggcctccgggagtccaggggttgatgctccggtccctaaccacaaccagtacgcccccgggtcggtcttctctgtcctaagaatccacaaaaaaaaaaagtattttaaaatgaattcacaaagtaagatatatacgggaaaaaaaaacatttagggtagtactgaaactattta

SEQ ID NO: 20459 - DNA, 1254 bp, Arabidopsis thaliana landsberg
  unsure (1)..(1254): unsure at all n locations
tcgcttatgggatggagttttaaccatagtaaatcaaagaaagtgagtcgaagaatgagtgccttgattgagttcgttgcagagctggctcgagagatcttgaacacgttttacgctatttggattctcgcactctttggagacaaattttgatcggaatagtcattgttattctcctatgagattagtgtttggtgtgtcaaatttaaatatgagtatcattatcatatgaaatatgtttttttggtaaagctaaaacgaatcacattaatatttaaggtctcacaattatgttagcacattaattattaaatattgttattaaaatagttggtaggaaatcgatcaaattttttttttcacttataccacagtttcctacgaaattctttaccaatttgttttgtagggaaagtctcacgaaagttttaaccatttttgcttttctacaaacaaatttcgtaagaaaattgtaagcacagctctttccttactgtttcctacgattggccattagtaaatgcaatgttttaggacatatcagcaacatcctcgaaaagttttgttccttgtactcagtgatgatataagttgttttgtggtagtagtgaagctattagcttaagtatgcttttaaacacaaatacattacatgattaattacatgtcaaatcttaaaacaattttaatgaacttgcactgttacatctcaaaacctccgacacattcacattaattattgtactcaaatgaagtgtgaatattcaatggcctcgtctcgtctccggctactatcaatgggttgagacttgactttaaaattctcaaacgctttaattaatgatattattataagactggcctaatattttgaccaaacttaatatataatgactcaaataattcctagttggtcttaaacaatcaatactttgttgtccgaaaatcgttaaaccaataattcaactaccattttaataggtgaagtagttctctttttgttgctaattgaatggaatggtatctatttgattactatatatatataaaccacataatgccactttgtgactaataagcaataataatttaggcattaaaaataacaactagcaataatcatcacgcgataagatttaactattgatatcttaaagaaattntagttgtatggtgtgctgagtagatgatgaagccacttcaacaactggttgtaaaatatattttcaagaacttcatatacgcacttcgata

SEQ ID NO: 20460 - DNA, 607 bp, Arabidopsis thaliana landsberg
ataaaaattagaatctaaccataaaaattataaatataaattttggatctaatttcattaacaataaaaaaaacataaattagcaaaaataacaatcaatataaatatttttttaacaatttttaaaacaaactcacgcgtagcgtggatactcatctagtacccataaagcataaagttaaatcaaaccaaagtgtgaattcaaaagaacaacaaaaaaaaaaccattaaaattagtttagctttgattgtgcctcaatgcaacctgatacaccactgataagacgacatgtcatcaaaatgacacgtgttaaaatatcattcgctatctaaacgtacacctgcgtgtcaacataaactgaggaagttaatgaactttttttacactgcacgaagaagaccctctcaaaagcacgaggaaggatcaaatcggaaacttaacagaatttagctaccaattactgtctccggcgagatctcaatttgatccttcacggtggcgtcgacgtccgggcaacaacaagctctctcgagaagaaagccattatcatcatcatcatcatcttcatcatctcctcctccgtcttcctcacctgttcgagctcct

SEQ ID NO: 20461 - DNA, 736 bp, Arabidopsis thaliana landsberg
acggctacgtttctttatctgccgtactaaggctggcctttcgcaatatttggccagacgatatggaaaataagtgtgtttatatatgacatagacatgtttttttaaacaggtgcaattcaataatcttgtgattaataggagaaaagaagaagaaggtaggagaagatcaagattctaaaaggaaagccactgatatgcctaaacgaataaggctacgatcagctctacttgttaacttaagacccaacactggaatccaggtaagttcgttgacctaattttcacttcatttatgttttgacgacgatcatataatatattgattggtataaaatttcaataattggttgaaacaggatctagctgatatgatggctaaaggatctacgtgtagatggggaaattggatcggctacattgtctttccgttttctatcggattacgcgacgatccgttacaacatctccgaagagccaaaaggatcatcgatcgcaagaaaaattcgttagaagctgccctaacgttcgtcgccggtaaattcattctcaaaacatttggagttcaggttagtttcaagtattttatggcatcaaaccaaaacctaacatagcattgatttttgtttttccttatagtactgtccaatcttataaattaaaatgtatataaacaggtagcagctaagataataaatagagcattgtcaaacacaacgatggtttcaattttttt

SEQ ID NO: 20462 - DNA, 636 bp, Arabidopsis thaliana landsberg
gaaaatccaattacaaattttataacaatgtgggtattttaaccgaactgaaccgaaccgaacctatcatactaaacttaaacctacccaaactaaacctaagcttagattcaaaccatttggttatgtttcatctcaaccaaaatggttcggttcggttcggttttaaactgaaccgaaccgacaacctaatgtgtttatttatttaattaattaataatattgtacattactaaatatttaattatttgcacttttaatttcttttcatggtttatttgaattaataaacttaaatttacagcttgaacttgttgattgagttaactattatgaaattcaaagtttaaacgacaatgaacgaattttttttgtttcgttacattgataagtcttttaaaatcgaattaaaagcaaatcgaactaaaccccaatcgaaccatagattaattcaaacacaaaccaaaccatattaacttcggttgagtttgattagagttttaccaaacccaaataaaccaaaccaatccgaattcaaaccaaaccccaagtgaaactagaacgccagtaaacaatattcaaatagtttaaattaatacaaaaaattaacatggcccaaaaaaaattacaacataa

SEQ ID NO: 20463 - DNA, 593 bp, Arabidopsis thaliana landsberg
  unsure (1)..(593): unsure at all n locations
tcaagagcggggattgtatgggagagccttggattcaaatcaggttattctgtttcaaacccaaaaccaagctcgaaacagcctttaagctcctcgatatcatcattcgtgacactcttgctgcgaggaaggagatccagtgggcgtttctttttcttacgcagccaagcctcttcgcgactcatgtccggtgaccacgagtattgcttcatcagaggtcttggaggctgtggcgcgtggttcgacattagtgactaggtttcttttgattgtgtaagaaccatttctgctatgtaacacgaataataatatctacacaaaagtgttaatgtagtagaaaaaagtgaatgttttcggaatgagaaggctcctaaaattttatattagctcttacttctcttttgggaggtaaagccatatattgatccatattttggcgttgttttagtattaataaggatnnnnnnnnnnnnnnnnnnnnnnnnnntaaactctatctccagttntaattacctttaatggaaaacctctatctccaaatgttcttttttggataaatctctacatgtagtatataggaaatataaattcat

SEQ ID NO: 20464 - DNA, 1965 bp, Arabidopsis thaliana landsberg
gagaaattatgatatgattgaaaaaacgctcttttcttttttttctggaaatgtaatccttcaacaaggatatcgggccaaaggatatactcgttattccaatttgatgcaagtccttttggatactgagcaaaataatgagctcgtgatggtgaatcatttatctcgttcacctggattagctctacttttataagtgaatgttgcttcatccggtgatgataattaacaaggacccagatgttgttgaggtcgtggtcgtggccgaggaaaatgaagaagtttccatcccaatgattgcaacacggaagaaaccaacaaaaatattcaagtgaatgatgttggccatcttaagaaaaggcatgttgaagacacttgccacatatgcggcatgaaaagacactggtaccaaacgtgtcgtataccaaaacatttagccgatatgtatcaagcctcacaaaagataaaagaaagggatgttgaaattaacctcatatgtgatgagtcgggaccgtcctttaaatgacaagacgatgatactcatcttgatatggcagattttctcgattgattatgacaatgagaaaattaacatattatagctatatatataatcatgttatgtatgaaaagcattatagatgcttttgttttctagaataatgtttttattgtaatatattatgacatacgaatagcatatgtcaagattttaatgaataaaatattttatcttagaaaaaatgtgaaaatacgagattgagaatgaagatatatgtctggcggacagtgcttctacgcatacaatctttaaagataaaaaatactttgcctctctcgaaataaattattccgctagaaacgtgagtactatatatggccatgtaaagataatattaggctttggcgaagccaattttacaatgccaaggggaactcattttaaagtaaatgatgcattatattcccctaagtctcatagggacttgataagtttcaaaaatatccgaagtaatggatatcatatagagactatgaataaagatggcatagaatatctttacataaaatacgagagacaatatatattagaaaaattgccaatgctatcctccggattatatttcacaaaaataaatataatcgcatcaaatgttacagtaaatttgagtgacaatcactcgtgtgagtttactagtacatttaagatatgacatgaaagacttggacatcctggttcagtcatgatgcgaaaaatcgtgcaaaattctaatggccatccattggaaaaccagaaagtatttaaatctggtgagttttcatgtaaagcatgttctgaaggaaaactcataataaggtcatcgccaaacaaaattgggcataaaagacctgaattcttgttgagaattcatggtgatatatgtgggccaatccacccaccgtgccggccgtttcgatattttatggtattaattgacgcatctactagatggtcacatgtatatcttttgactacacgaaacacggctttcgcaagattcattgtccaaataatcaggttaaaagcacaatttcctgattatgccataaagaaagtcaggcttgataatgctggggaatttacttcacaagcctttaatgactattgtgtatcgatgggaatcgatgtagagcatccggtccctcatgttcatagacaaaatggcatgaccgaatctttaattaaaaggttgcaactcattgcaagaccgttaatattgagaacaaaactcccaatttttatatggggtcatgctatattgcatgttgtagctttggttcagattagaccaagcgcatataatgaatattcccctttacaaatgacttatggtcaagtaccaaatttatctcatctccgcatttttggatgtgcggtatatgtgcccatagcaccgccccaaagaacaaaaatgagtcgccaaa

SEQ ID NO: 20465 - DNA, 748 bp, Arabidopsis thaliana landsberg
tggatgcttttattatagtggttctctgttatgttattgagagttgtgaaattctgatttgtggtgttttatttttgaaggaaccctgaggacatcccatggggtgaggctggagctgactttgttgttgagtctactggtgtcttcactgacaaagacaaggctgctgctcacttgaaggtttgaacttggatcttttatataatagtcgagaacttgtttatttaagatctatatcatcatcatattgtttcattgttattcagggtggtgctaaaaaggttgtcatctctgccccaagcaaagatgcgcccatgttcgttgttggtgtcaacgagcacgagtacaagtctgaccttgacattgtttccaacgctagttgcaccactaactgccttgctcctcttgccaggtatctttttctgtttcaacccataaacttgtgtaaattgttctgaattctgaattttaagttgaatcatttctcttacagttgcaatctatttatgcaggttattaatgacaggtttggcattgttgagggactcatgaccactgtccactctatcactggtacgtatttatatttggtttcattgggttgattcttgaaaatatgtatatttgactcaatagtaactgttgttttggtgatcagctactcagaagacagttgatggtccatcaatgaaggactggagaggtggaagagctgcttccttcaacattattcctagcagcactggtg

SEQ ID NO: 20466 - DNA, 2617 bp, Arabidopsis thaliana landsberg
  unsure (1)..(2617): unsure at all n locations
ctctgatgtatctaagtttggtgtgatttacggtggtgcacagattaactttggtccatctggtgtcacaattgtgatcatgggtggggatttgattgggaatgctcaagatattactcctgtgatgcttgattacaagattcatgatgagaatagttcgttggacaacacgcctccttgctttgggatttacatgtgtggtcttgtgtttgaagatctgttggagcaaggtggattgaaagaagtggagaagaagaaccagaggaaagctgatttgctttacaatgctattgaagaaagcaatggctttttcagatgtcctgttgagaaatcagtgaggtcgttgatgaatgtgcctttcacattggagaagtctgaattggaagctgagtttatcaaggaagctgctaaagagaagatggtgcagctcaaaggacatagatcagtgggaggtatgagagcttctatttacaatgcaatgcctttggctggtgttgaaaagcttgttgctttcatgaaagatttccaggctaagcatgcttagttttaagggtttttgcattttggttatgtttgttgaaagatgataagctttaaagatgataagctttaaagcttatgatttgtttttttttcttcttttcagaatgaataatgtttaacaatgtatcaaaatctttctccatcaattggaaaaacaagtttgttaacaagcaaagagctttgttatttgtttgaagtgattatgattgatgatgaaaaccgccttaaagaagctgcaggtgatctcatgttctctttttaatgtctcctttccctgcaactccctgaaactgaagatcctgttttaacaaaaaagcaaaattcaattcagatcccaaactatactcagatatataaatacacagttcactgtaggaattaagaaagtaagttaccatttggtattgtctctctataagcaacagctacattttgaaagaactctnnnnnnnnnnnnnnnnnnnnnntcaactagcatattggcacactacgaaagcctgagcaatggagaacaaaatcagaatactattttcacaatcaagactcaccatgctccattgtcatagatggatcttgctcatcaacaaacccgatgagttttgctggatttccagccaccatgcttcagaaacgcccgagagaaaatgtcaatttgagcaatgttcaaacaaaaaagctcaacgagattgatatttagatgcatgtcagtggtttcatacctatgcgaaggaacatcctttaacacaagcgaaccagcagctaccattgctccagcgcctatcttaatgttaccaagtatagtcacacatgctccaagaagagcaccgtcgcctatatttggatggcggtcaccggtttctttcccagttcctcctaatgtcacaccctgtaacatgaaaatataagctagcatttataacatcaacagttctttatagttttggagaaatgaagttagagaacggatttgtacatgcaaaattgagacacggtcgcctatcacagcagtctcacctatgaccacaccagttccatgatccaacaatattcctttcccaattcttgcagctgagcaaaaaaaacagaaaccaaagttattcagatgctagatgtaaaagcatagacaagctattagctatgaatctaaaatctttaccgggatgaatatcgattccaaaaacctgagagaaaccattgacatggatcagaggttaacgttgtacaccaagactataacagtaaccaaagaagttgtagaagttactcttacctcgcttactcggctttgcagtgccaatgctaatagttttcttccttgcttccacaacttatgtgctactctatacgcttgcagtgcaagatagccctgtggaacaaactattctggtaaaatacacatgaaaactcacttagcaatcattttatatcggtgtaagagatgttattgtctttaaatcagcaactactgatgcttaagagactaccttcagatgtaaaatagccgaactatacgatagacaagcaggatctatgtctttgaatgccttcaatggaccaaaaaaaaaaaacattacactgaagtcacattctcagacaataatatcagtgtcaaaaggaagattcaccgatacgagatagcgtttttacctgaacatcaagacgaatcgagctttgaatacctctgtcatgtaccataacgttgcaaaatatatccataagctgagttgccaacaaggtagggttttggagacggttagctagaacaaaactcaatgcttgctctaaacagtcatgcgacaagatactagcatacaagaagctactcaaaaccggctcctcttctgcctgtaaaacacacaacaatattgaccattaaaggaacataaacgcacacaaactctgttccttaacttgtccttcgtgtcagtaaggaaaaattgacgctgaaaaagtacacgggtgagagaaatacgctacagcacgaaaaactaaaagcttaatgaagtacttaaagagacagagaaagcatttactgagaattcgaccccacggttttgtccgattgatataaaag

SEQ ID NO: 20467 - DNA, 859 bp, Arabidopsis thaliana landsberg
tgccaaatatatgttgggacacttgggctgcccatagcctattctccacaacatatcaccaaatgaaaactgacaaacctgccatagagaaatgcgacaacatacaacaaaaagaggacaaaaaacttacattcgttctaactttcctctattgacaaaaaatccatcatgtttaattggcgaattatcaacttcaaaatactcatcctacaatgggaaaaaagaaagaaagaaagaaggatgtctcagctatcaagatacactttgatcacataagaaagccatagtcaggatatctacactaaccaattcagcatcatcgataaatgaatcttcagtgtcatagtcatcatcgtcaggagcaccgtctaactcttccccatcactaccgtctttaccctgaaatttattttatgaagtatacgctaatcagaaatctgttgcaaaaccagtgctaatgcatggtatgaaaaatgttccgaataagaaatcaaacattcatcttacttgttcagataatcaatagaaacagtagtaagaaaaggtaccatataaagtctctcaatcttggctataacagagttaagacgattaggatgaggttgattcaccatttcattctctgtttgtgccccctgcattcgatatatcgctaaatcattagacaatgatcagtatccacattgaaatcactatacagctttagttttgtttcattttcaagagttagtttattgaaaccctagctctaaactcaatgtcaaggagaaatttcccaattcagctcccggaatgatgatacaatacaaaaattggtctaacagagacagagaaatgaatacatgagaatatgcatgta

SEQ ID NO: 20468 - DNA, 575 bp, Arabidopsis thaliana landsberg
acttaatttgtttctgtttatgtttatgtaagattcaaagtactttatgattccatgttataaagagtagtgttcatactgaaaatatcatatcaatctataattcataccggaaacatgttatagataaacattactcaaaattatcttaagaacctaaaactaaaacatgcaatgtaaacataaagaagtataaataaatttgaaaggtcacaaattatggtctttgtctttgtgataaattgatttaaaaggtcacgaattatggttttcgggtctccattgcaaaatctgatattcaattcacctcttatctcaaagtcccgattcacatctctaaacgattgatactggagcataatgaggaaccgattgagattgtgaattaaaaatccagttgtaggaagaaaaacaattagcttttccatatggcacatatctcccataaaccgattgaataatgaattcaacgaatctaattatcaaaaatcagatcaaagaaaaaaactcttacctaatacttgaattgatctttgttgcgccaattattggaattcaacatgagtaagatgatc

SEQ ID NO: 20469 - DNA, 1808 bp, Arabidopsis thaliana landsberg
catcaaaatatcttgcgtaagttgccaactaaccactttattcacaaataatttctaaactagatagtttttctagatattagaggaataggtacttttttctctcttctctaatagagctcctctctaatatagagattttggtaatagacaaatatacccttttgttgttttgttatgtaaacatataaaaacaaaagacatatgagtgtgatattaaatgggctagcccaataacatttttatcttctaattactaatatatttcttaatttaaaaaatacacatcaataaaattctttcaatcactttatacattttaaaatactaatctttttaagtattttaaagattttaattttgttatattttgcggatatgtattattttaacattttactatactaacattttcaatttttaatacatattaaaatactaattttgttatatttagctaaaataagtttactaaaatactaagattttatttttattatattttgcgggtatgtaatattagttttaaaatactaacatcattaatatttttatatattttgaaatactaaattttatacatctctaaagattttaattttattatattttacggttacgtaatattctatcttgttttatctgaattcgatggtgtacaaaataatattaaaaatagtgtacaacaataattttaaagataaaacaatgatagtgtacataaactaataaaatagtagatgacgccatttataactctttaaatcgtctatcgtacaccttcaaaaatattgtacaccgaatctatgagatagagaattatttggtgtacttgaaagtttatgagatagtgttcagacatcagtgtacaaaatgatgtactttagtatattgaagtaataggttatatattcaaaaatattatacaccatatctataaaatagagaattatttggtgtatttgaaggtttatgagatagtgtacaaattcagtgtacgaaatgatgtacaccagtaaattaaaataatggtttatatatttcctattagtataccgcaaatgttgtacgttatgtctatcaatctcacaagctatcatttaaaattgtgtacatcattctgtcactattctcgtatatcataatattgtacaccaacatgtacaccattaaatttaattatattaaatcatttaaaaattgtgtacaccatcccgtcaccaatatcatgattttaatggtacaccattccgtattcatttaaaaattgtgtacaccataggattttcctaaatttcgttttaatcgacaaaaatgatataatgttaagtttaaccgtctgaagaaatagattgaaaaacgaaaacgattgaaattttttttgggccaaataacataagtcaaattaattaggctatgaaaatagtatttgatccattatctctaaaagatttgggcctacaccaaaagttctttcttacaaaacaaaagggtacaattgtatttaacatttattttgtttttttagttatgtaccttctatctcacatattttctatcccacaaaagaaaaaaaaatacctatttctctaatatctaaaaaaactacctacttctcaaataacttttgaaaaagtgtctactttgccaataaacccaaatatctttttctcgcacgagaaaactgcaccatcgaaaatggatagcttagcttaccttcaagacgtgggacttcgtttttcaccatcatattgatgatataataactgggactaggggtgtctttcgattcgggttatgtttgaaaa

SEQ ID NO: 20470 - DNA, 1207 bp, Arabidopsis thaliana landsberg
tcataatattagaaaaagtaaacataattaataattaaaaccataaataaaacattaaattcaaaaataaataaattttgtaagaaaaagtttaatactttatgcatttggtacatcaccaaaaattgcatcaaatagtgtgataaactgtaaataacgttaaactcgcgggttttccggattgcctctatataataaagtttcttcaagatatccaaacgatttttaacacatctccaactaaatttttttccaaactggtcgtgaatagatgaacggatagatcatacttacgtttgattcttgattttgattttaattttcatccgtttgggtcgatgccataattgagagaatagagttacaatatattgattagggttttctaataagaataagatatatagggtttgggtggaagatataattattttaattaattataaaaaagattattttgttttaacctaaccgctaccgcccgcaaccgcaaacgtttgcggaaaggagcttttgaaatctggcgatttcgagcggtttaaagcgatatctagcggtttttatgattggtgtcaaacgctaacaaccgctaccacccgcaaacgcagcgtttgcgggtgacagagggagaaccaatcaaaacaaaatgcgactggtttcgtcgaaacccaaattgttggctatgtgtgaaattctgggacgcacatttgtgatattgttgtggcttgtgatagtagctaatcgaatacgtagataacatttggtcagggcatttggtactagtcgttcgaaacgataacatacttggtatgcactatttggctttcaaggatccaacgcaaaaagggttgacaagaagtcgacccatgcatttgtaaaaagaagcatcgagcacgtttgcttcaacaaatttgatgttctgactcagttgtcatattttaaaagctatatagttgcgacaagccgacaaggtacctcgcatcacagttcacaaccaagggcggacccacgttggtcttgggtgggacatgtgcccgatattcaattttataaatcttatataagtttgcattatataattaaaaatgtatgtagtgtagtggttttttacttagatggtgccccatcattaatccaaattcaaggcttgctgatgtctttttattgattttttataactgtgccccatataagattatttcgggat

SEQ ID NO: 20471 - DNA, 1273 bp, Arabidopsis thaliana landsberg
acacttgtgtgggaagaagacatgcagaagtcatttctatacttattgtgtaagctaaaactatttaaagtaagtggggaggcatgaactgccaaagtcctttctttgattcttgtgactactttttgtaggttcgattggttaacatactagaagactataaactgacaaggaaacaacaggaagaggaaaagaaaagatacagggtttgtcccaaaacactctcttaaaaccactcaagattttttcgttttcccgttttaaaacaagctctatatcctttgtgcaggatcaaaagaagaggcaggatctcctactaacccaaagggaatccatttacggatcaaaaccgagtccaagaagaagcagcagcttcagaaagcccaatggtttcaacattagcaatgggaatggttcagtgcctcccacgcctggtagaggctcggtagggacaacaactcctgacgttcttctaaccccaagatcttactctggtcatcatcggcaaaacgggtattccaaagaagttagaagactctctactactcccttaaactatgtggccatgcaaaaggaagatactgtttctactacctacacatcgatttatagctctgagccagactcgcctctccaaggctgacttgactctcttttccaccggtaagagaaataatcaaaactttaaagcatcaattgttcttgtggtgatctgaaactttgtgtagacagagattgatgttagaagttggatctatgatgcaggatttgtggagtaatgttaatggtaaaaaaagaaggaagtgaagaagaaggaaggagacttgtgaatacagaaggtgactgacttttaggagatatggtgagataagagtaaaaaaataaatgtgaaatttgttattctttagaggttacaagttttctattttgaagtgaagaatactattgttttgtgtaatgccagtgtgaaagtgtgtgaatggtcattgttgtgcgtacgtatttgtgtataatatacgtatttgctatatttttgtgctttaaattagtcttgcttttgaaatttaaccattttgcgtgtacttaaactagagaattaagatggatagattcattatgtgttgctgttcagtttttgtcacaaagaaaaaacagagccaagttcatcaacaactatggaaatgaagttttttttcctgtactttagagattcatgcgtaaacaattcattgtattatgcatatttttttcactaaaatcttactcaataaca

SEQ ID NO: 20472 - DNA, 701 bp, Arabidopsis thaliana landsberg
gagctaaacactattgagccatattttactaaactctcttcttcaccacatctagtttttgctaaactacgaaaacaatcctagttactttgctaaaagaatcgtttgtaagtcaaaatcttaagtcatccatgagtggatcctaataagagtcacaatcaccttttgattatgtagtgcagctggttatgtacgtatgtgaatgacattaacaccattttaatagtacaattcaatatgatcaactagcaatttgttgaaaaaaatcttatagttttcatctatataacaatataatataaaactatcaaaatgttattaattaagagtaattaagactattgagccatattttacatctcttcattacattactatcgacatggttttgaaaagatggttcatgagtcttattgataaagaattttaagagtcacaatcacctttttattttgttttgtagagtcggttgcacatgtgattgacgattgacgtaaacaccaattaaaaagtacaattctatatgcacacgacacgacacaacacgggctataaataagttaagacattgctcctactcttctcatcacttttccaatctctcaacataaaatcccacaacaacacaacccaaaaaaagacagagacaatggcacagcccatgcgcttcatgctcaatcaaatagaaacagaatcctacg

SEQ ID NO: 20473 - DNA, 759 bp, Arabidopsis thaliana landsberg
agaccaaaaacatgacgaagaaaaaaatgggttttatgtcatcaaattttgctttttttgtgataccaatgcttcttgtgcttttggctatttcctctcaagttgaagttgtagaatctacaggccgaaaactttgtaagtgtcgttacaacttacaaacacataagcatatacagtattaaaagtttgcaagtaaaacttctaaaaaatataaatttgaattcatttctcttttcttttagaatttaatgtaaaattatatgcaacaaaaacaacttttttacaatgaatacatctgtctttgaattacatttttgaaagaatcttgaagtgagatacacttgatgactacctcacggaatgaggctgagggtgagctagccatacatcagtctattgtagtagtttctgtctcccgtgtcgcacgtatttaactcagtcgatgaattcgtttatcaattgcagcgtgggcgtttaacggagcacctatcgtatttactccaccctcaagttcatgtggaggttctccggcagcagtaatggcttccgagtggatgccacgccgaccatgcagacgtactcgtcctcccggaactaatatccctgtttctcaatctccttaatactcacctgaacttcgagtttgtgtcaggattttcaagttatatccttaataaactggctgtgttgttttcttttagtttcttgtagtaagaaagggataatttaagggtaaatcagtcgttacatcattatcta

SEQ ID NO: 20474 - DNA, 1151 bp, Arabidopsis thaliana landsberg
accctactttatacaactataaacaaggagaatcacaagtttctttatatttgaaagatgatatatgaaatgttttaggtctacaactatgtatctatatatctatttagttattgatgttaagaaaatactttatttagttttattttaggtttaaaatttaatattttattggatatcatctaagttacaatttacactttgaatatatcatttaatattaatataatctaatttaataaaattaattaatatatttatctatatatatattacgcttatatatatatatatttttaataattatatattttatttttaaagcctgcaaataacccgtaaacacacgggtttgaccctcaccaacctcacggcagagcagtcagggtgggattagaaagctttagttctgacaaacctaacaattaccactaaaattggaaaaatgtcaaaacaaatcacgaattttaaaatttgggacgaaaaaaccatgaagttttaacatgtcatttaaatctcaaattttaaattgactttacaataaaatggttaagttgtgttgattgagtcattttaggcatgccattaaatttttgttagctaaaagataacgaagttaattttctgtaacatctaacaaaaagtaacgacaatgcctaaaatgaccgaatcaacaaaacgtaaccattttattgtaaaatcaacctaaattttgagatttcaatgacatttcaaaaattaatatttttttcttctcaaatttgaaagttcataaaaatttttagatatttttaccactaaaaattgtaaacatccgtaataaaataacaaaatagttgaatactccatattttgtcacctacccattagatcagatctcaatgacaaacagtatcatttatttataaaatagtccaacagattttcgtcatttctctagctttacatagtcaccattttttttgtttgtttgacctcaaaaactcctacgtttttaagctcttctttttgcttcgattcccaaaacgactattttccaaaggttagtttttaatcttcaaatccttcttcaatgtccatctttgggattttaatagtcaattcctttgggtttttttttttttttttttgagtcccggacttttttggat

SEQ ID NO: 20475 - DNA, 714 bp, Arabidopsis thaliana landsberg
gctctcagtatacaagatataaatacaatatttttatttttatttgaatttctcgtataagttgtgatcatgcaatatttttggtttatcatcatctcatgcgttcctttttaagagagtatagaataaacgtgtgccatataaaggatagtagttgaacaaaacaaaagaaagaatcgtaaaattaagtactttaagaaacttatgttgtgtcttgatgaatctctcacattcatttttggttttatgatgagtctctcacccacacaacttgtcatatgcatatgtgcttaatttagcaaaactaatcacactcttgttcaagtatcaactttatatcttcttgtttgatacaaatcatcctcttatttaatagcaaacaactcatcctaatggaaaaatggataaaaaaaacctcacattatctaaaatcatgaaaaaattctcaacttttttttgtggatttttaaaccctcagttttttaaaagtgataaaataacccctaatattaatgaatcaaataaataaataaataaaaacttagtttgtaatttatttttgcaaattctagtttcctatttttctttctaattttttttcttactctattaaaagaaatcagtgtcgttcccactagaaactggtacataaactacagaaattcattgattacccattatatttatttttttgttcgaattggttctaacttt

SEQ ID NO: 20476 - DNA, 663 bp, Arabidopsis thaliana landsberg
tattttccattcccgccattaactcgagaggcaccttcttctccaactgtgtgaggcgaaaatcatcttcactaacaatcttgagttttccgagacccgctccacaaggttcagcgtcgacgatgaaacaaggaggagtttgcaacgaggaaaaagagaggccattagagtgaagaggagaggatctcgccaacactggtttccggaagcatagcttccagtgctggttgagaagcagagacatgaatgaataagaaagatgttctttagcgagaatcaaagagatttgaaagaaagaaaaaaaccctaattgagaaattggtaatgttcacatcacctccattaatactagtatatatgaattgctctgtcttgcccaccaagtttccaaattatggtaatttttacataacttattttccataagtcccttggtggggtcggttccccactataccctacttcttgaggttgtactgttggtaattggtatgataaagagaaccactattactagaatctgacgaaattttgatccgataaaactgttgtttgtttacaagagagtgttttccacatcctaaacctaaaaagaaggaagacgtaaggactagtctcctgataatttatctaattttaatttacacgaaagatttattttca

SEQ ID NO: 20477 - DNA, 1409 bp, Arabidopsis thaliana landsberg
atcagacaagaaaccatctaaagtcccaacattttcgctacgaaagctaaaaggagatgccaagaacatggcatcgatcaatttcaatctatctcgattaacccgcttaaggaacaacacagaatgacacctacgattctaatgaaatgccaaagcacgaaaatttagctgacgaattcaataaaaacacacaaaattcacggaaagtactgaccgattcccaggaagtgcgacgtttgcgttctaagacaggagttgaatgaaaaaacgcggttttgagctgagaggaatagctttgtggtcggagaatcgctgctctaatggcggcgttcatctctgtgagatcggaggagaaaagtttgtgtctttttcgccgttttgcaaaggaagataccaaaagccgatgtgggtaacgtgactcgggcttgactcagtcgatctgacccgtaaaagagcattttaatatttaccgccggtaacaaaattttacttttcctctatttacttgtttattttctctgcctcacgaatatgttgatatcaccgcaaacagagtgaaaccacttggaaattagaatgatttataataggctagaaaggttataaattaattgtttttaatcggctaattagaatgtttaattttagttctaatgagaaacattcaatttgagtcaccctccaatacgtgtttttagtttattttattttattttataacaactatctattttattttataaaaactaaattaaaattagtaaaatctcagttcattaatcaatatatccttttaattaaatctttcacacacacatatatatatatatatatatatatgaaatttgaagataattaaaatcaaatcattaattaagggatttcaaaacaagatatgtcttattcatctagtataattttgttgagttaaatgagtaacttttaatttttcaataaattgaagctagtttagtttttatgttagtctttataagctgaattggcacattaattctcatttcaattttgttaggttgttttagtttttatcaataaaaaaaaatcaaagattaggaaagaattgcactatttggaaggctaaaaagtaaaaataatgcaaatttacttttgtaggaaaaaaaagagagtcctacttagtgtaggacatatgcctctttttagtctttacatgccctttataagagaaattaacaaggtcgtactaggatcttgaaacacattcttgttggcgagacgagagaaggaagaagaagaagaacaagacacagagagagagacaccaccttaatttgaaagtaagattcgtaacgattgttcctctttgatctctctccaagttgatttaccttttgctattttttttgttaaaacggttttcgttagtaaag

SEQ ID NO: 20478 - DNA, 1223 bp, Arabidopsis thaliana landsberg
gacgaacctggattgattccgtcggtgttcggagattttaccggggcgatgatcgtaacgcacttttacgatgatattgctgccactgtgggatattttaattaataaattaaatcgtacggtggtatggtgagtgtgcatggtattagatgagagtgtgacacaggatataactatacctactatacactgggtggatgttccacgatggagaatcaaggaacgttagatttgaaatctgaattgtatctgagaacattaactcaatcaggtacgggcgagtgtattttagcttgccaccgtggaacttttgccaccaaaacgatccttgaccgtcgattgtgccgttgttccctgtaaaataatatccaacggttcatgtttatttctctctaatttcgaattattgaaaaaagaaaaaaaggatgaaacttttaccggtgataattacgtcggagagattagtgccgaagatgagactagcgaatcttccaccggcggcgtcacgtcctcgtccgtacgaaggcaaagcctttagaattgggtattcgtttaagtcttgagcagcgagaagaattgcgtctttgtgaagaaacagagtgaaatggcttgtgaggttgaaacttccggtgagccatttcccggcgggtacaaagagctgtgctccgccttcagatgagtattggctgagatgatcaacggcgctctggaaggcctttgtgtttagcgtcttgccgtctcctacaccaccgtactctgttatggaggcactgtgggatctgcaaataattgctgtgtactcaaatgtttcaaatgactgtgatacccttcttccttgagaaatggttatgaggtttgagagggttatgatggtaactatgcaagctagtatgttcttcatggttttgtatctgaaaaaaaagaaaaggaagagagaatggttagttccttaagttagttaaagagagagatataaaaggttgtatcttttttcgtagtttggtaaataaatgggtgcatgtgaaaggttagtaattgttgtaaagctttgttttttttatgagaatgagagctaatcaattggttttggtgaacaacttttgggaaaaagaaaaagagagtttaatgtaaatgagacatagtgaacaactaacatttgaaagcaaaaatggtggggttgtttatacaattgggtgtgtttgggcttgagagagagaaagaga

SEQ ID NO: 20479 - DNA, 2494 bp, Arabidopsis thaliana landsberg
gccttgcatctcaggcttcggtcttacacgtttggtatcaggttactccaaactcatcggttcgctatccgccacaaggcaaagcttagaccaaacctacttaacctctgctacaacggtgacaagaatcacagctcccactgttgcttaccttgcacctgaggctcgggcttcttctggttgcaaattatctcagaagtgcgatgtctattcgtttggggttgtcctaatggagttgttgactggccgtttgcccaatgcttcctctaaaaacaatggcgaagaactcgtgcgtgttgtgaggaactgggtcaaggaagagaagccgttgagtgagattttagacccggagattctgaacaaaggtcacgcagataagcaagttattgcagccattcatgtcgccttgaactgcacggaaatggatccagaggttcgtccgaggatgagatcagtgtctgagagtctcggccggatcaaatcggactgagcacgttcgagggaactcagaaagtaagttagaaatgttgcaattctgttgagtgtaaaattcatgcaccattatgttttgattctctatgagtagtatctgtttggcatgttgtacggtttagggatcctgatcatcatgcctctgtcctttattgtacatttgtaatagataaaggaagatactttcttgttacttgggtttaacatttaagccttgacactctttctagaatatcaaatcaagtcgctttaacataacctacaattagatcttttaatgtagcattaacaatgatgtgtgtttcaagagaatacaaaacggtcattagatgaatactaatgttttttttttgtttcctttaatttagaaacagccaaggtagccagtgttataagttaaggcacagtcgtcagttacaagctaacaccgtctaagaaaaatacattcacaatataaatactcatttaacgaaacattgcaaaccataaaacaaaagaaaaaaagatggcttccgaaagaaaactgataatggttgtgatactatcgtcgttgctcatgaaagtagcattatctcaaaacggtgtagtgatgggtaagaatatattcaaatgggaattgtttccgaaaatatttgtatacatctcaaacgaaagtgatgtggacttgcattctagttgttattttaacggaaattcgattgatcgttaccgaggattagttttaccgtggcgtaggagattactcgttcaattctggaaaaggttttggggaggaactcgctatgtttgtcaatttagatttgggaatgaaagacaaatacgtcattttactatttataaagataacagagataatattcacaaatatgagtgcagacactgtttttggaccatcagaaggaatggaccttgtgccttaaattcacatactggaagatatgacatttgttatgcttgggataaataaaccagtaatatattgttctttatatgatgataataattaaagggtgatgaactaatactggttaattttccagttgaatgatacaacgtatttaatataatcggactgtataatttttgagtcacggccgtatcaaatcggctagttttgaggtaactcagcaagtaagttagaaattttgcaattccgttgactgtaaaattcatgcaccatcatgttttgattctatatgagtgagtagtatctttttggcatgttgttgggtttagggatcctgatcatcatgtcactctcctttgttgtacatttgttatagatgaaggaaagtactttattgtttcttgggtttaacatataagccttgaccctctttctagaataacaaatcaagtcgctttaagcctttaacctacaattagattttttaatggtagcattaacaataatgtgtgtttcaatagaatgcaaaacggttattagatcataaacccccaagctagcaagtcaatgttttaagttaacgcacggtacgttacaacttaacatggtctaaacaaattcattaacaagcctataaatatatgaatagaaaacgaacctcaacgaaacattgcaaaccataacataaagaagagaaaagatggcttcccatagaaaactgataatgcttgtgatactatccttgcttatgaaagtagcattatctcaaaacggtgtagtgatgggtgagaatatattcaaatcggatttttcttttgaaaatatatgtatacatcacaaacgatatcggagatggtttggtgctaaattctagttgtcgtagtaatgggaattattaagaccaagtatttttaccggggcgtacgacggaattcgttcagtttatgaaaagtttacggggactaactcgtaacgtttgtatgtttatatttggtcataaagcacaacgtattactatctataaagatagcagagataatattgacacatatcagtgctgaaactgattttggtccatcatagtggatggagctt

SEQ ID NO: 20480 - DNA, 1341 bp, Arabidopsis thaliana landsberg
taaagcaacggttatggcagttgtggcaaagtggtcgtgaagagctattgttagacagcaaactgttattatcataggtaatatgtttcccttctttggcgtatatgatatccccaactacgcaaaagacatgtaaagtgactccgcaatctttacaagtgtagaaccaagtctttggatttgtttctctttcgcaaatatcacaccaatattttccgcttggcttttcatcaccataacatagagtgagtggatgatcatcgtacctgggaagcgttaccgttaacggtagagtggcacaacgaaaatccaaaaagtagtcgcatttcatacaacctatgacaacttctgtttcatccatgccgcagctctggcaagtcttcacgtcaccggatcgttgttggaggtagagtaaatgatgatcatgacttccatggataaatggcactgtaatcgaactgcaaaatatgtccaagcgttttcttaaatatgtagagtaactaaatccgtggaaaaaaacttgatgacaagcttcgcaagaatatgggaggaggtaactttcgaggcaaagcgtcaaaggttgtgggctcagaaaatgccgtttcttcttacgtagattagcacacgtttcatggagaatgaaactgcatttcgattctaaacacttgtagaatgtgcaagaacctatgggacaaacacatcctccacacaagctactttcttcaccaccttgaccgaggctcgtgaggttatgttcatgagcaaaatgagtgattgtgttgtcatcatttctcttgaatggttcgatatattcaaccttttcaggtactccattaagctctttcccatcccatacgtctcttcttgttgcacatagtgaatgaatagcatattggggacaaacagagcaagaataagccccacgtgaccaatcaatctcttcaaagcatactccacatcgccattctccgagtccaagaggattcttgaacgacgctcggtggtcatggcgtttggtgttactttcctggggtccatgagcgcatttttggtgaatcatgaaatcacattgatgacacacataaggaggccggtcaccttttgtcccgcaagcatctctaacgaaggagatcaatcttggcatgagattgagtgtatgctcatggaccttgagatttgaaagagcaactggtgcgggttttgtttttgcgcatacctaatgcaaattgacctcacagatatcacaatgatagatgaattttcgcagtgtcttctccacatcaatgacattttggatcagtgttagcggaaacaccttcggtaacaagcatgagagggtgt

SEQ ID NO: 20481 - DNA, 529 bp, Arabidopsis thaliana landsberg
tcgttctttattctctaacagatgttcaaaactttatatgggtttgaatcctacttagagtctactaggtaaatctagggtcagtttagttattttggctaagttgtgagtcattctaggtaaatcccattactaaatgtctcaatatcactgattaatacatatacaatattagaaagtaccttcttgggtgtgatactagaagaaaatgtacattagtaacacaatcactataagaaaatatgcgttttgctattgaaggatttctagctaatctcttgcaaatactcgcaatgtcttaattgtgatgttgtgttgtatcttaattgtgaaatgttttggattttcccgattaaatttgatgaaattttttgtgctttcttttgaggtatctatggaggaaaaagattcaccacattgagatggaatctgctatatataaatcattgaagtaaggtaatgcatcacattgacatagatgacttttgtattttagattaggtgagacttgacttgtattgataaatgt

SEQ ID NO: 20482 - DNA, 1550 bp, Arabidopsis thaliana landsberg
aaattaaatttatcattcttgctgcataagattgctctgttttttaaccagttttatttattatcttgcagattaaaagatcaaaatcttgtaaattgacatagttacctctacaatacctttaatcatcaaacagtttattttcagtttctctctcaagattttctcgcactttcttggaatacctccggcttcttttggcagaacgtggtggatttgcattaaaatatcgaatagggttagtctcttgaagataatcaaaatgattgactaatgtccactactcttttttaatggtcaagtttctatcaattatcaaaaaatatacatggtttactattttgataataatatcttaagcttatagtctgcataattaacatttctccacatctgaagattccttgctactaccaaccatcttaatcttttagtactacaaaaaaaaaggtcactgttaaacggtagcaaacgcagacgttgtgatgtaatatggtaatattgaatgtatcatatttgaagtcctccttgcattacattgacatggtcttgcttatgtagttggtatatagtattgcaaatatttctgcaatttgtaggaaaatgggaagaggtcagcgaacacgaatcaagataacatctcaagactgaggtttgtttcctattaaaggaagcctcaaagcgatggattaaaaaaacctcaaaagagaaacaaagtttaagaactaaagaaagaaataaagagaaaaaagggagaagatgaaggtgcatagtctgttcttgatggctattttcttctacctaacatatacgcagctggtcaaggcgcaacctcgcgatgattgccaaactagatgtggtaacgtcacaattgattacccttatggtatttctacaggttgttactaccccggagatgatagcttcaatatcacctgtgaggaagataaaccaaatgtcttaagcaacattgaagtgctaaactttaatcatagcggccagctacgcggtctgattcctcgatccactgtttgctacgaccagcaaacaaataatgaattcgagtccctctggtttcggttggataatttatctttctcccccaacaacaagtttactttagtaggctgtaacgcttgggcacttctaagcacttttggaatacaaaactactcaactggatgtatgtcattatgcgatactcccccgccgccaaatagtaaatgtaatggtgttggttgctgcagaacagaggtctctatcccgttggatagccatagaattgaaactcaaccatctcgcttcgaaaacatgacctccgtggagcactttaatccttgcagctacgcttttttcgttgaagatggtatgtttaacttcagttctttagaagatcttaaggatctgcgaaatgtcacgaggttccctgtgttactagattggtctattggaaaccagacatgtgagcaagttgtaggtagaaacatatgaataaaaacagcacatgttttgattctactcgtggaaagggttataactggcaagtgtta

SEQ ID NO: 20483 - DNA, 1013 bp, Arabidopsis thaliana landsberg
gggtagtgattctggagaagcggtatggaagacagcgtcacaaccttcaatagcttgctcgaaagaaccttcttccagaagatctgctttgaacagtttgagtttttcttttgcaccctctagtgcaagaagatgttctgttttcttttcatcacctatacaacaacaacacaaatgtatacagaatagttaaaaagagtttctagttagtagttaccgattataaagtctagaaaaaaaaagatagaaaggagagaagaaggaacaaacttgggtctcgaacggtggccctaacagtgtagccacggaggagcaaaagcttaacaatccaagacgcaacgtaaccggacgctccagtgacgcaaaccatttttcctccgtcagccatctttctctaattggtggggttggtttaagtttcagttatgaatttgagcagcaactactctcatcttatatacgcacacttgccctttttaggtccacgtgactaaactacgatgacacaattaaaagaaaaaatcacgtatatttacatctgttcaacgtcattatctcaagttaattgtctcattactctatataagatttattacttcatttggcatctcatactttgatatatatcactttttgtaatcttatatggttataaataaatctaattaattttgagattctgttactttttagctaaagataaaaccatatataagaacaactaatgatttataaattaagaatttaaaattacttaatgatttattttatgtaactaaattactatctaatgatttatttttatatttaataaaataaatgtatgaatcaatattttacaactatttggtactttttttataaaagattgaaatttggtacttttaaaacaaattatagagagaagtatactcatttgcaagaatttccttttctcactttcacttctttacaaattacaaaactcactagtaactgctttacaacaagtaatggaataaataaaatatcaa

SEQ ID NO: 20484 - DNA, 386 bp, Arabidopsis thaliana landsberg
cgatccaaagctcaaccgcttgaaacgcaacttcgaattgatcgcaaggaatcgcttgacagttaggataagctttaccagcggcggcttcggagtaagctccgggaacaccttgataagctacacggaggttagatccatgcatcggagctggagatagatctgaaatacttaaaggcttcttcgattgaatcgattggttgttgttgaatggaactagattcaaatctgagactccggcgccgttgttgtgaccgttgacggcggaaacgtggtaggatgatgatccattggaattggaagataaggattcagattgttcttgtgagttaactttgcttgagagaatggcgcacgagctttgccaactcgagctactggaatta

SEQ ID NO: 20485 - DNA, 423 bp, Arabidopsis thaliana landsberg
gttgtaagtgcctctaaccgtgatttattttaagtcttactagttcattataaaagctaatgagcattagtcacaaaattcattgatgttgttaggccaaagaaaaactatatgatattgaacaatcatgagatgttattcctgactatctctacagtatttgaactcaaacctcagacgtactcatgctactactacacaaagccaaatgcatcactaattaatcctattgaatatagaaagcattatatatacataggacgtacctgagaaaccaaagttttgattctttaatcctgttgtgcaccagaagttacctgagaaactcgttcagctaatcatgttgtgcaccaaaagttaccaaaatgctagagtctcccacaacccttactactacaagaattcaaacacacctaataacac

SEQ ID NO: 20486 - DNA, 1368 bp, Arabidopsis thaliana landsberg
tgatccattaacaaatcgtgtttcaaatgagtttgctgagggggtaaatgtttttatcgaattttcttgtaaccaaccttcttacaagaaacaaatactattttatgtccttgtgcgcgttgtaaaaacggaaagcagcgtgaagcaaaaatggttatgaaacatcttctacgagtggggtttaagggaaattactatgtttggttgaaccatggagaaacattttatgatgttggagaatcatcaggaacaagtaattttacaggtgaagaagcaacatggtcatcaaattatcaacttttcaagttcctgaaaatacgtacgagtattttccatatgggtatgttgatatcgaacaagagatgggggctccacaagaagaagagaatttgatggaaacaacaaatgaagagccatatcatgatagcgttttcgaagcttttgaagccgccaaggaacctctttatgatggctgtccagaaggcatttctcatttatatctgtcttcccgtatgttgaaagcaaaatctgattacaatatggtggaagcttgtgtagatgagctagcacagactttcaacgccgttcttcccacaccaaataaagctcctgcatcttactacgagacgaagatgttgacatggagattgatgtttgtgaggatattgcatgcatttttggaaaggagaagatcgagagttgttgcggtgtcggttttgtgataaagatagataccatccacacaatggaaaaggaaaaaaatgagctaagcaaagaatgttttacatgccgattaaagatcgattgaagcggctataccagttcgagactaccgcaaaggctatgcgatagcatgctgaacatatgtctcccgaaggagaaatgcaccacccgtccgacagagcaacatggaaacatttcaatgaggtatatccgaatttccttctgaaagtcgcaatatttatttaggcttatcaacagatggatttaatcatgttggtatgaatggtgaggcacactcgatttggcctgtgatagtaactccttataatttatcccccaacatgtgcatgaaaagagaatttttctttctatcagtccttgttcctggaccaaagcatcccaaaaaaagtttagatatttatcttcagccactgatcgaggagttgcagagtctgtggattgacgtggcagaaacgtatgacatatcaaagaaagaaaaattcacgatgtgagctgctttgatgtggacaatatgtgacttcccggcgtatggcatgttgtctggttggatgacgcatggtcgtttatcgtgtccatattgtctagataatactaaataattttgttaacaaatggaagaagcat

SEQ ID NO: 20487 - DNA, 649 bp, Arabidopsis thaliana landsberg
tagctaaaaattagtactcaccaaaaaagactaaaaacaaatttttatttgctaaacaaaaaatgttatggatgggaaggtatttaaattacattttttaaaaattttactagacccaaataaactgaacccaaccgaacccaaccgaatctaaagttgaaccgaaatgctcacccatatcttaacgcaccatgcactcacaactgaaccacatttggttctttttagagtaatattaggaagtagccaaatttgacatcataataaagaaactaactatgtgtcggataattttggtaaatgactttttttgtggtgtggtagaggtgagaaaaagactcatgttgaataattttctatatagaagaaaatttagaaatttccaacaaaattcagcaacaaacaaacaaattaaattgatttaaacttcaaaaataaatagattaggcaaaacccaaataaatctctaaactcatacaacgaaccaacaaaatttcaaatccaaaatctcaaaatctcaaacttttattaaatttggaaattgtttaagcgttctttatattcttatcaaataggtttaattattttgcttgggttccatgtactatccttagtgatagatttattaatatggtgttggataaaaaat

SEQ ID NO: 20488 - DNA, 1362 bp, Arabidopsis thaliana landsberg
ggagagaattcagtagagcgggaagatcgcgcatcagtccggccgattctcggcaggtgcagttaagacccgccggtcctccgccgagccgcgtccccgcctcagccgatccctacccggaccgagtcttgtgtaggatgcacatgacccggatactacccagccctctagttgatcctttcaaggatccgactactaactcacatcctagaacccttagactcaaagtgtaggatcccttaccttccttctcaaggttaggtcgatcccgaccctccttctttattgccggccacagcccggctaccgaatcataagactatttattctcccgagagagagagagttttaatggtgagtttcttgtgttttcggtgtgttgtggtgagtggaatggtcctgggcgccctcccttatatagggggcgaatggatgcttcccgaatcaacacatccgttccttgcacctttccgaagagttgcacctttccgaagagttgcgcccttccgaagagttgcacctttccgaagagttgtatctcttcgcccataaccgctcagctagtccgtcactcgtccagttacctcgagctcgtccgtcactcgtccagctacctcgagctcgtccgtcactcgtccagctacctcgagctcaatcgtcactcgtccagctgcccgagctggactgtcactcgacctgagtaaccgtcactccttccggctgagcttgagctttgggcgagctgacccaagtgatttctttacgatcctagcttagcctgcatgatttcccctttgtccgagcttatggccagctccttctcacttgtccgagactccaccttcttctctcggaccaagtcctagtcaacgatcctattgaggatcgcgggcgttataagtctcccccccttgaattggattcgtcctcgaatccgcatcaagttgatctttacccatctccttgaaccactccggaaaattggccttcatcttattctcggtttcccaaatgtattcttcacggcctccacaattccacaagacttttaacaaatcccttgattttccccgagtccctttcgtcatttggtccatgatccgtaccggccatgcttccaccgtcatgttctcctttaacccgggaggtacatcttccacgctttcttcttgatcacttagacacttccgtaattgtgacacatggaagacgttgtgaaacgcatttagttttggaggaaggtcaagtttgtatgcaccgcccctactcgttcgatcaccttgtacgggccaacataccttgggcttaactttttccttgaggtgaatcgccctgcccctttgtaggtcatcgcctttaagt

SEQ ID NO: 20489 - DNA, 682 bp, Arabidopsis thaliana landsberg
tgttcttgatcaaaaccctaactttgtctcaaagcaattttattattctttgcaatcgagcccttgattaatcttttagcaaaggagtttattgaatttattttccctttaaacaatttcattgtgtgatttcttgaatcaatacctacaagcatttctaagtatatagactaagactttgatgctcttgtcgattaaggatgaaggatgtgaaggtttatgtgaaaaagaagcttgtacgtacgatccaaaaatccatttcatggtctttccctgaaacaattgatgaataaggcgaaagtaacactaaattaggttgtcattgtcaggacatggaaaatcacaaacttctatgcagctgcaagatcgggaacaaggaaaaaaaaccgtatattgtagaataaagtttttattatgtaaagattgtaaatcgctgccatcatttttggtaaatcttcaaagatccaacccaaaaaaaaatagcaagacggtgaagaaagaacaattggactaaacgatactccctttattcatataagtttgatgttttgcaaagtgtgatattttgaaataatatcattattacttttatttatgaccaattgaaagagagagaaagtgagattaatattaataaactagctataaacaaataaataaatagaaaagttatttatttttt

SEQ ID NO: 20490 - DNA, 663 bp, Arabidopsis thaliana landsberg
ctcgtcgacgagacccatctcaaccatcttatcaactcgctccgagacaaacgagtgtaaaaccggtctagagacgtcgacccacaagaagcaacaattataccttaaccggaagtcaacgcaatcgttgaccagagcctcgatgtaagaattggaaccaccggctatgatcgggacacggtctctctggacgattgactcgacggccctgattgcttcacgctgaaaatcctccgccgtgaaatcttcgcaagtgtcgtggacggtgccgagaaggtggtgaggaacgccaaggctttcctcaggagtgactttgttagtcacaatgtctagacctttatagacctggatcttgtcggagtttacaatctccgccggaaaacgagtggctaggtcaatggctagacgagatttgccggttccggtggctcccatgacgaaaacaaccttgtcttttcgccggaaaaacggaacgtccaccatgtttccttggaagttcaacgacaatggttgaatcacttgtcttagagccgtcatgcatggcttcattcttataaaaactcctttaacttcccctgctggattaattatgtaattaataattttaagacagaactaattagaagcataattacatgcaatagattcggttgatgtcaaagt

SEQ ID NO: 20491 - DNA, 796 bp, Arabidopsis thaliana landsberg
ccagttggctatagttttcttgttgggcagctcagctgaaaagaagaagttgcatttggttgtgtgggacagagtttgtttgccaaagagtgagggtggtcttggtattcgaacgtcgaagtgcatgaataaagctctggtttcgaaagtaggctggagacttattaatgatcgatatagtctttgggctaggatcttacgcaacaagtatagggtgggtgagttgaatgatcgcacatgggtggagaagaaacggccttgttcgtcaacttggcgaagtgttgttgcagggcttcgagaagtggtttcacggggcagtcggtgggtcgttggaaatgggcgtgatattctgttttggtctgataactggttatcgcatgaggccttaataaacagagcagttattgagattccaaactcagagaaggagttgagagttaaagacttatgggctaatggactagggtggaagctggataaaattgagccatatatctcatatcacactcagctggagttagcggctgtcgtattggattatgtgaatggtgcgagagataggctgtcttggggttattctgcagatggtgttttcacggttaaatcgtcctataggttgctgactgaggatcatgatccaagaccgaatatacatgctttctttgatcgtctgtggcgggtggtggctctggagagggttaaaacatttctctggttagttggtaagcaggtcattatgacgaatgtggaaaggaacacaaagaacatttacgatacaagtgtctgaacaaaccga

SEQ ID NO: 20492 - DNA, 1773 bp, Arabidopsis thaliana landsberg
ttagagttgaagaattccttcttgcgtcgaatgcgtgtactccttctaagaggtggtggaggtggaagaacttgtgtaggttcttcatcttcacttgagtcatcttggatttcttgaacatgttcagagtgttcttgtgtgtttggaggatcttcttgcacgtgtgtaagattctcttgatgttgtagagacccctcctcattctctcgattcaagtcttcttgatcttgtgtcatctccggttgatgttgagttgtcgaagttgagtcattgcccaaatgatccaatagaaacttgagagttgcaacacgatcggaggtggaatgagtaagatcttttaggttctcccaatccttcttgttgttgtagtcttggttttcaagaaacttgacatctcgggatataaatgtgcggttcttggttggatcaaagcatttatatcctttttgagtagttgagtagccaagaaacatacacttagtgctcttcgcatctagcttgcttctttgttctccgggtatcaaaacaaaacatacacaaccaaacactcgtaagtgatcaatgaacggtttagtattgttaagtacctcgaagggagataagtcacttaagactttagttggtgttcgattgataaggtagcacgcggttaagaccgcatcaccccaaaatctctttggaacacttgtatgaaacatcattgaccgcgccacctccatgagatgtcggttctttctctccgccactccattttgttgaggtgtgtaagaacaactcgtttgatgaatgatgccgtgttttgcaaggtactctttgaatttgtgacttgtatactctccaccattgtcggatgtaagtaccttaattttagcattgaagtaattagtgacatagttttggaaatttataaaggcatccatcacacaatctttagatggtaacaatgtgatccatgtatatttcgatttctcatcaataaaagtcacaaagtacttcttattatccctagacatgcaaggagaagtccaaacatccgagtgaaccaagtcaaaacaattctcataaatagtcaaagactttggaaagatagatttgcaatgtttaccaagaatacaagactcacaagtagagttatcaaaagaaacatttggcaacattcattcaaatgcacgagcatgagggtggcctaatctagcatgccacacaacattaagaatactagctaaacatgagttaagcgaaactgaagtaaaatcactcaatggggttttctcaaacacattaagatctcctttagcatctcctttccgagtacccttccggtcttaatatcctgaaaatgtacactattaggaccaaatattgtatagcaattcaaatcattagtagctctcttaaccgataaaagatttgaagtaaagctaggcatatatagagctttagatttcttatcaaataagtttaactctcctattccttttaccggtactttatctccatttgctataactgcattgcctaacgccggttttatattatcgattagactaggattgttgatcatatggtgagatgcgcccgaatctataacaagagttttacttggttcggaagtaaagaaagatgtaccgcattcctttagcattttatttggttcataggtcaagaaagaggtaccggattctcttagagaggcgatggatcttatgagagcctccaaatctgacttcctcaccacttcttcttggtcacttgcaacttcttgagatatgt

SEQ ID NO: 20493 - DNA, 1013 bp, Arabidopsis thaliana landsberg
ataagagcgtaaaaaacaaaaaaaaatcgcaatgttttttttttatatatatccaagatagaatatataacttttttgattttagtaaacaaaaattgtaaaataaaaatttaatgtttttaatatagaaacgacccctgttttaattggagtctaggtctaaaaaatctattctattatgtcgatagaaaaatgttcgggttgaaatattacttttgtttgttaagttttacgagtaggtttgtcatcataaaaaacaaagtctacgctgtcgatgagatgcaatcatgcaaggtcgtcttaaaataatcgtttgtttgtggaagacatacttttggtcgtctttgaataattatttaacaattagtttatattttcacaaatttaatatttaatcttgcaaccagcagcctcatatataataatataaatatacatttttgaaaagtgaccaaaacttgtatatatgaaaaacacaagtccatcgctaaacttaaggaacacatgcatgaggtgttgatgcagattactgaataggaaaaacaatagaccttcatacccagctgaagattgatattagttcaagatgatcataaagttgggagcgaaaggaatcaagttagatgaacgtcgtctgtgggatgatggttctgaccatgatgacgtaacaaagatatacgtaaaagggggtccccaaggcataggaatccttttatttcaactatgtgaagagtggaattccaaaagatggatcaatccatggtttctttaactatggtttcacacaaacggtatgtctacgcggccaaaatcacatagaaattttaatattcgcaaagtacccaaaagaaaacttttagtttttgctatttttatttgcttttaatttacttttaaaatagggtaaatcattcttagaggtaagaaaatgtatggttaacattcatacgaattttaaatcactctggtgaattggtcaggggctaggtccttttcaactccggattgaacaa

SEQ ID NO: 20494 - DNA, 292 bp, Arabidopsis thaliana landsberg
cggttaacttctacaagttaccggtggtgtggccactgttgtgccagaaattttcatcaaagtacatgatcggtatgtgtggtgcaacatcttgttatatatcgaatttttgaataacttttttttttttgataaagcttataattgaattggtgtacgtacgagttacaggaagtgttttgagcaatccgtatgataccgggaaagacatagcaaagcggatgttccagactaacgcgatgaagaaattgagtctttcgacgaggctcggaatccctctgctttacgctgt

SEQ ID NO: 20495 - DNA, 605 bp, Arabidopsis thaliana landsberg
  unsure (1)..(605): unsure at all n locations
tgttgtaggagaccctgacgtagacgatgatgacgtcggtggtagctcgagccacagcacggagctgtcggaggagcagaagcctgagggatggatcgctagacccatcactcgcgacgccgctcgtgggtgtcacttccacgacgatctcgacaccttgctgtgttgggcattcgaccgacacacttggtccatcgagtannnnnnnnnnnnnnnnnnnnnnnnnnnnnnnnnnnnnnnnnnnnnnnnnnnnnnnnnnnnnnnnnnnnnnnnnnnnnnnnnnnntctctggggtgcagaggccttctcagagcactattctattactgagatggatattgccgaggcagccatgcaagatgcagcatgacgtgcactttctcagtattgctcgttgttcagcggggtagctgacggcctcgacctgaagtactacccttgccgtttgattggcagtgctagaggtgtgattgtccacctattggtgagggcaatcccaggctaaatagtatggtcaacctggccgttgtgctcacaccgagctggaccacgcccttgacgagttgggcaaggttcgggcggaggctgcagaattgtgtgttgag

SEQ ID NO: 20496 - DNA, 639 bp, Arabidopsis thaliana landsberg
  unsure (1)..(639): unsure at all n locations
gcatgataaaacattattttacttaaaacagaattttggagaaacataattgttaagttatatataagtagtatacactaaagtcaacaagagcctatagctcagtggtagagcaattgactgcagatcaataggtcaccggttcgaatccggttgggctcttaatttttttttttaaagcccagaaaaaactgggtttcgtagtaaatgggaacgtacatagaagagagattagggttgtgctatatattctccgttaaaaaaaccctagttttaaaaccttctgaaccctagccagaatacgtaagtaactttggtgagtttttgtctgcgtgagaattttaacgtttgttgtaatctagttgaaattgaaatcggcaggtaacaaaaagtctgaatttatgattcttttatgacacaacacacaagtcatgaaacttatgaggcaattcttatatttatgtgtgtagaggcgataatggtgagggctagcgtcttaaacgattgtctcaagagcatgagtaatgcagagaaacaagggaaacgccaagtcatgataagaccatcttccaaagtgatcattaagtttctcactgtgatgcanaagcatggtacacttggtttactcaatgagcttct

SEQ ID NO: 20497 - DNA, 937 bp, Arabidopsis thaliana landsberg
  unsure (1)..(937): unsure at all n locations
tcggtatccaaaagactcagagtccaacgagcgccaacctggctgcaggggatgaggctccaaggtcatcctcaccctaccgcggggcacccggtgcttctcgaattgctgcaccgcgtactgagggggtgtcgtgtatctggcnnnnnnnnnnnnnnnnnnnnnnnnnnnnnnnnngccctctcgtgcgagcccgtcagtgtgggacagtgcatttccgtcctctgaggatccatgggaagtcatctgtgtacggttaagcgtaagtaaaagaaaaagaactatataaagaacaagaaaaataagactcagcctttctctagttaaataaaatggtactggggtacttagttggtcatcattttgtatttaagtccttacttaattttccatttatttaatttaagaatgcatgcatgctcgtcctgaacgacctcacatcaatgtaaagggattagggaaggaccccatccctcatagtagcctatagggctcactcaaatagccacctagctacccctctagtatcctaaggcttcacgctatatgatcatccctatcgccttaccgatctatactacatgggattctaccaagtataactttttgaaaaggttggaaattatggtttattgattcctctatggtgatacaagctccgataccagctgtagcggaaccgcctgaattattccaacttaagtgcctaagtcccaccttgaaggctagacgacacttaaataggaaaaaacgttagtccctcggatatagtccgatgaggccactaataggatcaagtaccacgtactcactcgaagatgaagcatagagcaaatacaataaagcataaaaccatacattaaggagtatttaatctattacaacatcatcagagtttatcaaaagtagtgatcattgatcagaatgcagcggaata

SEQ ID NO: 20498 - DNA, 807 bp, Arabidopsis thaliana landsberg
tgttctagttataactaagtgattgttacaactaatttacatgttgaattgtaggcactgttgaagataatgactacaccagttatgaaaatgctagaacaacaactagtagttcaggggttgagagttcaagaacaagagactcaaacgtgttttctaaagtcttttcaagaaatatattagcaattgtgtttacacttcatatataatttaatgtagtgttaattctatattcaaaattagtactcaatataacccatgcatcgggtggacaactttcttggtaaggtatatttgcgagaacctaccattgagcgagcgaactcgtaaagagtcataatttattgttttaccatgttataaaaatcaaggatagtattaatcaacctaggcatgggcgtttgggtatacggatcgggttcagatcgggttttttgggttctggtttttcagatttataaaaatttcttaaattttgtaaatctttatgcagacccatatatatatattgttctaccatccacaaatacaccaattttttttgttttactttcacttttaaatcgatcaaaaatcaatttactaaatgtaattggaaatatatcaaatcaattgtgtaacccaaaacattagcagattagttacgaaacttctaccgatgatttcggtagcagtttttcttgcttaactactaactatgaaagctttgtacacatgatacaaaaacattatgaaagtgggttttgtaagctcatagtttgaacagtacgacattttgggttgcctataaacaaaaaaagaaaaact

SEQ ID NO: 20499 - DNA, 1020 bp, Arabidopsis thaliana landsberg
ggtctttgtttatttgggattgatctctaagtctttatcattttcatcatcctccggtcaacaacgggatggggtagtattccgcaattggagcataaattccaaagtttctcgttataatacttccaaaattggacagagtctttggaagcgcaacggtttgtcaatgttctataggagacggattcgattattgtatcatggggaacccactttgaaaaaatgcgtcagtaaccggctgagtgatgctcattggattcaattgaagagacacgggcagagaacgaatagatatgatcgctaagaaaattgcctctctttcattagagattgaagcacatttcagaaattgatagtcataaatgtatatgggtgacatttttctcttttatattgattcaatttttcactaaaataaaaatttaatcatatactcaaactatagtaaaatactaatatttttttgtttaagaaactctttggatttttctttgatggcgatgctcttaaacattcttaaaaagaaattctagaaaagaaaagaaaaaactgtttgttaagtatcattataatttattaatacatttactatatctttatgtggatataaattatatactccctctgtttctatataaatgtagtttaaagatttttatttttttccaaaataaatgttgctttcagttttctatgcaaataataaatatatttaatactttttaaccaattatattaatcatatatttttttatttgttgaatttggttataataaataatattttatataaaagaagcacactaaatgagaattttatgattttttaatatgagtgtaaaaaatcttaaactacacctaatatgaaacagagggagtactagatgattgcacgtgctatatgtgctgactaaacataaaattggaaatattttggataaattctaaaaaaaatcattaccataaattggtttccttttttgaaattaagtctaattttcacccaattttttctttaaa

SEQ ID NO: 20500 - DNA, 801 bp, Arabidopsis thaliana landsberg
cgctccatgcctccaatcttatttcttcttacccttttttccaaaatccagaaaccccagagaaagcaaaaccgcgagctctcatggcttccggcggcaaagattccgatcgtaccttagggtatatgactcggaaagatacagaagtcaagcttccaagacctactcgtgtcaagaacaaaactccggcgccgattcaaataactgccgaacagatattaagagaagctcgagagagacaagaagctgagatccgtcctcccaagcaaaaaatcactgattccactgagctttccgactacagactccgccggagaaaggaatttgaagaccagatccgtcgcgcgagatggaacattcaagtttgggtcaaatacgctcaatgggaagagtcacagaaagattacgctcgtgctcgaagtgtttgggaacgagccatagaaggagattacaggaaccatacgctttggctcaaatacgcagagtttgagatgaagaacaagtttgtgaacagtgcgagaaacgtttgggatcgagctgtaacgcttcttcctcgtgtagaccagctttggtacaagtatattcatatggaggagatacttgggaatatcgccggagctagacagatttttgaacggtggatggattggtcaccggatcaacaaggttggctctcgtttattaaattcgaattaaggtataatgaaagcgcacgtgatagaacgatatacgagagatttgttctttgtcatcccaaggtttctgcttatattagatatgctaagtttgagatgaaaggtg

SEQ ID NO: 20501 - DNA, 350 bp, Arabidopsis thaliana landsberg
gttggatacataaagcaaattaaacataagcataagccaaaggtagttaggaagagtgagaaagcattaaacataaaggatggatccataagaactcggagatagaagctacaacgcaacatatcacaagcgagagcatggtgtgtcgacgacacttccgcgaaagattcggggagcttaacaatagtcattttcaaaagagtttgtgactttgaagaaagttcttcagtttcaatggttttcgacaaccacttggagaaaacaaaaggccatgagacggtttttcccactaaagaggatggaagagctgatattcctctcaaggaaatacaacttttgcaccaaagacc

SEQ ID NO: 20502 - DNA, 939 bp, Arabidopsis thaliana landsberg
ttgcacggagaggctggtaagggttttccgtgggttcattgatgctaagattgcggaaaaatcatcgcagaataaccctaaagatgtttcaaaaaacgatttcgttgacaaccttctcgattacaaaggagatgaatcagaactctccattagcgatattgaacaccttctcttggtaagtctgaccttactgcagataatcatgatttataagataatggaataatcaattttgtggatgaaaatctttaaatttattagtattccaacaaatgttagatgagtgaaaacatgtttcgatcatagaaagacatttttaaaactttaatatcacatcatttttatacaacaggatcatgttgtactcgaatgttatgagttgaaatcgcatgaatatttatatacggaaccgaaatgtcgagctgctcactgacatgtgatttatatgtgtcaggatatgtttacagcaggcacggatacaagctctagtaccctggagtgggcaatgacagagttacttaaaaaccctaaaacgatggcgaaagctcaggccgagatcgattgtgtgataggtcaaaacggtatcgttgaagagtcagatatctccaaactgccgtatttacaagcagtcgtgaaggaaactttccggttacatacgcctgttccgcttcttatcccgcgaaaagccgaatccgatgcggagattcttggtttcatggtgcttaaagatactcaggttctagtgaacgtctgggccataggacgagacccgagcgtgtgggataatccgtcccagtttgagccagagaggtttttggggaaagatatggacgtgagaggtagagattatgagcttacaccattcggagccggacgtagaatttgcccgggaatgcctttggctatgaaaacagtgtctcttatgcttgcttctcttct

SEQ ID NO: 20503 - DNA, 1025 bp, Arabidopsis thaliana landsberg
tatttttttcaaaatcaccgtattttttggaatgatgttaatctaagcaatcttttgacacaatgttgaatatttattactttaaaatataatgagctattcaatagtaacaattaattacgtaagtatcaagttactttattccattacaacaaaatcatacctcattcttaaaacttcatagcaaataggattgaataaattatagcattaaaacattgtatcctaaaattcaaaaacattaagtttagtccaatgttgatccctaatcatttttaaatacactattaaactgttgaaagatcgagcacacatttaaaagataaataattattaatcgaccaatgtaacgtatctcgtcaacttaacacaaacaaactattaattaatcaatattaaaagttcagaccaagtacataagttcaaataatctaaaattataattcaagggggagatatatacatgatagtttttataataataaaaaaaagaaaaataatgcagtaagccatccctccaaaaattaggacatgttataaccttagaagtgttatccttgttaacaatcgttacgttagttgaatcaaaagatatctattccacttttcataggcgaaaaacacaaacgcgagacaatgaagcacatgaattaaatacactacgaaattttgttgccatgcgtctcaaaaccaaacagtcgagtattttcccgcttgcattgtctagaggaaacaaataagaataattttagatatacaatgaacaatctgtacacatcataaattatcctgtaattgtttgaaagagagaaatgattataatttactgaccatgaaccacgaatatgaaatgttagacgaagaccatcaaaattaagcgggttcatctcgacattcatcaatattccaacatcaatcagttctccaatcatgtttatttcaaaaaagaataattttgaattttcaaataacatacactatagataaactaatcaccaaaattaacttaccaagcaagaccatgt

SEQ ID NO: 20504 - DNA, 585 bp, Arabidopsis thaliana landsberg
tcgactctagaggatccccacgtggaagtagccaagttttgtacttggccgaaccataggataaaacactgtgtctcttgtgattgtctttctgtgtgattattgtgattcgcaagagctcgctccttagccacttggttttatcatactaacacttaaccaagttttgtggctattaatatttgatttttttacaggatcacctattcacccctcctctagatgctctcactatgtgtttttttttgtgcacgagcaactaactagttgatattcaaacagctccacaaagtgaagtcctcctccctggcataataaggtgggtggtgagttaatggagctaaaaataacatcttttttcctaaccactatttgcctaattaaagaggagttttgtggtccatttacacaaacacaacgttttatatgctatgtttgcggcacactaattttgtttagtgggccgttggaacgcaagccgtgccaaaaccaaaacacaggtcggtgtgtgcggtgaattaccacgtgtagtgccggccgcgggctcgcggttgtccaaccactttgctcgtaaccaaataaaca

SEQ ID NO: 20505 - DNA, 718 bp, Arabidopsis thaliana landsberg
ataagtaatataagctacactagattataatactggtgaggaaaaatatagactgtttgttttacgcctatgtggaccagttgaaggtatatctacatcgttagtttgcaagatattaagagaactttttccaatgccaagttgataaatatctaaccatacttcaatgcattctcacatatgtgggagactagaaaagttcaaaagggaagaagctaactaaattacctaattccaagagattcaccaaaacacagataaactagtagttaggtcatcgttaatacctggtggtggtgtattatgcgaatcataagcatcaggccaatagcatcaaaacagtttgaaagaacgggattgaagtgctcgtcgatgacagaaaatggacctgtatcatttaaattttagaatttatccaaaaaactgctacaatgatcatatccattgtaaagtacaagaggttcagctttctatccggaagaagagaagataatttcttacacgctgctcaacaccaaatcaaatttggtataccaatattacaggaaatacagatgttcttctacacagctaacaaaatccacaaagtttggtatagcaaaaggaagggagacagattagaaattacccgcaaaaatttcatagaatatggactcttcaccaaagaaatcatcacataacatatacctgttaaaatgaaaacaaatgacgttaacct

SEQ ID NO: 20506 - DNA, 551 bp, Arabidopsis thaliana landsberg
  unsure (1)..(551): unsure at all n locations
atccatctattaataaaaaattattgaaaagcacccattttaatgatatatagtacatacagaactttatgtatataaatcatcagtttcgtaacttattttagaacttgtttaaaaatatcgatatggaaatgaaacaacatggaacttatgatatagattaggtttttttgaatgtttagtttgtaaatttcagaattgaagcgtttggttatgtttttatagcttatgtcgatcaaattaaagtatcagcgtctaagaaaacatataaatagaccaaactttaaaatttcgaaacgcaaaaatcgagagttagtaatacgtaggtaattggttgcaaagtgcgactgttttcttttttcgtcgcatataagttgcaaagaacgactgttttgtgacgttttggaaaacttcagaagacaaacttttaaaatacacattagtttgatccaatctattgttataaattactaaaannnnnnnnnnnnnnnnnnnnnnnnnncatacaatactttaggtattataaattatcggtttcgtaacttatttta

SEQ ID NO: 20507 - DNA, 782 bp, Arabidopsis thaliana landsberg
atttacttgcgtaaatacagagcaaaccaaagaaattttagtaaatctaatgacaacatttatgttttctaaattattgtataaattacgaattgataaaatattttattatcatattgaagaaagcttttaaaatttcagattcacaaattttacaaattacagttttacaacaacaaaaagaaatgaagtcaatatgataatcccctactataaatatagactcgtgaataaaactcaaatcagtctctgaggttttggtgagagaaaaaaagaactcaaaacagagtgcgtttgtttctgggaatcttgaagcctctcccacttgcgaagacgaagcttgctcgttaggtagttttcttcttcttcttcttcgtttcaattcctttttcgttcatgtgaaatgtgaaatcatgtgacgtgacgattaggttaacgatcgaatgtcttgatctcgtatatgattcttttctagtttcttgatcggcacgtcttgttgttttctttctatcgagactgattctagatgttcttaaggatcttgttggatgaaatttacatgaatctgtattctagaagatgaactttgcatgaatcacgacgaactgatttagttgttgctgtagattaagtttctcgagatagattcgagatacacgaagggtttcaatgaataatctgatctgtttcgatgaacaataatctttatctttgacttatggattaggctaatttgacaccatggttggaaaaagcaaatcaccagagttcgatttcaaaga

SEQ ID NO: 20508 - DNA, 1243 bp, Arabidopsis thaliana landsberg
  unsure (1)..(1243): unsure at all n locations
caagaaaccctagcaatttcctttcgagtgtatgattcaaagcaaattccacattgaatatccacttctgtaccattaacatcaacgacaggctcctttaatataccaacggttttacggattctctcttcgtccgtaaaccattcatcttcgagtttactaacacaccaatgatagtgaagaagcagaacaatcgattccacttggcttacagagagaaccgtcgaaacttgttcgatatcgtctctttgaagcttaagaatgtcttcttccttaacaacaacgtaacttttctcagatcgactaattgtgtcgtccacagggttgtagtcatcggatacgttaccaccatcgctgtacaaatcctcctctcctgattcgatatcgatgatgtcgttaccaccatcgctatacaaatcctcttctcctgattcgatatcgatgatgtcacgatctgaagaactcatgaccgtctgaaaaaaaaaaaaaacttaaacgactttgagatttaaaggaggcaaatgaagacaagtctccttggtaaactaaggctttgctcaaacaagatctcgatcgttattttatttatacttgtagaagctctcttctaatcatcgctcagatattagggttatcattaggatatccttggtgctaaaacaacataagagaggataactcaaaattatagccaataagcattttccacgtgtttccatctcggaacaccggaacgttcttcagctagtgttaagtataacaattacgaaaattaaagtttctctgggcccaacatgttttatttgtatcatatctatttcacattttcgggtgtaaaaaaattcatcaaatttggtttctaagtttttttttgaatttaagcccaaaaataaaattggggttaaaagttggggaggggaatttttttttgggggggggggtttttttttttcaaaaaattttttttaaaaaaaaaaaacccccttttttttttttttttttttatcacacaccccccggggtgttaattatttttttttaaaaaaaaaaaatttttttttggtgggggaaaaaaaattataattctttttatttaaaaaaaggggttttgttaaaaaaaaaaaaaaaaacctctttccttggggaaaaaaaaataaangggggggtttttttttttttttttttaaaaaaaaaaaaacaagggggggggggggttttttttttttggggtttttggaaattt

SEQ ID NO: 20509 - DNA, 641 bp, Arabidopsis thaliana landsberg
  unsure (1)..(641): unsure at all n locations
taactgactcccccatacttaaataacattgtccccagaattattaagctagaggaattgaaagaaatattatcaaaacttaaaggttagagaaacgtgagttgccacctgacgatcgataccagggtggtgtctatcgacactgtggtcgtttttgcatagctttgcgaattcagctcattgttgtagagctttggttagtgttttcacatggatcatccagatagactgttaaatcactaaaacacacatcaatagttccaacaaagcatagaaaaataagtgcaacaagttccaaaacaaataacaaatagtctgaaataaagcaaaaacaaagttagaaaacaaagcaagatagggaggatggctagtcctcatgctctgagccggaggtgggtgcgggagagcgacgacgatgatgagtgggagcaacacaaccgaagtgagagagtgtagctatggcgttctagacgcttttgaaactgtcgacgacatagtgctgaaagacatgtggctctatcgggataggaagaggagaaggcagctgatatgggagagttgaagaggaagagccaactcgaggacccncagcagggtcgatgaactcatcctcggtctgagtaagtgcggatcctgaagct

SEQ ID NO: 20510 - DNA, 966 bp, Arabidopsis thaliana landsberg
ttttgttccattctattctagacatgactcaacttgttgagatttcctttcattatcattctcaggtacctgaatgtattttttatacatatataactctcttctagagatatttcataattcattgcttcctcggtgccatattaatttagggggattgacacaaatagcactaaaaaactttattattccaaaaatgacaccttcttttgaaacttccaaaaatagcatataaagtttttaatcctccaaataaaaatgagagcaaacacaaatctaatattaatttgaatcaaaatcttttaaatagtgaaaatatataccctaaattggaaataaaaaaaccaaatataatacaacaaactaattttaaaatgaaaaatctcttttaaatggtgaaaatatataccctaaattgtaaataggaaacccaaatataataccataaactaatactaaaatggatcaaaacttctttaaaatagttgaaatatataccctaaattagaaatagagaacccaaatatattattttaatttttttttaaatttattttggttgaatagattttataaaaaattgtgttattattattgtccataaaacttgttttagtgttactattagaaatttctcaaataattagttgagtgctatttatgtctaaaaaactttttaatgctatttatgtacaaaaaacttaaaaatgtgctatttgtgggaatttctcattaatttatgctccttgttcttttcttttcttttttgaggatgcttatattttggaaccaagtctctcacgctttaggtgatctttagacttactagcattttattttatccttctaggacattacttttaagggaatattaagcagaaaggcacttttttgagttctaattagacaatggagcactctcatgggagtaggcacttttttgagtttttttaccataagcccttc

SEQ ID NO: 20511 - DNA, 490 bp, Arabidopsis thaliana landsberg
tctagttgttgtagactagtttctcttctttttatctcgcttggtggaattacaaatgtacaaggattctctctcaagcttcttgattcggtttaaaaacgcaaaccgataatgcccagactacaacataattactaaaccggtttcaacattcactctctctctctctgccttattactttcacagtctctcacagtgttggttcgtttagggtttggttgaattttacagagcttgcgaatcagagagcttgagaagaaatcaaatcgagaaaatgaggatatcgttggcgattgcatcaactgcgaagagatttgttcatcggagtcttgtggtgagaggtaatgctgcaactgtttctccctctttttcctttttctggagacgagctttctctggtaagactagttatgattacagagagaaactgagtagaaatgggctgagtgaattaaagttagatgacgctgttgctctgttcggtgaaat

SEQ ID NO: 20512 - DNA, 637 bp, Arabidopsis thaliana landsberg
cttttgatgaagttcgctgaaggtatattattttcaactgatccaaaagaaatggtgaactatactcaactaggtctgaatgttgcagttgttaaagttgatctggtaattaaaggcgatgcctttttgtggagaccaagtattgaaatgtcaatgatgagtgaagcacttcatgagaacatcgtctggcctattcagaagatacaatttataagttcatcgccgctacatgaatcaactaacagaccatcaccactacaagaagcagctaccagaccatcatcaacggtatgatatttcatcttctatgaatttgtttagatacagttgagtagctgcaatggtgagaacttctctaatacatatatactttcaaattttaaattgacagactctaagtaacacttcgggtaacagcaatagtgggaaacagaagtgtattttgctggatatcaataactctagccaaagagttgcagaaggcaaagtttgttcatttaaacctgcagatgttgtccaccatgtccccttaggtcagaatgctagcaaggtacgggtcgaagtttcaaagattggagatgcaaaagtgtggaaaccaaattcagaaattcattcatttgcgatgcaataggcacta

SEQ ID NO: 20513 - DNA, 820 bp, Arabidopsis thaliana landsberg
gattggtataaaggaatttggttctcgaatgccactcctaaatactcgtttctagcttggttagtaacacacaaccgtttaagcacaggagatcgaatgtgtgacttgaaatgcagggatgaacacctcgtgcattctctgtcatgaacccgtggaaactagaaaccacttgttcttcgactgccaatactctaaaatagtttggtcgagcttcacctctaaactggtagctgcaaatttctctaccgattggaacgtgattctaaggctgctcacggataacacgctagataaggttcgcttatttctactgagatattcctttcagattgtaatctactcaatttggagagaaagaaactgtagaagacatggcgataagcacactccccgatccaactcatgagacggctagacaagggcgttaagaataggatatcttccctaaaagatcaaggagatggaagatatgagaagcacatgacagtttggtttgcaacaagataaagaggcttggttctcttttattttttcagtttctgtaactttaaaccgattaaattcccgttgcatatttgatgtaaacacgttttttcgaataaattttatattttattcaaaaaaaaaaaacatatctttttttttatttgaaccagcgatttttcgcatagaaattattattacccgtaaattgattgatattaaacatgtacataagttgtataaatctattaattattattttttggatataattttatttataaatgcatgggcattatctgcataaaaaatgaaggtggttatatttaaatatttt

SEQ ID NO: 20514 - DNA, 1383 bp, Arabidopsis thaliana landsberg
tttccttttttattgaaattaatttttagtttagatgattctcaaatattattttcttacaacgattctcatataatccaatgtccctaataaaaataaaataatgatttggttggaattttttttttttttttttttttttcttttggtaatggttcgacgttctaatgtaatgtatggttatgatgtaaaacaaatcaggaaggtgagaccgaagatgacactgatgatattcttcaagatatcactccttggtttactcgagtaatattttatttttcttcatcttcattctgtttaaatttttcaaagttgaatctgataaattttcatttcatgtctcttgtcataacaggccagtgatcgaccagaacttatactatctcgggatgaaatatacgacagctacatttgcaaccgccatgtacaacgtcctacccgcaatcactttcgtccttgcctatatatttggcctcgaaagagtaaagctacggtgcattaggagcacgggtaaggtggttggaacattggctactgttggaggagccatgatcatgacacttgtcaaaggcccagttctcgatctgttttggaccaaaggagtctctgcacataacacagctgggaccgacattcatagcgccatcaaaggcgcagtattggtcacgattggttgttttagctatgcatgtttcatgattctccaagtaaggcaaacaaaaaatatataaaaaaacacttatggatcaattttgacaatgaatcaatgtttttcaggcgataacattaaggacttaccctgctgagctctctctcacagcatggatatgtcttatggggacaatagaaggaaccgccgtggcattagtgatggagaaaggaaatcccagcgcatgggccattggttgggacactaaacttcttacagccacctatagtgtaagcatacatatctcagtagactagtgatttcatggactacaccatatatgttgataacttaaaattgttggaatataaaatggatgcaggggatagtgtgctcagcattggcttactacgttggaggagtggtgatgaaaaccagaggtcctgtgtttgtgacagctttcagtcctctttgtatgatcatagaagcgattatgtcgaccatcatctttgctgagcaaatgtaccttggaaggtaagcaagacacaaacaacatctaaaacgagttttatacaccaagattgaaaggaggtaataaaaaaactttttctatggcagggttcttggtgccgtagtaatatgcccaggatcccaccttgtgatatggggcaaagaaaaagaaaacaaaaataattccacgctgcaattagatgacgaatcagcacaaccgaaga

SEQ ID NO: 20515 - DNA, 740 bp, Arabidopsis thaliana landsberg
tctgatctattttgaaactgtttaccaaaacaatatttttttttaaagtcttgattttttatttattgtaaattatgaaaactcttaatagtgattctaacacttaattatgtatgatcttgatggacacctattagaagaacaattactgttgacttttttttttaatgaattttaactagttaactttcccaaatcaactaaaagtaaagttcaatgaattatgtatgtaagaaatttttccctatgttttaactaaccgtgttgtttaaataatttgatcatttgccaaattctgctaaaaaaacatcgttaattgttgttaaattcaaatataatttttctgcagattttggtgttactatttaaatcctttaataaaaatgtagagttacttattaccataaaaaatagtcatcactgaaatgatatcaagcaaaaaaaataaaaaaaaatcctaactactttcataacaaatcctagcaaccacaacaattgacatataaacaaactaatgtcgggtgagattgctgcgttttgcaaataacacatgtcataatgaagatattatacattactttatagttttagaccttttgattaacatataaaattacttattttgtagtcatcactgaattcatcgcaaaatatattatttaaaataataaaccgacaaaaaattcctaattagtaccataacaaatcctttgttattggtaagtagtaaccataacaaa

SEQ ID NO: 20516 - DNA, 450 bp, Arabidopsis thaliana landsberg
caatccaaatggggggggggctaacaatgaagatgcgatcagaagtcactaagtcaagccaagcataacaggttttggagtgctccagcagtcctaagtgaacatgttgaaaacagaaaatcaaacaaaaacagttaaacactcgaccaacacagctctttgcagagctctgggtgaggtcgagtgacaggtcgagtaacagacaggaaataaaacagggatactcgactgcacaatctgttgccagacaactgggtggtcgagtatcagatcgaataacagtaaagaattgcagaaactaagcaacagatgacaggatgcagtaaacagtagtagcgtaaacaataaaatcaatcagataaagaattcctaaggatgggataattgagcagtttcggttccttagattacaagtgattgacatgctcaataaattaaccctagacaaca

SEQ ID NO: 20517 - DNA, 991 bp, Arabidopsis thaliana landsberg
ccaactgaggaaaaaacatcagaagttttgagtcctgcagcaaatattgagacagtaaaaaatcaaaaggtgccagcagtgactccaaaaagaaagagaatggctaatgtgctagatattctggaaacaattaaatcttcaagcacacctccgaagaaaactgttgccattcccgaagtgaaaactaatatttctgatattaaatttccagagcaagaaactggagccgaagctgggtcctcagagcccacgaagataaaatccttgggaaccaaggaagaaaaaataacagagccaacttttattgaagaaatcagtgtcattgcccccgaagcatcccccaaagtccttgattatattgttcgtcatgcttcggggaaaaaattatcagaaaaagaggagcaagaggcccagcgctacgcccaaaaactgaagtatccaaaaggggcgttaatatttaatggcagtggagaagaagactttttgtattgcctctccgacagcaaggagatttctgtctgtcgggagatgagcagaagcttcgattcccaactttagaagacggactttcggtgctgtcaaagaacgatctggctgacagcctagcttacaacagcttaaaggtgcgacaaatgaaattcttgtattttttgttgagttcaaaatttttcgtttgtgtaaacctattgacacagacatattcccgtttgcagggcctgatactcagcaagtccctcagggcacagaaagatgctgaggacgaaggatgtactatagccctgagcaaccttcgttccgaagtaattgaactgaggaacgaaggtcttgaaaaagataaaatattatactcattgataaataaaataaaggaagacgaagctgcttctaaaagtcaagctgaagctcagaagcgtgaaattgaagacttcggaaacaactggcccgagccaaggaagaacgcgtacttggggatcctctagagtcgacctgc

SEQ ID NO: 20518 - DNA, 664 bp, Arabidopsis thaliana landsberg
  unsure (1)..(664): unsure at all n locations
gaatggtgataccaatgcaaatattgcattatgagaatggtcaaaaatatcgccataggcggctttttttgtcgtgtaaagggaaaacttccatttaaggtggttctcatgaagaatggaagtaatgaagatttagacctaggataattagaagtttatcatattttgatacgttcaacccattgtataaatagggggggtcaaacaccccaaggacccatcttgaaccgaaaagaagagactacaattatagagcaaaccctagcttttatttcaagcaactttgttctttccctttgattatttgcgagctaagagaggagtgaatttgtctaaatcccttagtacaaattcattgtttgattacagaatcaacaatatccagaatggctggccaacccggtcgtggtcaaaaagaagaacggtaagtggagagtctgcgtggattacaccgacctaaacagggcttgccctaaagacagttacccactgcaacacatagatcgcctagtcgaggcaacgtctggaaatcagcttttttctttcatggatgccttttcggngtacaatcaaatcttgatgcacatggacgattgtgagaaaacggctttcatcactgatcacgggacatattgntacatagtgatgccgttggtttaaagaa

SEQ ID NO: 20519 - DNA, 189 bp, Arabidopsis thaliana landsberg
cactgctttgtttctgtccgtgtagcttgagaatttctgtgacgcactggctcgtgcaagaccttacactgtatctgcctcctttttccaattccttctagctcttggatgatttatattttcaaaaggaaatttcgagatcagttcccaacactatttatttgactgacattttttaaactttgctac

SEQ ID NO: 20520 - DNA, 1051 bp, Arabidopsis thaliana landsberg
atccttgtgacaagacttgtcacaatttggtctttagaagataaatttagttttttctttggtatcacaatgtattttgttaagaagcatccatttatttattcaggcaacacaatgaaataaataaaacccatttgataacttctctctacagttctctaacctttgtgcctaaaaacctcatatccattagtccattactacttttgtaaactatccattttctacttccctgttttgtatattggatatcacattctgttttgaatcaaactgtggaagcatatagtaaattagtggtatgattatgatgaataagcttctttcgctttatacaagggcatttttattctacacgaatatatcatttttaacttaacaacaccaactgtctccttaattgctcatgtttggatctgcatgacttaacaagttaacatggtaccataaatatagaaaaatagtaaaatatatacacaagcaatactaaaaaaataaaaacacattggtaaaaatgagatgattactcataaaatatggctccaagcaccaaaagatattggttcttcacatcgagaagttagaatcctccacctcttaatctttgataccaaacatatccatatatagtcagatattatgatttcgagtttgtagaagttagagtcagagcaagcccacttgtatctcttacaattctatgtccaacgagcaacggaaaaaaacatcacaaaagcttttgatggggctttcacatttttcctctatgcaggtcttattcttctttcagcttcattctctgcgaggaaaacgtgaaactctgatccaagcatgtcatgtacgtcaatattctccatgttgcttaagttaatagtttccatgatcacttctagagttaacgtgaagccttgattagacaaggcccgtatcgcgtttccgattctgacaatacttttttgagtctcgagtggagaaagtttgaacatcttattatccacaattataggatcttgttcttggacgtgttccccaacccaaataaagccattcc

SEQ ID NO: 20521 - DNA, 748 bp, Arabidopsis thaliana landsberg
tggataaatggccagaacacacaaaagtctcgaaacttcgcctgaaatccacataatgacgaaacttgtaaatactaaacacttgccaactattagtctatcattaatcattattatgtaaactagcgagagaaccaaaaattatgcaaacatttttctgctctccacagcgcgtgtttctagctaacacttttcttaatcaaaatttacaatgttaaataaacaaaaaaaatcgtacttgcataacatggaatataacctggttaataataataatggaactatctgcaatataatttttttttggtaaaaaaacaaaaaagattacaatcgaatttgttttaggcgcgcagacccgctatatcctcgctaaaaagcgtaacaacagaaagtggaacctcatcaaaaatatggaggtccaacggcaaagaaaacgcatggttagctaacctgtcaataaaactgttagcttcttgatatatgtgagaaatacggactatccagtcttttgataaaaagtcggataaaaacgcaccaggaacgataagggatgagtctcacctatctgcaatataattggttcgtcgttttaaattacattattttgtaacttattttagaaccttagaaattaaaaactttagaacttggcgacaaaaaaagaaataaaaatttagaccttagatcgccaatgagtctaattcatattggtgcccactcttacatttatgtatcatgggatatatct

SEQ ID NO: 20522 - DNA, 1095 bp, Arabidopsis thaliana landsberg
aaagtctttgtcgtttgtatgtataacagtatctctcatgaaaagtaatatctaagtgctaaaagactctattgcgtggttgagtatctagttttggtcgcaaatgaggagaacacaatgtcaacatatacccttattttgaagctagtttctgatattttcaagtttcaacccaattggttttcgttgtttgaactgttttaatatgacatataccgcaagagggaaataaagagcacaactaagtcattgcaatttgatgaatgaaagagattaattaaaaagaaaaattgtaattttataattactttattttggtttgtttaatttttatttttgattaagaatgtgattagctcttgtgcaaatgctaaaataactctcaaaaaagattgttcttcatttttgttgctcttcgatgccaccaaagcgtctcatatcaatggatttcattgaatcgaacctgaatactgcagacaattcaatttgagaaaacacatttttatcttcataaagtttttagttgtaattttggtgaaatttgatgaactcacaatttgatgtaaagtaggaaatttttgatgtaaagaatcttaattgattagattgatgcacaacttcgtcgagtctagttgaacggaataagtctagactcttaaagacgttgattgcaagttgagagaatgaatatgcataaaattaatatgaagtcggtagtagattcaaaatgatataataataataatactatgtagttttaaaatgatttgtttaatgtaaatttttttaatcgtaaacaaaccaaacggtttttatttgcatttgtattttattctatgtatttgaatctattgaaatggattcaaatctaggagataatgagtttttccttttctttttttataataatgaatgtgaattaaatttatattatttaaattctttttgctggaagattaatagaaaatacgcgacaacatccatatattacttcaagacacttgacatgagaacaataaacagcatcgtataagaagtggattaacatatttatggagaaacaaacaatgagagcttttgcgtatataggttaaa

SEQ ID NO: 20523 - DNA, 580 bp, Arabidopsis thaliana landsberg
acccactatcggtatctgttatcagatctattatttgatgagttttgtctttatgtgtataagaatcagcctatttagcgaaggtgaacgtattgaactcgattataatgcatgtttaagtaaaggatttcatggcttctttgataatcttagctctaggcatagtgagttttgtggaacaccaccggttattctaatattagagtttgagtttaagaatggttcgataacaacctagctatcattagatctactaaccaatagtttccggagaataccctaaacctgactgtttattatcttgtttctcaaccaatcaatctgttgtttacttactttgttttcttttattttctcataatctcttctagcttaatctcaacacttaattcactgtgtgaacaaaagaactttgtggaaatcgatccttaaatactacaactgatctcttatttaagagagtagttcttagtgtaatttgaaccatatcatgcagtaatcctaaggcggccaaaactagatgatttacatgttttgctcaaactcaataacttttatttatatagttttctaaatggcc

SEQ ID NO: 20524 - DNA, 1542 bp, Arabidopsis thaliana landsberg
  unsure (1)..(1542): unsure at all n locations
gagatgatgggccagtttattattagcacaaacaacnncaangcccgnngcggcngcatggaaagctccggccgcaaacccaccacgtagatcggtttcagaattcagaggaactcgaccaccgagagagattgacaaaacgtcaacaccatcatgaatagcttcgtcaattgctttcatgatgtcagaaaatgaacatgtcactccgtctagctcgtttatataccaacaagccttgtacattgctatgcgagcacgaggtgcaccacctctcaaggttcctctaccaaggcctttgtagcttacattaggaacaaatgaaccacccgcaatggaggcgacatgcgtgccatggccgtcaaagtctctagcggatatatagtcaggggattctgtggcgttgaattggttttcagcaagaaaaccgttgataaagtacttggctcctatcaacttcctgttgcaatttgttgatatgaagttttcaccgggttcacaacctcctttccaatggctcggtactggtccaaccccatagtcgttaaatgattcagactctggccacactcctacaataacacaaaactgcaagtcattgagacgctaaaatgaagaaatctaacacaacggaaacaaaagtaaaatttagaatgtaatgaaaaaaactattgttgtgtacctgtgtcaataacaccaatgatagtttgatcacccatgtttgtatcatttaggagattcttcgaattggcaacagaaagacctaagtaatcccaagttcgagttgtagcgagttcatagaaactatccgccatgacatgaacaacttcaggagaatctgtttccaaaagtgcattaccaatcaaaatttcagctaaacaaagtaaattactaattttaaatcattatcatcaaattactaagaaaccaaagacatggtgaaattcaagataacagagagctatgagtaccagcaagtttcttggcttgtgactcggtaagcttggcagcaaagcctgaaaatccatgtcggtaactgtacaccattgattcatgagcatccactttactgtaacacaagataaaagccattgttaacaacagcatgatacataatggtgttgaatagtttatcaagtagctaggttttaaccttccaagaagtgacgatagaatttggtgatgagattctgaaacaaactcaggatcatcatgctgcttctcacccaaatacactatatgaacctatataatcatcaacacagcaaaaccaaaacttggtcataacctattctcttttttcggtaaagaagaagatctagcttaccttgctttcatcactagctcgtgcgacgttcaaaactattatcagacttagcaccacaagaactgatgatctaaaattcctcattccaagcaaacaaagaaagtttcattaatgaaactatacgaggaggcacgaacatgtttatatatagatgtcttctccaagaatgttgacattacttggacatggtcttttcgcatgttcttctatttcagtca

SEQ ID NO: 20525 - DNA, 730 bp, Arabidopsis thaliana landsberg
gggaaaaggacaacgtatgcatgattatattaccaaaatttgataacaacatatagtccaaaaaaaagaatttgttgtatgctttgttatatatatttttttgtaatatataacagaaaaagggattactttagacaatgctaccaataataataatatgcaaaataatttcaagggacaacttcaaatgattagcggtagtggtttaatctgttacgggaattatttgcatcattaggtgttgcgctcatattcttaacatcattgtgaagaaaggtttaaaattagttaaagatgttttacacaatattcgagaaagtgttctataagtgaacgcatctccacaaaggaaataagcttttacagcttgtgtcgagagagtgggaataagaagtggggcagggttatcccttgatgtgcctactagatggaactctacttacgaaatgcttgctagatcattaaaattcagaaaagcctttgatagcatggaggcttttgataggaattataagtttttaccattagatgaggagtgggatcgtggtgaaaagatctgtgacttaagtcatttagtgtaatctctacttacatttcaggctctaagtatcccatctcgaatgtatacttcactcaaatatggaggattgaattattgctaaagaagtatgttgcttgtgatgatgaggatataaagcaaatgactatggaaaatggaaatgcatataaa

SEQ ID NO: 20526 - DNA, 371 bp, Arabidopsis thaliana landsberg
tagcttgcgaatttgtttgatgcaatggctcgtgcaagaccttacactgttctgcaatccttttcccaatgccttctagttcttggttgatttatatttccaaaaggaaatctagagatcagctcccaacattcttcatttggtagatttttttcagcctttgctactgtggagacaatttcacttggtgtggttagaacaatcttgcttccttcctcaagaaactttcccattctgaatctcagaccaaaaatcatccagagcaataagtaaaaatcttctgtttgacaaaagaatctcgaatagatgggtgacgtgtctttgtgtgagtgggtgaagggaaaattttttaagagaaaataaaaatcgac

SEQ ID NO: 20527 - DNA, 520 bp, Arabidopsis thaliana landsberg
tgcgaggaacaattgcgagggaacgaatccctcgcaaatttgcgagggaattgcaggtactttactacaccacggacgaacgttgctaatccctcgcaaatattgcgagagactgcttcctcgcaaatttgcgaggaatatacgagtactttgcaattaacaatatcaaccctcgcaaaccactcgcaaaaatctcgcaaatctttaccctaaaccctaaaatacatagaagtgatttgggatctttgatttttatttataaatgtaaatctaaatgactgtataatcatacacgttgattatatggtgatgcacaaaaacatattgtatatgtttcaatatcaacatttcataatgaagatgttaaacacttattattcatattattgaaaacacataagttcatcattgatgtatttgggaaaaatgcacatttgaattttttgagatgaaattagattctaatgtagatatttaacttcctaatgattcagaataactatccgaataattttaatta

SEQ ID NO: 20528 - DNA, 522 bp, Arabidopsis thaliana landsberg
ctaattaggaaatggatctcatactgcgggagatgtgactaacacatagttggtggatccagatgcctccatagcagccaactttgctggtttcccatatgatgtattcttaaatggagacactttctcagaggaaggctttgcttgagatgggctaggagccgaagaagcagattcattcataggttcagaaggaataggaggcgctacagttggagatatatccgacacgggactggggtttgtggctgctccaatcttaagcttatagaacatctcctaatgagcatctgttctattgatgctcaaacagagattacttgttgcaacctacatgaataccggtttactcaacaagttcactcccttttactaccttgtgggatgatgtttgtggccaagattatcttggttggaaagaaagttcacccttaataaccctcaatgaactgtaaaacaaatgggctatttgtcttagccttaagttgcagcacagttacctcagttttatcacacatctcg

SEQ ID NO: 20529 - DNA, 504 bp, Arabidopsis thaliana landsberg
ttggttctgagagcctctagttttaaaggttagtaaaaattcatgaatatgttagtcacattcctttatgatgttaaaccctgtgacctataactaattaccagaagtctttacaaatgttttaggatctaaggccttaatcagcgagcatgggtgttcaagaatcttcattgaggaatcttttctagactttgatgtgacacaatacaagtatgtgaaagtcattagataaattatttttgttaattagatactaactattcaagtcaaaatgacatgtttattttttgttacagctgttggtttgaatgtgaagatgatgggtctgttgaaggaagattgagtatgttgttgagaactaatcctggagtcagattcgtctttgcaatgattttagaagcaatttacttttctgttaaaaatcaaacttattatttctaagttgattttggttttatccgatgaattatgattgaaatgtttgtttgaattatcatacattat

SEQ ID NO: 20530 - DNA, 1386 bp, Arabidopsis thaliana landsberg
aaaacttttcttgaacttcaaagtttttgtagattatttccattatcatgtgaattatcaactttggaaactaaattttatatattaagataggaacacgaacatgtatagtgaaacaagaccacttttttaattgtaaacagtgagatgtttagttttctaattacttttaaaaagccggtctaatttgtaaatttacccaattataaactaataaaagtaagatactttacaataaacaaaaccggaaataagccaaattgaaccaaaccaaaatgtagccaatcaaatagaaaacatgagaaatctataatgagattattaattaaaaacaaaaacagaatgagagctcagtagctcacatctcaaagttaggaactaagaatatgcgcgcagacttgcaggtaaagggttcaatgttcgagcaacaggagtacacataagaggttctgctagggtcaacaccattgttccagcagcctcactcatgttcacttcctttcctttgattatccaatcaaagcactgcaccatcactccaatcgccgtttctacattgatataagctaggtttgttccaggacaacctctccttccactggcaaaaggaataaattttaatattttgtcacttatctcctcctcttgcactgagcttgaaatatctaaaaacctctctggcttaaactcctcaggatcttcccaaacataaggatctctcattacagcataagaattaacaataactatggtcttctccggtatgtagtaccctttgagttcacacctttcttggaacgttcttaagaacacagcccctggcggatgcaaccttagcccttctttgactaccgcttgcaagtaagggaggtttggtagatcggtttcttgaactaaccttgtgttccctacaaccgattctatttcttctctcaatctctcaagaatgttagggttgttaataagctccgccattgtccactctattgtttgcgccgaggtgtcagtgccggcaatgacaagatcctgtagtagcaaactgttattagagtatttccatattttctatatctaagagtggcctaggtttattccatcatttcacagcgcatatgtttattccatgacatacgaatcacacctaaaagggaagaacatttaccacgaacaaggacttgatatggtttcttgtgattttatactctgcattttcatctccataagcttccaacaacaaatccatcatgtcattagctttataatgcttccccattctctcttcgtgttcaacaagaatcttctccaacagctagtcgaacttgcgggaaacactttttatatccttttggaacaatgagatcccaagcttcttaagcggtttatcaa

SEQ ID NO: 20531 - DNA, 830 bp, Arabidopsis thaliana landsberg
accccccatgaacaactgaacaagcataactaacatatttagtagtcgtcacccaaaatctttactttttttacttgagctactttgttgtggtcaattgtcatcatctgtttccttaacttcattgtcctcagcatcatcagaatcatcagcttgttcctccacggtatcctcatcctcatcctgaaaaaatcatcatcttaacactcaaagatgtaatagaaaggataaataaaggacaagccattgactatgaaactcctacttcctcatcagcagctttatcgagataatctttcttctcctaaatgaccaaagaagacagagtaagaagaagagacagtaaacaaatcacaccatgaaacttaactaatgaagaaacaactcacatcctcagtcatagacttccacatttcccaaccgatctttgaaccctacaaatcatatatatatatatacatagcaaagtttagtaaaatctcataaacactaaacatagtagtagtcaaagcatagcaataagctcagtttaaaaagtcttacttctttcaccaatgcaccattataatctgttctaaaagatttacggaaatgattcctgcaaagtgaaagggcaacatccatcaacatcatccctaaagaagagtaagtgttaaacaatgaacaacaacattacatgaagacagcaaaatcggtaagagatgttgttgacttcttcctgaaaacaaacacacacacacaataacatgagggattcaaaatcaccatatagaaacaatacaatcaagtcataggtaaggcttaaaaaaggagctttttttttttacttg

SEQ ID NO: 20532 - DNA, 2213 bp, Arabidopsis thaliana landsberg
aggcttccataagtagccatatcaagaccctgatccatgtcccagctctgccattacaaataaccagcaagggtttagaaacatcccaatatactgaatcatacatgggtccatcagactaactcacccaatgttgatgatcaagtaggtgttgatcaaaatgcaaagaactggaaggtatgggacgaatgggcagagaaaccctgaaatagaatcatatatagaatgccagttagaaaacgctgctcaagtataaatccaagtttatggtttttgctaaaacctcaaaattttcgtcctaaccaggtaataaccaactcagcaagaaactaataactaagcagcgtttttgatgaaagtaagaccaaccaattgatggctcgctgaatcttatattcaattaaatttctcattttgtgatgtatgagtaggcaaaaaaaaaggcttgaataaggttcaggccttacctcctttgtgtccaaagttgtgcctttcttcatcctcgtcaatgtgtagcctttaaaaagttttaagtgttcaaactcataaacaaaacaccaactcttctttctacctgaaaatccaactatcaagataagatcaatgagagcagtgaaataattttggtgtggagcttacatatgttccctaagccaaatggctgacaataacgtttcacaaacaacaactcatacgagaagctcatctgtacaagaaaacagaaacatgaatgggataatggcaatcatggtttaaaaacataaaacttgcaatcatatatagtaataacctcatggatagaactggaagggtgagacatttttgacgactttgggggtctaaaatgctgaacatacttgaacctcgggacagttgtggcttactaatagcttttgaaggtaggagaagagttgaagatgacattgcagcagaagcacaatatggggttcagatgtaacatttccatgtccaagtgcgtttctgcagagagcttcaagtcatcaaaaatcaccaaccaccactaaatgtgaaatctttatagatcaaatactaaatctcaagtatctaaaattatcatcagatatcatctagaatcaatcgtatttaaaaaaagcaacaactttcatgagcatacgaaaaactaaataataacaaatataggagctagcaacatgtatactatttcattttttttttgcgtttctaaaccaatcagaaggctctatttcgtacccactcgcagaaagagcgcgttgagcgagtgagagcgattctgtgggtaaaccccctttccaattcatgcctttttgtatcgacgcatttctctccaaattctccatcgcgtgactctttttgtttttttctcttaaccagtgtaaaccgaaaccaaaatcatttttaatttaaacctaaccgaaaaatcaatttcaatttcatataagaactccactatcaaattaacaaatcatataaacgtaagttctttaagtataatatttttattaaatcgcggtacaagcctagtcagaatatactgttttattttttccaaaacataaattatactataatttcattttgtcttaacagatatttaatttcattctatgtgctatactctaatacttaacaactaatcggagcactaagaatatactaataaaaatcgcttagaaaggcaaaacaaattactatcatcagatttcttccccaatcttcttcttcatatccttgaaggagagagtatagagaatccgatccaaaaaccctaaaccccatttcccgcggattttctcccaagctgatacggagatcaaatgggagatccgttggagaggttgggttctcaggcatcaatggctactgagtctgtcatgaaggaggacttgtgtttagagatcgatcctcccttaactgaatccgttgccaccgctgaagattggcgtcgtgctctcggtaaggttgttcccgccgtcgttgtactccgcacaacggcttgtcgcgcctttgattaccgagtccgccggtgctagctatgctactggttttatcgttgataagcgacgtgggatcatccttaccaatcgccatgtggttaatccaggtgcgccttttgacttgttgagaaacgagtgtcagaagattagctgggtttcaagaacttataagagatgatgtttttgttgtggaactggagaactgatcatgggttt

SEQ ID NO: 20533 - DNA, 571 bp, Arabidopsis thaliana landsberg
cacttaatcctcaagacaacacatttcttctcttccatttgacaataagggagaagaaccagagttcttaaattgacattctaacattaaatggaaaatcaaaacccacctcagaaggcttgggaacaagctgagcgtttaatcgagatgacttgatctctttagaatcttttacttctatagtagctgttgataacaagaataaatcagaaagcattaaaggaaaactaaaagagactttctaggaacacatcagcccacatgtgaacacactcgatgtgcaaaacatatcgatagtaaaatcggtaaaaatgagcatattcaagttaagaaaacatatagagataagtgtacctgatgtttctgcagttgggacagtagacacttggacagctttcacagatccaaatgttgtcttcagactcaagtacttcactggcctttgtccaagcaatgatctttgattggatggtattcagtaaagctttccagaatctttacctcttacttaagggtcctaacctgcccggaggaatttttaaaatttttttaagggaaaccttcccttaag

SEQ ID NO: 20534 - DNA, 340 bp, Arabidopsis thaliana landsberg
  unsure (1)..(340): unsure at all n locations
aaagactttggtgctacagaggacgatggagaatanctggaaaacaatgaatcggttcggtttattgatgagattgttccaacttgtgttctactgcaaagagacgatatgtggattatgcctgtagagattgttgaatggacatgggatataaagcaaaagcatttggaaaagttagactggcccaaattgctctggttcatggtcgagaaagaactgaaagcggagcctgcgcttggggattgtttttttgctcctcatctgcagctgctgatcaaatcacagaaagaagatttgctaaaggacaaatgtaaggctgatgattaggtggatgaagttg

SEQ ID NO: 20535 - DNA, 874 bp, Arabidopsis thaliana landsberg
  unsure (1)..(874): unsure at all n locations
ctatctatgcagcaatttaccctttcaaatccgaactttaagaacagaagagactatctttatactaagtttgtattccgcggaaaccgcacaggccgagaggaataacaaatgcacaacaagtttaagcacattgccatcccgaaacccagtatccctgcaaaaagcattgcatagataaccggcacacgaagctgcaacaaaagatatttacatgagaactttttccaattgtaggtatgtgattatgtgttttaagtaattcaaagcctaaaacatacggtttagtattacttactgtagcatataatagatgaacaagcaatgccactagtgcaaactcaagagctgcgtatgtccatatgtattctctgatcgctgcaagtccggaaagtaacagttaacagttttacataattgtgttgggggaagaacaatatagattggaaatttttcttgagggagtggtattataccgaggatgacggcaaaagttgaggctaagagtgcaagggtgnnnnnnnnnnnnnnnnnnnnnaatattgcctgtgaattcaagtcacgaatctacagaatagataagattccctgttatgttgtcttcgcaatgaaaggtaagatctttgtaatgaaagatgggatatttgttaagaaataccgaaatgtatgtgtttttgaatactcggggtaagaaaaaggaagcattaccagtaaatgttcaaggaagaagaagtagcagacggtgctgatgagtacaagcactacaaactcttgcccaacactgcattaccagtcattcgattatcacttgtcagattctttaaggaactttggaaaggaaaaatggaaaaagtttttaaagcgttctgattta

SEQ ID NO: 20536 - DNA, 1177 bp, Arabidopsis thaliana landsberg
tgttaagactacaaagacccttcgatttcatcggatggttcgttgttataaattaacaaattaaattattatcacaacgtaacgtatcattcagattttcattgtaaaaaaatatacatattgcacgatatgcttatacctaattatatcacaggctttcagattttatagaatggaaaatattacatacgttagcttaagacaatggtttgttgacggaagatgcagtaagaggcgtctacgatggtagccttttccaccaactggagaaaaaaagatcatcttcttcatctcgtggcaagaaacaaaaactaccttaaatgcgtgaatcttcttatattactatgtggagatcaaatgacttgtggtttatataatttggagatcaaataaattttgtaatgaataaatttgtataatttggatatcaaatcatatttaaatcattatattgacaaaaatatgcgatcaacaacaacaacaaaaaatcattcaaacacttatgaaaaagtacacttcattttgattaaaatacatggttgtataagcccgttttatcatctaacgataatttaaattctaaaatttctaaactagagaaacaaaatgttatcattaattgatatatatatatatatatatatatatatatatatatagctaagaataaatgacataaagaggatttatgtagatagtaccgtgtaagccaagaaagcggttataatgtcaattaaatctataagagggaaaaaatcagtaagagtctcacactttgtgatcttgttgttataataaggaatgcgtctacgcatgtcaatacatgtccaagacacataaatacaaacacacacacaaaaacctctatcgactttatcttggatcgaatctttggtttatgtataagtataactaacacaacacctaacaatagatataaaaaataagtaaccaagaaaataagtaacggcttcttcgatcatttatatgtttatcctaaacttataagaaagcttgtgataatttcagtgttctcactcatctccaatctgtgatatatttctcatgtctcatcagacagtagcgctagcctctaaggctaagtctcctaaaccccaaaagtaagtgttcacgacccatttagtatgcgcacatgtatcatttgagcatggctcca

SEQ ID NO: 20537 - DNA, 832 bp, Arabidopsis thaliana landsberg
taaagagcattgctatgctattatgatccaggaaaagcctagagagatagatgtccccaaacaggtggaaactaatgttgttgttgttgagacacttgtggaggacaagattgtagaggatgatgaacctttgtctgtggagccgcctccttatgttcccaagctaccatttccaagtcgtgagagacaaattcaaaagccaaaagagtatgcccgctttccccagatcatgaaacaattgtatatcagactccctttcttacagttggttctccatgttccaagctacaggagttacttgaaagacatcttgtctaataggaggagcattgaggaaggggttaaattgatttccaaaggagaaaagtacgctcacctggtggagtctcagagacaacaggaggaagctcagctcactaatgtagtggaggtgttaacagggaaagagatggacaacacttgaggtgccatccttccagctactattcccgagaaactcgatgatccagggagttttgttttaccttgccagattggaaagtctgtgtttgagagatgtctttttgatttaggagttggagttaatttgatgcctctttctgtttcaaagcgcctaggcatcacaaattttaagctttcaaggatctctttgattctagcggatcgctctgtgggattggcagagaatgtgcatgttagagttgacaacttttacattcctagtgattttgtcgtcttggaatttgataaggaaccacatgaccctctcattcttgtaggtcattcttaaacaccgtatgagctataattgatgtgagaagaagtatgatca

SEQ ID NO: 20538 - DNA, 523 bp, Arabidopsis thaliana landsberg
  unsure (1)..(523): unsure at all n locations
tttccatagctaaaacactctctctcgttctaatgacgtttgtagattctgatatgtatgaacttttcatctctggctgccctttgcttgaggaattcttactacgtaatgatgaaattgaaattcccccggtttggaatgcgctagtttcgagtccttccatcaaacgactaaccatcgttcaccattttcccaattaccgtgaggcacacgatggttgttggttccggacaccaaatctcgtgtaccttgactattctagctatgtcccggattggtatgaggttgatttaggttcccttgtagaagctggtggttatggtgactgtgatagtgtttatgatgaggaggaatatccagatgnnnnnnnnnnnnnnnnnnnnnnnnnnnnnnnnnnnnnnnnnnnnnnnnttaaaacccttcacttgtctcctgattctctcgaggttagtttcccctacttgttattgtttcaatttgaagtgcattctagcttgcaaagtcttcttattgtgtgatattt

SEQ ID NO: 20539 - DNA, 1142 bp, Arabidopsis thaliana landsberg
gatatatccaacctattatacccttctcaaagatcttgtgacccaatactatcccatctctaaccatgaagtggcacttctcccaatttaacacaaggttagtctcctcacaacgtttcaagaccctacacaaattagaaagacaagaggcaaaagagtctccatagacggagaagtcatccattaaaacttcaaccacattttcaattagatccgagaatatagacatcatgcatctttgaaatgtagcgggagcattacacaaaccaaatggcattctcctatatgcaaatgtaccacaagggcatgtgaaagttgttttctcctggtcatctggtttaatcggggtctgaaagaatcctgagtatccatcaaggaagcaatagtatttatgatttgctaacatctccaacatctgatcgataaatggtaagggaaaatggtctttcctggtagcagcactcatctttttgtaatcgatgcacatccgatggcttgtgattgtccgagtaggaatcagctcgtctttctcattcttgactactgtaacacctcccttcttgggaactacatgaactcgactaacccaactactatctgaaatcgaatagataatccctgcttccaacagttttacaatctccttcttcaccacttttttcagattcgaattcagccttctttgatgttcaactgaagacttagactcatcctcaaggtggatcctatgcatgcatacatatgcgtgacatactcgggcatgtcagacaatagaatccccgaactttttttggctttctcatcctctggtattgacgtacttacagtactgagatgggaccatgttaaaatcgaattttcaaaccacaaatttgacattgtttggaataatgttgttgttctctacacatgagcacatggattatagcctcttctctactttggggcggattgattgattgataataggcttgctgttgtatctttgataggtatgagaaggcaatcaagatttatgaagacacaggcacgccattcactcaacaataagttgcttaagtatggagttaaaggccatcttctcactgctggcatgtgccacttatgcaaagctgatgttgttccatcactaatgcactgga

SEQ ID NO: 20540 - DNA, 595 bp, Arabidopsis thaliana landsberg
  unsure (1)..(595): unsure at all n locations
tttgcttgttgcaatgctggtgatgtttactgttgctgtggggcttctaatggcctcgtttggggaaagagagacgcgatttacttagagagctgatcgatatgaccaaaacagatggtgtcgctcttaatatgttgtacattgtggttacttcaattgaaagaaaatgtaaatgattgctgtttgatattcgtttttataagaaatgaaatgaatacagataatatattagtagtgctacaatctccaaagtttgcaaaaatttgagtttcttctattcggtaagaaactctaatatcaaaaactctaaatcgctagaagnnnnnnnnnnnnnnnnnnnnnnnnnnnnnnnnnnnnnnnnnnnnnnnnnnnnnnnnnnnnnnnnnnnnnnnnaatatatgttagttaacttttatatatcttaccataacagaaaaaaaattcaacaaagattaatcgtgcaccggtggtcggggggatatttttaagataacattcaacaaagattaatcgtattcaactttattaaattctctatctgcattcaacttttttccactattgaaatatgcattatatatactagatagaaact

SEQ ID NO: 20541 - DNA, 755 bp, Arabidopsis thaliana landsberg
  unsure (1)..(755): unsure at all n locations
taccgaataggcttttagaagctgcaatctcatcatcatcccctagtccttattttatgatcnttaactacacaaaacatagttcaactaaaaaactacggtgagaatcttgatgtagctagacactaaacacaacaatgaaagaaacatttatgagataaaaagcaatcaaacaaaaaattacatatttgccaaaaccaaaagcatataagtatttgtttaactattcttctaattgaattctaatcccaatcttcatcatttatctgccactcatcatcatcatctctcggcggcctaacgaccaaaacaaccattcctaagctctcattcactcctttctccttcaacaccaatcctctatccaacttcatcccaccatcagccacaacaaggtagtagtatccattatcagcttccaccgtcttcttttccctatcgatcacaaccattatcgcctctcctttcccgttccacggtaaaacttccctatcatcgctaaacgaaatcgccactcctcctttcctaaccgccaccacgggatcccaacccggtaaaaccacccatctactccaatctttctctgctttcactacaccaaactttcctccactttcaaactccatcggtgcttcaagaagcttctcttctccttcctctgctttacaaaccggaaaaacaacgacggaactcgctcccgcttcttcttcaaacctcaatctcactacagggacacgaatgatttttatctcctc

SEQ ID NO: 20542 - DNA, 846 bp, Arabidopsis thaliana landsberg
agactgtttagacccacatctgtataagaaccacaaataacagtgattcagagatttgcaagccacaacaagctacaaaattcatagaagaataaagctgtttttccttaaactaacccgaagataatagttccgttggtggaaccggtttgacgatttccagtaactaaatccaaatgaacaacatctttcaccaagtatccattagttgaactcccatcgccatacataataacatactgacaagtagaacctgagtgacactcagatctttggttaacgtaagagcaaaagttgtcactgcacgaaacagattttgcagtggacgaagcatccacatcataaggtgtcagctctacctgaaagataatgaaactatgaaactgaaaacataatgtaacttagagttctgtttttttttttggagggatagaattgatggtatataccagatcacttttcctaggacatctgatgcaaccagcacaattcacccataagatatcacttcctgtatcaacttgaacatggaagtctcttgatggagttccgagtccgattttagcgaagtataaactgaaattaaaaacaacaaacataaagaacaagagtcaacattttaccgtagaagacacaagaagaagaccatttcataatgagtcaagaaccaatcaaagagttgagaatctcaatagattcaaaagctttgttttttcttcagattccacatttaaaaaagacaaaaaatccgactttttgttaaaaaattcccaaaattacaggttctggtaaatggcgattcgaacccaatagactcaggcttgctatcgccgccgagaggaatat

SEQ ID NO: 20543 - DNA, 484 bp, Arabidopsis thaliana landsberg
  unsure (1)..(484): unsure at all n locations
tgaacagcagtatgattagctatcccatatttcttggatatcatgngcttcacagctttttcgacaggacagtataacacctttttcagttcatacataattttcaatcctcacccatccaaactctcccttcaaaggaatgtctctcctctctctgtctcaaatcaaacaaactttattaaacctaaaagaaacatttccaatctctaatgactcagttgatagaatctcatttagttacctagtaataatcttcacactagtaagagaatcctactcttcaccaaactacatctctctctatataacaaaccccaaaacatctcaacatacacacacaacaactacaacaatggctacttcaagaacattcattttctctaatctcttcatcttcttcctcgtaatagccacttcttatggtcaggctccagctccaggcccttcatggaccacgtacataaccgcaatcctagaaaaggct

SEQ ID NO: 20544 - DNA, 602 bp, Arabidopsis thaliana landsberg
  unsure (1)..(602): unsure at all n locations
cttggattttagatctaaaagggatacactaatttgataatttgttcttaagaaatgtagagaatttaagatctgacattttggtacttgtttctgaaaatctcattatgcttttgagcagaggattccgccaaggttcgtgaagctacaagggtctaaactctcagaggttgttacattagtgactcctgcgggatataagcgttccataaagcttaaacggatcggtgaagagatttggttccatgagggttggagtgagtttgcagaggctcattccatcgaggaaggccactttctcttgttcgaatacaagaagaattcgagtttccgtgtaataatcttcaatgcttcggcttgcgagaccaactatcctctggatgcagttcatatcatcgacagcgacgatgatataatcgaaattactggcaaagagtttgttggaactcagggtacaaggaaaaataatcaatctgttaatgggtggtgatacagagcacaaatccaagaagagaccaagagacatcgagtttgacaagattctacacggtaagaagactntgttcatacaattgtatgattaagaagattggatctgaata

SEQ ID NO: 20545 - DNA, 613 bp, Arabidopsis thaliana landsberg
gaaaaaataatatttattttgtaacctaaacaaatttaaatatgggtttatgttcattaaaaatttaaagagggtataaatgaaaatggcaattagattaaggtagaattgaaaatgggtaatgttgaaagggcattcttagcaattgttctatatttattgcaagtaattattttccactaatctttcaatacattaaaaaaaatctaattacaaaaaaatctattaaaaagtgataaattttgtaactaattaaataaataaaatatattgacgttttacatacaacaatgaatattggttgtacaagtggaattaatgactatttaaacagttgacaaaaatagagttaatgacttgttgccgttgataagcaaccattaattgttggttgatacatatttgagttgtttctcttattcaattaaatacatgtagttgacagttttgtattgaaaaagtaagaaaataaatgcattatgcaaaaaaacgggtgaaaactactctctttgtttctaattatatgtagtttaaggttttatacaatattttaggaattacataaaaactccaaaataacctcaccttccatcttttctttcaatctcttaca

SEQ ID NO: 20546 - DNA, 1753 bp, Arabidopsis thaliana landsberg
ttattacggacaccagcagtgtattgagcctgaaaaatatagtcgcatacggggatggattttccttatcaaaattccgattggtacgttttttggtttcaactttttatttgtttggttctaataggcaatgggatagctaataaattgaatactttaaatctagatgcggtgcaatttatcgtttatataggccgacttaaacggatcccttatgtttctggacaatacgatagaatggtggatgtaactatgtccccttcatcttaacgaatcataggtgagtttcttttccgattgttatgtcaaaatttatttattaatcacgttttgttttgctttaaaattttaaaggggacataaattgagatgttgcgcggtaggagatttggctgactattttatgagagtatgggtaaaccgagagtatgatcattcgtaccttcgtgattttgttttttgtgttttgacattttggcatgttgaagagtataaaggtattgacttttatatattcatagtattttctaaaaatggtagagaacataactgatttaatattttacaggaaaaccatgtctcatgaatagagttggatgctctagattttattttgatctagagttttacgaaattgaggaaatcaagaaccggaataatatatagcatttaaattcatgtattgttggatatacataatccatacgtttaatgacctcttaagttttttaaatatatagtacactcctccactgcttatgcttgggctgctacgaatacaatatgttccggttcagatgatacaagatgttcaaggaatatttaaatactttgttttaaattgttgtgttgtttgccttgattaattagtgatcaaaacaatgttcttatcattcgacttctcggtttgggtttgtaatgttaaaactaatgttctaaaataatatataactaatgtttgtattatcttataagtagtatttagtttttttttttttaacatcttcagtattttgatttatatatttggttttgttaacaaacaaaatactcctagatctaaatattgtataacatatccttttgatacgggtaaatagatctaagtataggtgttatcgacaatattctttttttgaaattaatgcaactatagatactaaactagaaatcattttcatgtcaaaatgttatttcataccatattaaagatctggaacaaaatataattgtatcttggcagtatcttaattgacgttttatgcctgtatatagatatgtcagatttcgaattgatagtagggaccatgcaaaggaaaaagagaccatgcataggaaaagttaaaatagtcttggaaattagaatcgtacggtaaacatgttttttatttatatattatgactattataacttagagaatgcctcatggttagactcataattttataacggaaacgtttacacctgttcggttgttatttagcaaggtccggtgaggtatggatgaggacgtcggcgatctgaaccctattaaactttgttggtccatccaagttaaggtcttaaacaaatagcgagagtggtctgataggggtcgtcgttcggttcgtatggttttggctgatgtgctggtatgcatggtttactaaatttctcaccgatattggaaagtggttttggttaatgtttttctattctactatctatgaaatcctatatataggatcatagaatagaggcccagatcaaata

SEQ ID NO: 20547 - DNA, 735 bp, Arabidopsis thaliana landsberg
cctatttggtatgtctagatctttttagtcttattgatccgcttgaaaccactcttaaagcttattctcttttgactatgacactttaaacacgaacattggtgttatgtttcaatatgcagaggaatgtggaagcgagctgtcaagtatcatcaagcctatttcaaaactttcgaaaggggtttctattgtcaaaaatgtatttgacattgttcttgtaatttcggaatgttttttaagaaaaaaaaaaattcgatgtaagaaatcattacccaaatctataataatgaattaataataataatgttgttttccgctagacaagtacaagataatagttatatgtcaacaaaatttataagaggtcaacaaaataatgaatttattataaatttataataatgaatttataagatgtcaacaagattcttttattattatttctatctatatataccactagacaagtacaagataatagttatatgtcaaaatctacttgtctttttatccacctctaggagctctactatattgcatatcattttggtgtcatgaaatcctaatacagggttttcttgtgtttttgtttatatatatatatatataattctatttttaaaaaaattaagttaatatatttgtttgtacacatgcacatgtataatatttaacctaagcttttaagaaaacttattcatgatggaaaaatcatagacccttttaaaagatatt

SEQ ID NO: 20548 - DNA, 1586 bp, Arabidopsis thaliana landsberg
acacttaaattatgggtgtctttaaaaacaaaaaaattgactctacaactttttttcataaactttggttaaacaaaacaaaacacaaattgatttaatattattgtcttaaaagacattattgagcaccaaatcattgtcttaaaagacattgttgagcaccagagacttttttctaaatagagattaaaaaccaaaaacctttctacaaacaaagtcggtttatgtcaatttctcctaggaaaacttagcaggtacggcccaacactatgacctgcctaaagctcaaacaatttttttcttcttataattaaactataacaaatgtgacatactagtcaagagaaaaggatattttcataccggtattatattctgagtgtatttttatacccagacaaattatagattactaagtgagtgtagtaatctatagatttttcagatactttttatattatttaatttaaataatttttatttatctaatcattcactcatgcaataaggaattatttttagtattaaaatatattttttctaacaacattctcaatatttcatcatacacataattcataaacaacgttcatcttaaatcaatttaacagaagttagtctttgattctagaaacctaagaatttgatgatggaccttcgtacgtattatgcaccttcggtgatttattatataaatatcaatttaagataataacctactcaaatcattaactaatccatgattattatatacttatactttgagtttggattacaaaaaaaaatcttcgagtatgaaaaagctattaaaatggttttattgaaaaatcatgtaatattaaaataaagtagtaatagtacattaaatatgtaaaataaaataatatataaaattaaataatatataatattaaataataaatgtatcattaacctataaatgagaagttgaagagcttatattaattatttaatagacatatgtcaaatgctaaagtgatgatatatcaatcatatgtagagagtttgccatctttcatatatatgattaggaaaaagagcatttttatgcaataaggacatttacaattatgctttagaagagttatgttaagcattaatttgttatagagactacagatttctaatagcaaaaaataaaataaagtaaaaatatacagattttttagttcaataacagttatcgtttcatgcaaaacttctatttacttcttctgaacacaatttagagttcttagtttcttaccccaaatcccaacgtgatgtcgttttacaacatggaactcaagatcaaaccctaaatatctttagtccagtaatttgttgcattactggattttccaaaacatttcaacgagatcaagagcaatattacaagattacacaaagatgttttgtatatgtatttgtagtttcaagtccagagtcatgtttttttaatagaaatctactctagtaataaaaagatctttaattaacttatgaataatcgttactgtattaaaattatttggtagctaaccaaatgattgatcatattagaaacagagcatgacccaaaaaat

SEQ ID NO: 20549 - DNA, 2841 bp, Arabidopsis thaliana landsberg
ggtcatgatggtattatatgtccactaatagttaagcaatactttcccaccttttttacagcttatcatgtttcgccggagaattccatgcctggactcatatctggacaaggttcatacctctctatctcttttattatgtttgatcaacatttaaatatgtctggcgcaataaaaagagttcattattatggtgctcatcttcagctgttttcacttgctcactaaatgttttctttttggtataactttgaaggtcttgtatagatcttagatataagcttatagatgcggctatggtttgatttccttaggtttcatagtcctctctcaatgaatcttttattttggaaattgagcaggttaatatttctttgtggcctcgtttcaagatggtgtttgactcacaccttagcagtctgagagatgcaaacattaagacattatgggaagatgatgttcatcctcactatgtcatgaggcgttatgctgaattcacggcttcgtttattcacctaaacgttgaatatggagatgggcaggttcgttataagaatgcttctgtctctaatgatatgtattacctgttctcgtcactcaaatcgcttgacactataatgaaccgctgcagcttgatataaatctggagcggttaagaatggctgtagatgggttgattctcaagcttgcaaagttgttcccaaggccaaagcagcaaattgtgtttctcataaataactacgatatgacaatcgctgtactgaaggtgagttgaatccttggccgtctcatgttaagtgcacccatgtggaccagtgttttcttgatttgaaatggctttctacgaatctcaaggcttaactaattgagtctgacctaccaaaagaatctgttttgatcatcttcctgtattttaggaagctggaccagaaggtgggaaaattcaaatgcattttgaggaaatgctaaagagtaacacttcattatttgtggtaagggcaaatactaggttacctttgtaatttgcttcatgggtataacataaaactggctttgtagtagcctaaccttaatctgatgtcaactcgtaggaagaattgctggtggagcatttcagtgatttgatcaaattcgtgaagaatcgagcttgtaagcaacttgtttctttcttgtcttcacgtactcatcgtgtgttaagttgaaaaaccactaaactgtaagatatgtggcagctgaggattcaagtccaaatttagagaggtccattacagttgctgaagtagagccgctggtgaaggactttggaagcagatggaagacagcgatagaattgatgcacaaagatatcataacttgctttagtaacttcttgtgtggtatggatattttgatagctggaatgacacaacttttgctttattacacaagactcgaagactgtatcaagaagatagatggtggatctgctctcaacagggatattgtcaactatcaatcaatcatgttcgagatcaagaaatacaaaaagactttctgaaagataacatattggctccttatgtataattcttatgtcttttgctactattatccttatttagtctaggtattttctcagcctgtgtgtcttggataatttcatgggaatttctacaaggagtgaacagagagtgcagatgcgaattgccacaaacagataacttttactggttaaagttgcaacctcaagttaagttacagaaatgcaacaaagagtcctctgaaggtcatttcattaaccgatttcaaatcataaagcgatcaatatcagctgatacatatctaagataccaaaaacttaagcttccctgagttttaccttcaaagactactactactaggcagtgggaacaccaaaataatatactttcccatggttaaagaaagatgaccctttacaaagcatcctcgtgataaagatgaagccctaatccaaatcttgcacacgcacggcgaaatgccattgcttccgccttttgcacagcatcaccatagcctttgtcatctacagatgtggtacctgttgattccctaaatatcttgacaacaccaaaaaaatgattattagcaaatgatttcagcgtacaagttacaagcaaaacaatgaaaacataatatgctcaagaaagtatgcaaggaagcaaaccactagcatatttactaacgaaaacaggtcaaacctccctattcacaagtgatatcatctctaaggtttgtaagtactgataacagaatctataacccagagttggtgtttctccagagttgataaacatacactctctaagctgtattccttgacgggtttcatcatacaattcaaaatggacacaacccaaaagaaaacaactaggtttctatatttgcagcttctgaggcaagaaggcaaagaactctaccaggagacgacttgagctaaaggctaaccaaatcaaaccataacactgaaacaagaggaagggaaagacctcagcatcagtgccgtagagagtcacacgataagccacagtaacagtgttgccatcaggagagtaagtgacacttcgaacttctcctgaccattctgaaaacagagaataatacaccaaaatgtcaaaaccaaaacccaacaacgaaccccagaagaacaagagagggtttagcaaacctggagcatgcatattcatgatccgattcacaatgtgcctgagaatcaacacaagaaaagagtataagtattgacccaaaaaccccaattaaagaaccctaaaccctgaggaaagagattaccaagggatgtatttgatggagcacccatcttca

SEQ ID NO: 20550 - DNA, 560 bp, Arabidopsis thaliana landsberg
taaacaatggctacgactacgtttccactgttctgcttcttcttagcctccttatcttcttgagttatgcgtactgattctgcctctatcgtcaagtctcttcctggttttgatggccctcttccctttgaactcgaaaccgggtttgttttcctctcttcctgtgattgttttatctgttgttctgagtttggaaataatcttaagtatgtatgaatatgattctgtgtgaatgaaaaggtatattggtgttggtgaggaagaggaagtgcagttgttttactactttatcaagtctgagaggaatccacaagaagatcctcttctactctggttaagtggaggacctggttgctcttctatctctggtcttctttacgagaatggtaatatctaacacatcacttctttttttaactcatagttatcatgttatgttgtgtctctctctgcttcgttttctgtgatttgttttgctaggtttggagcttaaaagattgtctttctcaaaccttaaacgatgtacactctgttttttttacttaatagaatagaaaaca

SEQ ID NO: 20551 - DNA, 644 bp, Arabidopsis thaliana landsberg
tgtcattagttattttgaacatgaaagagtcttaatataacattcttcaaaatcctatatgctggttttataatgaaaaggcattaaaccttgaaaattcttgtgtgaaatggatcttgaaaaacatcgggatatgatgcatatcttaaactaggcgtgggcattcgggtacccgttcgggttcggttctttttcccgggtatcgggtctattcgggtaggaggttgagaaccattcgggtattcttaaaatttggttcggtttcggttcgggttcgggtcggttcggttattttagtaaaaatgtaaaaataaccaaaaatacccaaaatattttcgggttcgggttgggttcgggtattttattcatatatacccaaatctacccaaaatacccgattacccgtaaatatattggttacttttatccaaatataaccaaatgtaaccaaaatacttaaattacctaaaaaaaactataacattggttatttttatcccaaatatatccaaatgcatatgaattactaaaaaatctagtatattcggatttataattttaatttgggtgtttgaggtattacaaatatatatatatataactaatatttttaactttacatttgtattcgggtacccacggat

SEQ ID NO: 20552 - DNA, 778 bp, Arabidopsis thaliana landsberg
aggacgctctcaatattcaaaatcaaaatcaaaattgaatctcttaaggtttatcatcatcttccctatttctcaacaatctattgcttctctttttcttcctctctcgagatctttttcaaatatattctcaaatccacctttctccgctggatctgattccaaaacatgtgaaagtctctggtcacagaatttccgtcagaagtttcctcgaaaattacaacaacgctatcgacattctctctttcgatttcgattccatgatcgtgaagcctctctcgaatttcaacaaccgcatcaaaattgtaaccatttgggcaagttacgtttctctctttctctcaaagttctagaccctatctcttcgccgctccaacaatcatatctccgtcaagaggacgttatcctctcaaacgtggatctagctctgattctcttcacttatatttcgcagattagttttttttttacaaaggattcgagatgattttgagaaccatgaccaattaatctagttaatctatgcgtttaggagcttgttgatggttgtttcgcttattagtggagcttgttcttaagttcatgttctgtgaaattggtaatttttgggatgtgtataatattcagaaaatttggttagattgatttctacgcttgtgtcgatgttaaatttggtgccaaatcgatggattacttcaagtttggttaaattggatactcttattgggtttgttgcgggataaggcacttttgatataagtttatgcaattatctcta

SEQ ID NO: 20553 - DNA, 550 bp, Arabidopsis thaliana landsberg
aaaataatgatgcaaaatcagcgtctgcagagaatcaaacatctgacctattggactcacatggagcaatataccgctaagctacgacagtaatttacaaaaaattgcaaacattacatacatatactaacaaatataatatactattaattaaaaatatatgcaataaatttaaaataacaaaattaaaaaacaaaatatattaaataaacttaccatactatattataaatttcaaatatttaattttatatataaagacatcttctatatttgataaattatagatctatatagaattcacataagtctttgcaattgtatttttggaatagagaaaaactgaaaattgaaaataatttgcataagtattttctattgtattcctatatttggaatacagaaaaactgaaaattaaaaataatttctcaaatataaaaaacatctatatagaaaattaatatttcaaatttcaaaatatatatgtatggtagggtatattcaaaatttttatatatttgttttttgtgtagtcttgtaattttaaat

SEQ ID NO: 20554 - DNA, 620 bp, Arabidopsis thaliana landsberg
taactgataaatgttcctcacgtttttttcgtaaatgaaatactgagacgtttttttcttccaccaaaatcggaaatgttgttctaccaccaaaatctttcttaatcaataatttagttcaagtattgatgtatataatcttttacgttttgattgactatatatagtagtaaatcttctcttattatgaatggtttcatagaattataagaaaaattaagaaaaaaaattgtctacaaaatttatcattacctaactacttattttaaagggtgtattcaatcaaacatttcaaatgatttttgttaaaaaaacaaatccaatattatttaataataaatttcaaaagttataatgaaaaggttaaattgcatattatttttgattttatatgattattgtatttttttgatgtgatgggtaaaatgagaaaaatggatgatttaaacgatttttttggcataaaaccctaaatataattatgttttgtcgatagtgaattatgaattctatttataatatatatattttgttaactaacaattgattttaactcactaatgctttaaccagaatattcaactccaattatatatatcactaacgggttctaatttgaa

SEQ ID NO: 20555 - DNA, 808 bp, Arabidopsis thaliana landsberg
ttcgaacgttcaacagtgaagtaaaccattcttttatctataaacctggggaaataaaccgaaccgaacttacggaacctaaaccgaagaactaaaaccgaatcaaactgaaccgaaattttgaaaataaccgaatggatagtaaattctataactgaaaaaaccgaaccgaatcggtaccaaattgaattatttcgggtaatcgaaaatatcggaaatataattatatttttaaaatattagttatttttagactaaataactaaaatacttgaaaaatatatataatagtaaaaatacttaaaaataatcgaagtatcgaaaaatatacaaagcaaaataatcgaatggatactaaatatttaaaccgaaagaaccggaaccgaaccaaaattttaaaataaccgaatgaattaaacattagaaccgaaagaatcgataacctaatagatacgaaccaaaaccgaatggataacttaacgcctagaactacttatatctctctctcgtctcgccgtttttatcccaaaatcggttatttcggttttcttttatcctaaattcaaaataacggttaattaaagtaaccaaccggttcagtgcgaagaagaaatcttagaatgtttggcacaaaagagaagacttttgatctgtggagattgcagtgagaataagtaatgataatggatataaaatttgattagtgtagaacttggatgagatattgtcgatcataatatttgaatatatatttttgaattcatatatttaagaatacatatgacatgaaatattatttagtgaggac

SEQ ID NO: 20556 - DNA, 923 bp, Arabidopsis thaliana landsberg
gagaaatcctcttctcacaagccacgtcggagtggggacaaacacaagaggatgaggaaagtcgtctattacgagaccgacacttcatcgacatctacctccggctccgacgcggcatccatcacttctaagcgtcaagagcgcaagaagtatagtaagatccccctacgataccctcgtatttccaaacatacacctttactttccgtcccattaggcaaaccaccaacttttgatggtgaagattacgctaggtggagcgatttaatgcgatttcatctaacctcgctccacaaaagtatatgggatgttgttgagtttggtgcgcaggtaccgtccataggggatgagggctatgatgaggatgaggtggccaaatcgagcacttcaactctcaagcaacgacaatactcctcgcctctttgagtagagaggagtataacaaagttcaagggttgaagaacgccaaggagatttgggacttactcaagaccgcgcacgaaggtgatgagttaccaaaatcaccaagcgggagacgatcgagggggagctcggtcgcttcccgttcgccaaggggaggagccacaagacatgtacaaccgcttgaagaccttggtgaaccaagtgcgcaacctcaggagcacaaaatgggatgaccatgagatggtcaaggttattctaagatccctcatttttcttaatcctacgcaagttcaattaattcgaggaaatcctaaatatacactaatgtctccagaggaagtaataggaaattttgtgagctttgagttgatgatcaaaggctcaaagaaaatcatcgagctagatggcccctccacgcccgaagcacaaccggttgcattcaaggcaacgaaggagaaaaagaaggagtctacatcaagtagacaacccatcgacgcctc

SEQ ID NO: 20557 - DNA, 2883 bp, Arabidopsis thaliana landsberg
attctgggagaacacttctggagcaatgtaccctatggtgcctcttgcatgtagcattgaaatgatgctttcattatttttgcatagcttagcaagaccgaaatccgaaatcttagggcataaatctccatctatgagtatgttctgtggctttatatcgaaatgtacaatccttgatacacaatggctatgcaagtattctaggccatgagacacacctaccgcaatattgtataacgttttccattccttctttgccgacatcttcttggagatgaacttgttgagggatccattcggcatcaactcataaattatagctttcttcctcccttcatagcagaaaccaagtagagagactatattagcatgagatgtcctactcatgctagctatttcattgatgaagtcttccccatcctcgtttgactccttcaatatcttcactgcaacatctcggctgccatcaggtaacttccctttatagacagttccaaatccccctttcccaagaacattctcaaatgattttgtcatcttcttgacttgtacataactaaatcgtttcaacattaccactgcttccatgttcttctcattcaaatcactctttctcatattatttgctctaacctttcccacaatcacaataatgatcattgtagccaatactgatgaaactcctacaagagaataagccttaaaacttaggtgttatatacatcaaaaatgagtaagatagttgagagtaatttcaccaggtttcttctaaagtgtaccaagtatgagttttaacctcaatggaatatttcctgcaaatgtattacagaaattatttcgattaacaaaaaataaaatgatacattctcccgtaggtcaaagaaaagaaaaacttaccttttgcttctgttccagttttgatgtttcctgcctctgggaccgcggagctattgatgtttcctgcctctgggaccgttgagctagacggacaaaacgtgatgacaaagttggagaagtttggacaagtgaaactgctgttatcaacgtcgtaggcgtaactataagcgcttgggcacacgttattgaatgtccgcgagtagatcgtccgcttgcatattcccggtggtacgaccaccccagaagagagtccgatacagcaaagctctggcaactggtatctctgacaagtggtcatgcaggctattggatggtgcgatccaaggccactactgttcaccattagctccgagggacatgtctcgttcatgtcaataacgcattcaatgcttctgcagtttttgttctcgggggtcacaagcaaagggaggttgtaaccattgaagacgttgacgacataatagtcgacaccgtaagaagcgaggttaaactcgaccactgttgttggatctatggggataccgaggcacttgatttttccggaggtgcagtctcccgtggcacatgagaaaccccctgttgagttggtggagcagagtgtcctaccccagaaacgacctatccatgatgacggcgctttgatggtacgcgtctctcctttctcaagaacaaaaccggttgtttctagtgatctcctatagccgtaggttgcaggccatatggtgtattggcatttgttttctatcgtaaagctccttgacattgctacatataacaaaaaaaaattcaagatatattgcagagattttaaacgtataatataaagagtaggtgaagagtttggtttatacatggacgtggcaatggacgtggtcgggatgaagaaggtggcgatggaggtgcaggtgacgaagctgataattaaacaaaacattactaataatgaatatatatatatcagagctttattgattctagggcctagtgggaagcacaaagagaagcctataacaaaacaaagtaaacgaaagaactctttattgaatctgaaacttgttgttttattaagacaagacacacacacttacatactgatcttaagtacatatctgaccaaactaaatgttgtgactgttgaaaactgcccaaactaaagttacgactcttacaagcaccttttgctataacacagaaacttaataattaaataacatattaccaaactcaattataaactagcaaggagtacgtaggtgaagagtttggtttatatacctggaggtggagggagcatttgagctgaaggtggaggaaatagatcaggtggtggtggtggagcaccagaacctgtaaattaaacaaaacacctatcatattgcaaatctcagattcataattgcaacggtcgaagatcttggagaattaaagtaccggaacaagcggatagatcagtgttgactccacatcgaaggttgagaccgagagcttgatctgtagtgatgttgaactgagcgagtaaaccaggagtgttgtagatggtgcagagacagctaaaatctttctccatcgcttccttgatcgagttgcaacaatccgtcgacggctttgttgtcgtgttcaagaacctgaagcagggaactatcttgctcacgcactcagtctgtgcttccacctccaccactgtaaccaaaaccgcgaatatcatcatcgccgttgtcatttttctttcttggtaaatggtaatggaaggtcgagctttttttctttgaattacttttaattttgctttagaggttttgtaatattatataattcagtggctcaaaacaaaaacatatgaagtcaaagagataaagccaaaacaagaatataccgaaacttatcgtcgtcttgacttttgataatcgttgaatccaaagaattgttaaccgatcattcaaggaaaagagaaaagtctttctctctgtttcattcataatcaaaagc

SEQ ID NO: 20558 - DNA, 446 bp, Arabidopsis thaliana landsberg
gttttgcttgtcgagtacatcctctgctcctttagcggttaagcacgatgcgactgggtcgacaccgcgagggcgtgacacacgcgtgacgtcggagtctttgaaccagaagagtttcccttgtttgagcacgaaccatcggcgtcgccaagtcttgatgtactctccttgtttcgtgagccagccggttcgttctgggttagaccagaactctacgcctccgtagtcttcggaattgttgttctgaccgccgattacagctcgccacaggcttgccatcttccgaagattgaactggagaattagggttttgatccaaatctgccgatgctatcgaaaatctgtttatcgattccattattttttcgtgtttatcttttgccccaaaatgtttttgattttccattttctttccttaatatatttataattacataacaccccct

SEQ ID NO: 20559 - DNA, 1064 bp, Arabidopsis thaliana landsberg
gccatgttgcaggaagaaaaaggtaagagcatcattgttggtataggtgaatatcgttcctgtgtacaattttcttatgggtgcagttttggcacttttgatacagggaaatgtacttataagcgttgttctattggatcaatattcacacctaatcttcaaggaagttttttggctacagagaatttcttccacacatccaaggtatataatcctttcaatttcattttggtcgatgccaagattccgtcagaatgtgaggagaattgtttgaacattggtctttaatttctgtctggatcagttctttgggttgggagaaaaagagtggctgtctgaaatgattttggccggaaagagattctgtggagaagaatggtcaaaattgaaagtgaaatatccaacatttaaggacgagaatttgcttcggtattgcttctcatcagcatatattatctcaatgcttcatgatagtcttggtgttgctcttgatgatgaaaggtaaatgttattgcacaagttcaagatcaatgcatgttggttttctgtgacaaagatataaacaaaaactatatgtttgctttgtttgcagaatcaagtatgcgagtaaagcaggaaaagaaaacataccactagattgggcattgggcgcttttatactgaatactgacacacccacttctgattacaatggtaaatctagaaaaatgattggctttaagtaacgtggccaaatacaaaatatatgatatgatcgtaattttgtattctacgttacattgtgtttgaaacttgtattctacgttacattgtgttttgaaagtatagtcgtcgtttccttttgtggaataagtcagctagcagctactcattaataaattgaacgccaatatgtggtaatgtattatgtatgtggtggtatgtgtataatttcgacattataagaaaacctctgcgaccttacggttgtttgaaatgccaattataattttatcaattactttttgtttacttgactctacgttctttggactattcaagtcacaacaatacattagataaat

SEQ ID NO: 20560 - DNA, 115 bp, Arabidopsis thaliana landsberg
atatatttgctaaaagttttggcgaatacaagtttttttctttgacatcatcaaatattttattattttataatggaacattgagagaatttgttatcacagctctttgtacatt

SEQ ID NO: 20561 - DNA, 1925 bp, Arabidopsis thaliana landsberg
atatatggaaattaaagtaatttcatatacccctgaaagcataatttaattttaattttcgaaaagtattgaatattaaaatttgttttgggatgtgaaatgtttttgaaggcatatgttgatttcattgtgaaaatcaaagtgtctttgtttaattagtgaaaccacacacatgattataaccatcttactttgagagattcgaagaagagagaatttctatataatgttgtaattgatcatgatttaaatgagtttttatatacattttaaaatgatttggtttagagggttacttctctaatttttagagagagaattgaattactcaatatagtagagaaaattttggtcaagagtgaaatttttatatctaagttcgaccctctttggaaaaaaaacacatttgtctgaaaagtgtgttagttgggttttggctaaattctaactagtttacatggtagttagaaatgcaggcggcctgattatccatggaattcggaaaacactccaaacttgggacaaactttatggtggtctttcggagagaagtctactataaaacaggtgcaattctaccgaccagatcagctgataggatttatcaaaaaaaaaaattaattttaaaactttataaaagctacttgtctacaattcttgataaaagatgaagcattggataagctgctaatcaaagctcaccagtaaaaaatgatcatagacaaaaaaaagtggatggaacatctgaagcacatgcactagaagtagcaaatgaatctttcggattatgcgcatgagcttattctttggatctagctattatatagctcactggatatcaatggccataacgaaatagtaaatcacattggtggtccaatagtagcaagttaaagttcaaaaagaaggagtacggaaaatttttcacaaacctgcatggaaaatttattgatcttctcctctttgttaacaatggaacccatgttacgactcatatgccatgattctttggatctggttgtggtagagcttatcattgtatatttcatctgtggtttcagaatatggttggtagttgaattagatgttaacgaaccacatgcattttaccttgacggaatttgataaatcactttctcataggggctaacatttttatatctgagtcaatcatatggcataagttggcttgcacaacaaggtgtattagttactccaagtaatatactatgaccaaaccacgccaacaaacctcgtcctccgccaaactagagccacaaatacatcgatgggaaccataccgccgtcgacggaggagagtacctactcactcatgaaacttctttaagaaatcttgacatgcgatgaaaatcaaagagaaccaaagaaactagacctaaaaaacttcttcaagcgagagaaaaaaactcaaaatttgatctaatgattgtctccaccataatactgtttaagcctttaaattttaagctttaatattctttgaccgtttatcatcaattataactaataagtaataactaatgctcatacaatcgttgtaagtcaatcacattctctcttatcgcttccaagcttaacctttgacataattgataattctatgaaacagaggtattagctctcaaattttgaggctcattttatgctgattggctaattaattataaatattttccaatatttcttctccttgatatctttttaaaaattgattttaagaaataaagttgtgactgaaaatttcaaatgatgaaatattcctaaatactaacaatcttgaagaattcatcccaaattcgtatcagaaccgaatatttttcccctgtactccaagccatttatgacctattttatgagcctataaatactttaaaccttaacgtcttctataatcatcaaacaca

SEQ ID NO: 20562 - DNA, 745 bp, Arabidopsis thaliana landsberg
  unsure (1)..(745): unsure at all n locations
atggcaatgcctcttcttcttctgttgagggaaacgtaaaactataggtaatgcaatagttgtctatatcttagaatggacccattagctagaaaagatcttaacttccgaaaatgtgactgtccaaacttcctttgtgcgagtattcaaataccaagaagaatggtttgttgtcttcacaacagtaacccaagaaattgaccaaattctgatgagacaactgtccaagagacctcactactgcctgcaactcatagtttttgtacccatcagataagtacacaagactaacaaggaataagagataggtatcaatattgcgtaaaaatgaacagactttgcttaccatccagtcttgtaaagagcgtgaactatcacattccatgacagaaacagcgattccggttccagctcttgatggtgcaaatgtggtttcatctatgtagcccttgtagaattttcgaacagagtaatcctcgcattctacgaccctgtcttgtctgaatttctttgtcgctttcttcaatccgcgaatctgaagactctcagattctcgttttctggctccacttttcatatatacgtataaatcgaacaatgtatttagacattattcgtaaacaaaaagtatagtgctttcaaaaacagagatatacctgaaaatattggagggataatgagaggctngggagcaattgaaggaagttgttgtttgaaatgctttacacagtttcccattgaagga

SEQ ID NO: 20563 - DNA, 985 bp, Arabidopsis thaliana landsberg
aatcgcattaaatcgctccacctagcgtaatcttcaccatcaaaagttggtggtttgcctaatgggacggaaagtaaaggtgtatgtttggaaatgcgagggtagcgtaggggaatcttactatacttcttgcgctcttggcgcttagaagtgacggagggcgcatcggagtcggaggtagaagttgatgaagtgtcggtctcgtagtagaccaccttcctcatcctcttgtgcttgtcgcctttccgatgtggcttgtgggaagaagatttttccttcttctctttgtggtgagaagaagatttcttctccttccctttgttggaggagctcttcttcttctccctccttttggtgcgggactcttccgatgaagtgctcccgtagcttgtagtgggcttttcgccggtctccatctccttcttggcgtgatctccgacatcacttcgagcggttaggctctaatgaagcaccgggctctgataccaattgatagtcgcctagagggggggtgaatagggcgaaactgaaatttacaaatataaacacaactacaagccgggttaacgttagaaatataaacgagtccgcgagagagggcgcaaaacaaatcacaagcgaataagtaagtgagacacgcggatttgttttaccgaggttcggttctcgcaaacctactccccgtagaggaggccacaaaggccgggtctctttcaacccttccctctctcaaacggtccctcggaccgagtgagctttctcttcttaatcacttggaacacaaagttcccacaaggaccaccacaagtttggtgtctcttgcctcaattacaagtgaatttgatcgcaatgaaagaatcaagaaagcacgatttgaaaaagccaagcgacaagagcgacaaataacacacggatcactttctctctcaagccactaatcactaatgatctcttttctcagggatcctctagagtcgacctgcag

SEQ ID NO: 20564 - DNA, 1022 bp, Arabidopsis thaliana landsberg
  unsure (1)..(1022): unsure at all n locations
tttttagctttctccttcctctctttcttctccttctcctctgtcacctccggttccggttcaggctccggttctctcttcttctcaacctcaggctcattactagaactctgacccatatcagactcaggaacctcagcctcatctccctgaggcggcggtggcctaaacttaacattcaataaaactccaagagattgcatcactctctgatccttcaaatacaaattaagactgctaggattcttctgaatctcctgcatcatgttaacaaaatccggctgctgcaaaaagcctctagtcnnnnnnnnnnnnnnnnnnnnnnnnnnnnnnnnnggtccttgaaaagcatcaccaaacggattcggtgcagctcgtgacctagcaacagacgcctccgcatcagccaatccagatttcaacgcctcgttagtcggatcgacatctaaacctttcttataagcagtgacggctaactcaaactggtttaaccctaaatgagcagcaccgagacggctataacctttagtccaatacggtttgagttttatcgtctctttcgcatcggagagagcttcagcatattgatgaagcgacacgtgagcagcgtaacggtttaagaagagaacgtgatcggttggagcaagagcaatggcttcggtgaagtggtttatagcggtggtgaagtcaccggaagagaaagcagcatttcctttagctttagcttcttctgccattgttgaatctgagatcttgcaagtctctgcagctttcttgggagactatataataataagacttttgttttggggttgtgtgtggactgtttggatacgagtatagagttttgttatcgttattgtatcttaagaataaaattactaagaaacggtgtcggttttgtactgtcgtggagactccggttattggcagacccccgatttcttctccggttcgatttttaattttgttacttgttcgtcaatttcgttcaagaaatagtgaaagctagtagtgtgtgt

SEQ ID NO: 20565 - DNA, 1200 bp, Arabidopsis thaliana landsberg
aattattgttttttcgctaaattctaattaaatccgcacccaatagattagcaaagtctacgaccaattgtgaggaaagaaaaagtcaaaaaaattgaaataaaaagaaagaaaacatgtacatcatgaaacctcaactccccaatgatgtccggaacaaacttcaccatgtgcttgcatacacacagagatacatgtgtattatgcgaatgcgtgaataactgaatataatatatagactcactctaatatatctaatgaagtaaatatggcaacaacgtgacagcatctaagtcttcttggttttaagacgtgaccagcctaacgacccaaccaaactacttgtctattcttcctcccaccctctaaaacccccctaccttctctactttcagatcatcacgccccaatttcaagcagagaacaatggtctcttcctacatttcatttttatcaatctggtattgccattcatgtaatgtattgtgatcatataagttaactgactatgcatgtgtttgattgtgcaggctaattcagcgtctgggatgcacgttagcgatgagtgcaagctcaagttcttggagttaaaagcaaagaggaactataggttcattgtgttcaaaattgatgagaaggctcagcaagttatgatagacaagcttgggaatccagttgaaacttacgaagatttcaccagatctattcccgaggatgagtgccgatatgctgtctatgactatgatttcaccacccctgagaactgccagaagagcaaaatctttttcatcgcatggtacaactccctgcccttgtatttttaatgatttgaaaaagtagatgttataattgagacatcaacttgcttcaggtcacctgatacatcaagagtgaggagtaagatgttgtatgcaagctcaaaggacaggttcaagagggaattggatgggattcaagttgaattgcaagcaacagatcctagcgagatgagcctcgacatcatcaagggacgagtcaatctctgaatggaacttaccgcatcttaattcggttcaagcaaaattcatattttctgctttcgtttcttgggttttttcatttaacttctttactatttggatcttctgagattaagaactcacctttttcttttttccttttcggacgcaataaacatccaaaagataatttactttgctt

SEQ ID NO: 20566 - DNA, 1308 bp, Arabidopsis thaliana landsberg
ggctatgtaaatagatttacgcgataatatgtactccctgcgggtttttttttatttggcatcagcataatgcagactactgtttttggaaagaagtttatgataattgttcatcaatcatttgttttctggttattcagttccatctctgtttttttaaaatacagtcagacagtcggtagtttcaggcacaaaagctgtcacgtcagtgtgagaacatttttttagaaaataatttagccacaatactcgaaagttgtgaatttacatactaacactaatcaacagcattacaggaaaaacttaacagactagagcaatctacagatgtatatagccaacattacaactcaagttgcaaaagatcttctcaaatttctgtaaccctagtctcacttctccattctctcaagactcaaggttatcttctcttgtcttcttcaatcgtagataagctttaaaagtacaatatatgtaattgcattgaagcatcaagtaaatttctggtggttttttttcagaaaactggtagaatatggacctggacttggtgctggatcgagcaaaattaactcaaaagttttttttttaatagattaaaaagaggaatttgttctttgattctttaattgttacaatacaacaacatatggatccatcagtctgatcatcaccatctaaaattaaatcatgtaagacctactaatcttaaggtaatttagtcgtctctgtggattcataagcagcatcagctgaagaagtatctatgtcgttgagacccaactcctcgttttgatcccatgacctctcgtactcttcaactgtagttcaaacataacaaaacttgttattcaaaacccaagtcctgtcctaattcacatattgattgagtcctaatttatgtctcagtttcattataaaattcatcaagaaaggaatggataagtctgaatatttgtttagttcgtattcatatcccacttaaggctacataggcagggtaaacgagtaacttacatgtgagctgatggtcatctttgatatcatctgttactggtgcaataaaggaatttgctaattcatcatcaagaatcaatgtccacggctgttcaaagcttaggagctgcaagcaaacaaaacacatattcattattgctttttcttccacatcaagcacacgacaaaggctaataaacagaaattcaatcaagttcctaccttagtgagcctggctccaaattctctccatttgttcaaaaaactctcttccatactatcaccaaaagtgaatccgtagactctccctag

SEQ ID NO: 20567 - DNA, 1239 bp, Arabidopsis thaliana landsberg
agtgtgggaccgaggggaggggagggttgattggtgataggggggggcgatggagcgacgaggagggaggggttagactgtctgcattagagtggaacgaggagcggccggaggtaggggggcacccttaaccttccccacattcctcccatgatattcattttccttatttggcccttctgtaatggcaacttcccttaaatcaggcaaatcaccattaccatccaatccaccaaatcgatttgcgagatccaccccctgatttttagggagttcccttaacctctgttttgacctaccaccagacgcacccaccgcaaacaccatcttctgcaccggtgccgccggccgtctagcggagcgttgaaccactgtgaacccgtcatctccctccatcccaacaggcatcacagctctatccgtaaccgtctctgccccagccgaaactttcaccaccacatttcttggacaagaatgaaccaaatgaccgtaaataccacacgaagaacagattttaaacagtccttcatatgctacgaagtatctatccccatagaactgttcagtttcttgtgacagggcctttaacctacgacttaggggatatatccagacggggcaaacgttgtaacaagtgtgatcaaatcaatatcagaactggatacatctacccaacccacgagcaatctccatgagtaaacaccgatgatagtagttatacgggatattcgataatctaacccacaccggggtagtcacaatatcatccctcaacggatcaaaccttgacgaccagtcttggaccaacagatagttcccaaaaactctccatgggcctccggttaaagcagccatatactcctcttccagttcaaacctaatcatgaaaaactggcggggcaaatccatcactgtcatcactcccgacggtttccaaagctcccttagcttgcgattcaacaccgagatcggaatctggctcccaagcaccttcactatcatacacttcttccaaagcccattcatggcttccaacacctcctcaccaatggtaataactggctcctcgtgctgaccatctagaaactccagcctcagccgctccctcacaaactcatcatcaatcacgtcttctgggttcaagataccttccccagcactacccttcactttcgtagcccacgactccaacttattcgggggatcccctggtggacgccccttttctccgaccgtaag

SEQ ID NO: 20568 - DNA, 5035 bp, Arabidopsis thaliana landsberg
  unsure (1)..(5035): unsure at all n locations
ctcttcctaatgaagtttccaaaaaggatgtgtttgctgtgtatttataaaaaaaaaaaaggcaggaagaataaagaaaaaggcctgaaggaatgaacaaatgaaagttcaaaaaaaaaaaaaaaaaaaaggttgtgtgttggcaggaaagaaattggtattctttcttctcttggggtatatatgtatctatgagtacccccttaaaacattgttcttcattacaggctctacnnnnnnnnnnnnnnnnnnnnnnnnnnnnnnnnnnnnnnnnnnnnnnnnnnnnnnnatgacgagtgtagactatcctgtcttgatcagtgtgtatggttcatctcactgggccagaaagctgctattttctccatactaaaagttagttatgcacctcttgtactttggaatctgtccttctcgcttggatgcatttcgatgtgggttccttgcctagtaggagtctctttaagctatatagtatatatgtctatatcttaagattatgctacgttttatcattcagaggattatttgatgagatctcacattcagtttgaatcacagttcttgaatgacagtggctgttaatttcaagtgttgatttggttaaatttgtggttctatatggcttagtcctaccttatgttgcaatcatattatgtacatatgttgggtgtttgttttgtgtctgggattttgttttgttggttttgggcctggttttaggccctgtgagtgtttaacggatatgctttagtgttttgcagcctgtcttggttttcgtgttgtttttagggttttgcttgaagtgctcgtgctatttaaccaaagcagctcccacagaagtttcattcaccttttcggctactcaaccctcagaatttaaagggtcgccttatctctaaactcaaattcatcatgaatcacgaagcgacctcgttgactggagtctctggtgctggtcagccgtccgctgcgactccttctgaccctccaccgccttcgtctgttctgatgttcattcccaagactgaaccaggcatctacatgtccaagaaaaccaagtccaaggtctctgcaccgtctcagagcaagagacagtgtactgctgctacttcaaagacaagatgctaaagcgcctgctctccgacggttgtctagcaggaagcccacccgatctgcatctgctgctggacagactgaagaacatgtctttgagtcttcagatctgcaagatggtgatgttacccagattgctccgcctctctttctgtccgggtatcaagagaactgactgcttctttctgctcgagaccgccagtgctctgagctaaagttttctcagagactccttacaataactgctttcttactggagaaggacttgggcgctacaaggtcatcgggggtcgatgattcaacgacatgcgttttcttcctcttgatggaaacaacattgcgagtactctacaactcctctccactgttggtctgctccctactgttacagagatcaactcttatgtgcaagaggttgtcatggagttctatgcaaacctccccggtggtgaagaaggtgatcaacttgcttactccgtgttcgttagaggcaacatgtatgagttctccctggctattaccaatcaaatgtttcattttcctaatctatcatatctagtgaacatgtctgagattcaagttcctgagtccatggatgaaattgttgttactctgtcaaactgcaaagccaactcttagaagatgctcacatcttggctgttttctcttgagatcactcagctcaacaagatctgttgtcacaactggatgcccaaagtgaatcgatttattctgaaaccggagagggtcactcttctttacatggtggccaaagctctacctttcaactttggcaaactcatctttgatgagatctggcgtgttcgaatgctgttgcgaacgcctcctctactctccgattagtgcttccgaacctgattgatcaaatgttgcgctttcagcgcattgtccgctctaatgaaggagacaccacatcgtctgccgataacactgtaaattactcattttaggcatgtatttatcatcatttagcttagtgatcactcattgttttatatcattttgcatcacatttagcttctttgcacagttaggcatttaggatcatcttgcatatatattgcatgtttcggtgtgttttcaggtgcaaaaggagctcacaaggattctagtcgaccctctactatatccaaccagcacggaagcagcagagcattctactcgaccagttcactcgatctaggtagccacagaggaggcaacaattcactcgacccacttactcgatcaaggcagccttagaagaagaagcatatcgatctactcgcccttcctactcgatcctctactcgacccatttactcgaccaagggcgaccaactctacaagacttgttgatctatcaaagcatcttcggatcctcctcattccccactcaaccagacatctgagcatatagataagagaggaagaagcatctactcgaccaattgatcactcggagtgataataggtttttagtcaattaaacctaaagcactatcatatcgttgtagtattttagtttttcaatcagaatgggtgtgatgctaacaatcaagatgtgatcaaaagacactaagtcaagccaagcaataacaggttttggtgtgttctagcagttctaagtgaacatgcagaaaacagaaattcaagtagaaacaataaaacactcaaccaacacagctctttgcagagcactgggtgaggtcgagtgacaggtcgagtaacagatagaaagtataacagggatactcgactgcacagtctcttgccagacaactaagtggtcgagtaacagtaaagaattgtagaaactaagcaacagatgacaagatgcagtaaacaacagtagagtaaacaaataattcaatcagataaagaattcccgaggatggggtaattgagtagtttcgtttcctcagtttacacgtggttgacatgctcaataaattaaccctagacaacaagtttattaaccaaatctaagtgccaccgcaacagagactctcaagttaacctagtcccacactcaatcaccattgatgagagctaacctaacaggcattacgaatcaacaagttaaagccaaaacgctccctgcaaccaataccttggtacagggtcacaaatctttggaattagtggttcagacatttcatcgaacacctcttgggcgccaaaatgtctaggctcaaattccagttgatcagaaagcaatagacattaagaataactaatctagaagggatctatcaatcaaactcaactacccagcatactgagaattctaaactactctaacccatcctcagaaatctattcactactcagacatcattgaagaaaacataaacgttgaatggaatgaaaacatgataacaacagagtaatagcaagatggtaacaggatgaacaacagtaaacgaaatcaagaacaaatactgaatactgaatagataaagagaaatccggattacaaaaggtcaagaacacaatgtctcagaataaaacttagataaaaaacttgtctcgaaaatgtaaagtacatgctacttatagcaaaatattccgaaaccctaatactcaaagcgacggagtattgggacggattaaaaactgtactcgacccagatggtcgagtgagaggtcgagtgataagctggagtcttcttttcttccttgtactcgagtgtctggttgagtgcggaatgaagaagactctgaagctcgccatcgagtatgtagtcgagtgctggtgatggtgatactagactaccatgtagagtggtgtgatcgagtgatggtcaggtggtggagctgaagacactcaacctgggggtcgagtgaagtgatcgagtatcaatcgtggtggtactcggccagggggtcgagtgatgagatgaaatcgtgaagtcccatactcgaccagggggtcgagtggtctattgaggtcttgaagcttctactcgaccttggggtcgagtggtttgacttgattaggtctgcttcttccagttagctcgtcaacaactccaaatcacctgaaatcaacacaaatatgcagcatgcatgcaaaactatcctaaacatgcaaagtgatgacaaatgatgagaaatggtataaaacaatgatgatatgatgctaaaataatgacaaatggatgctcaaaactggcaaaatacacacttatcaatgaatatacaacaaacaagaatgaggcatatatataaagatttgaacatgggagaaaacgaaaccgataattaaacaacaacttggtgggatattgataagacaccatcataaatttactacaataaaactgtcacataacaagttgctttggaatcaacttgctgcaattatagtgtcgcaacagttgtggctttagagaccaatttgataccgcacaatgagtggcctttggtatgagccagtgctgttataagttgtcataactggtacgccacataatgtgagtctccactttgcttctagttggtacaaaatgaattgttgcaaaaattaaacaatattaataatcttattttatcataaatttttgttaaaaaacctgttttgtgaaaatttacaacaaagtttttgatactaaattcgtatcaaatttaatactaaaacggaatgtcataacccatcgataatagatacaactttactagttgataatagtcgtaagaagttaattaatattctattcaactgttgttacaaaatcggcgacaaattttcgattgtggaactttgcaacaaaattttaacacaagtagtaacaaatttgttacaaaaacatttgtcacgcaaaatgtagctacctggctacgggtagtaagaaattagctaccagaagcaaaattgtttattaaatcgttttttgttactaatttgtaactgata

SEQ ID NO: 20569 - DNA, 727 bp, Arabidopsis thaliana landsberg
caatttgatcaattgctaatttcctaaattacctctacctaatttaaacattaatatataattattcattaatttttatatagtacgattttatatttaatttattttgaatttttataaaatacatataattaataaataatagattttttttatatatgatgtgattcaaatttttaaaaatatatatatatatatatatatgatgtgattcatgtagaactttttctttctcaaaaagagaaaataagaaatactagaaaacactagttaataaaactcaattattagggaaaaaaacaacaaattaacttttagtttttggtactcaccaaaaaaacttttagtttttggtgatgacgactagaagcggacaacttgtgtccaccactactatgagtgcattcttctccaagtcccgacctttcttgttccccgagccatttggatttttttttttttttttttttgttaaaaggccttcttccatttggaaaattgacattactagttgacataatctctcgctaaaaaaaaaaagaaaaaaaaactaatgatttaaaatgcatgcacgtaatgtaactctgaatgcagactttatgcatgcaaattcaattcattggtcattacatatttaaattttaaataaattaaaaaagaaaatcgaattatatttcttggaaacggttgaaaatttaagatcattttcaaagttttttttggaccc

SEQ ID NO: 20570 - DNA, 432 bp, Arabidopsis thaliana landsberg
acaacatttctcaaaagaacattattttggttcataaatcactctttggctttcgttttttaggataacgacgttttttacatatgaaataaattgttgtatggggaaaaacttcgacgactttctcattttggtacccgcaaatttactattaattttcgtttatcttcgctgcattacttagtatagctcttctaaaaataagatactatacagaagtatattcataagcttatctacactttcttttaacaactcatatttttctcacattcttttcaatatgaatttctgtcttcacaattttttacgaagagctatcactctccctatctttttgcaagcactcgttttctttgatccatcctttcttacggtgtctccatcctcttatgattttgtttaagcaatatatgccataccttctaaact

SEQ ID NO: 20571 - DNA, 389 bp, Arabidopsis thaliana landsberg
agtattttaagttatcaatccaaatgggtgtgatgctaacaattaagatgtgatcagaagtcactaagtcaagctaagcaataacaggttttggtctgttctaccagtcctaagtgaacatgcagaaaacagaaaatcaaacagaaacagtaaaacactcgaccaacacaactctttgcagagcactgggtgaggttgagtgacatgtcgagtaacagacagaaaataaaacacagatactcgactgcacagtctgttgccagacaactgggtggtcgagtatgaggtcgagtaacaagaaagaattgcagaaattaagcgactagataacaagatgcagtaaacaacagtagagtaaacaaagaattcaatcagataaagaattcccg

SEQ ID NO: 20572 - DNA, 501 bp, Arabidopsis thaliana landsberg
ttgccacttttgacaaacatattctttaagggattgttgatgttatttttttagtgtcaaaaagtctctagtataactgtataagtgtttctttaccaacccaaaatgcaaatacagaactagggattttaataaaaaaaaaaacttttaagtagtggaaaatccattttaaaaccctcgacaatattattaatgaaaaaactcttaactaagagattttagtgacaaaaacccttaagtactaatcaatctatttaaaacttctaaactataaacaaaataaacccacaagtatttatagaaatattttagacctaacaagtacatatctgttaaacaaaagatgatgtgtatatttttttgtattaggatgtattaaaagatgatgtgtatattttgttgaaagaatccaatacgatacctaccaaatgaatagttttgtattatgctttattaaaagaagatgctaatatgttttagactcaaaagaaggtccaaatt

SEQ ID NO: 20573 - DNA, 1578 bp, Arabidopsis thaliana landsberg
ttgccttgactgcgttaacatggagaagaaagaaggacaaattggggaatctaatttaacataagaaaaccactgactactgagctgtgttcgcaagagtgtacttttttggattctctgtttttgtcggtttgtttttttgttggggaagtagtgttcctctgtttttgtcgaccttgagattgtaaatcttcagtagagtagtaaatgtaaacaaaaaaagtttgacaaatttcgggtttctatgtataaatgttggtacatgaaaatattttgctataagctaaatggaaggtatcattgttttgatcattaacatttccaaattagttttgaagggatatgcacatgctatagcttaaagatttacttgtaaaactttaagaagtttaactacattttcatgtccgagtggttagcaatctaagttagaggagcatatttttggccaagaccaggggagtgatttccgttctgaacgtgtgacccatcactgtgtctacatgactattgaagacatttttactggtcaaaacacttgattttattgggtccgatattaatcaaaatgacccaagttagcaaacaaacaaacaaaaaaaactaaaatattgtgtgatcggaaatttgtaaacaaatggaagttgattttacttaattttactcatttttataaaattagaatgttattttaccttacaacattatattttacatggtagcacacattttttttttttttaaatatcaggaagttttgggccgaatcctgtaatctctccaggcgcaaaaccacaacatgtaatattaattttgtttcaagcgtcactctctcgacgacctctaaggtttgcctattgtctttacagctaacgacacttggttcacatttaaaaaaaaaaaaaaaaaaatacttactcgctaacatatccatacataagcatttttaccatcatatattttttgcaaaattaatcataattctaactcaatcatttgtccctttttaatctgaaagaaaaaaaccactccttttatatttgtttctttaaatttctgcaatgtttaatttttattgaaactgatgttcgtttctttcaagtcatctagtttaagaatagtacaagagcaagtacgagtgtacgacacgatcagtttatggtttttcactttatagttttgctcgtaactcatatttaattatttattgatgatgactcgactcccatggtttttgccgccggcatgcttttatgggttgggaaaaaaaaagtatgttgagaaagaagacgatgatgtcataatatggacatgtgtcggttcacagattggcttcgaagagtttcaatatgttttgactttggaacagttgtatgaacttgctctatttgctgcaactacctgacgcggcgatgcgactctgcctacatcataactcataattaatgcaacgctctttggaatcaaactttcacaaatcaaatacggttacccatttttcatggaggaatgaattctggacacttttcaaaaattgggatttttttttttcttttttgctaaataaaaaaagttttt

SEQ ID NO: 20574 - DNA, 797 bp, Arabidopsis thaliana landsberg
tccatgttccaattaacattaatgatcttgacatgaacatagatagaataacaaaataactggaacatggatataacaaaatattatcccaaaaccatgtaaagcaatagcaaaactacccaagtgattcaggggtaaacaaggtaatcaggataaacacactagggtgacctattgggtcccatcaaaattaaacctatgcattgaatagtgataataaagaatattattgggtaaacaaaagtgatcaagggcacaacttgccttcaatgagttcctgctcagctacgtctatctgctggtcaccaggatccacagtaataggttcttctactcgccacaatacaaacaagcacagtgtatagagaaaattaacatcacaccaaacatgtaaacaaaatacacagtaatattctacacattaaaatgaaatcctaggaacaggaatcataatttttggagttatagaatttaagttatgaattttcaaaggttttatgtgtttaaaataggattaagtgtgggattaattttcttactggtgtcatgataaaacagagacactaagtgctagagaataaaattacaaaattttaggaactggaatggataattttggatatcatatgaattttctatgaattttataagttttaacaattctttttctcattaaaatcattttcagattttatttatccatttattatgaattctggactgggcgcactattacagaggaagacagggggctctgggcaagattcgccagacacagggaacaacagccctagact

SEQ ID NO: 20575 - DNA, 2528 bp, Arabidopsis thaliana landsberg
ggatgttacagcgtctctgtgtacagagaaatcatcatcagctaattacgcttgttaatcaatcctataacgtaagcttgtatgtggtgaagactacgaagatgtatggcctgagattcagatcatgcatcatctctctgagcatcctaatgttgttagaatcaagggtacttatgaagactctggttttgttcacattgttatggaagtttgtgaaggtggtgagctttttgatcggattgttcctaaagggtgttttagtgaacgtgaagctgctaagttgattaagactattcttggtgttgttgaggcttgtcattctcttggtgttatgcatagagatcttaagcctgagaatttcttgtttgatagtcccagtgatgatgctaagcttaaagctacagactttggtttgtctgtcttctacaagccaggttcgttgttgattcttctcttttgattggaatcttatggtttttgtctttgttggttggttcaaggaaatgttttgatttggtttcttgattcggatttgctgcttgagcattgttagggaaagattgaattttgttatatctggttttgacatttagttgatatatatggatgtgttgattgtgcaaggttttgttatatatgtaacatatgcttatggttatgaagcgatcttatcagattttattcgattcattgtctagattatgttgagaaatgtcttgtttggtgttgaaaatcggtttcatgatatgttatctgtagaatcatttgttgaatggtcatttccaatttgctgcttgagcattgttagagaaccaataattttctgtggctagatcttactgaatcttttcttgcaagatttacatagttttgttgtgttacttatgcttatgtaatgatgctatcagagctacattgtgtccgactaatttcagtgcttaacaaaattttcaattgtgtgggtttgcatcttcagggcagtatctgtatgatgtagttggaagtccgtattatgttgcacctgaggttctgaagaaatgttatggaccagagatagacgtgtggagcgccggtgttatcttgtacatcttactaagtggggttcctcctttttgggcaggtaagtttgtgaaagctagtaccgttgttactactgaatcaagtatattgcttatgtgatttaagcatccatgagtaatttgtttgcagaaaccgagtcaggaatctttaggcagatattgcaagggaagatagattttaaatctgatccgtggcctactatctcagaaggtgctaaagatttgatttacaaaatgctcgataggagccccaagaaacgtatttctgcacatgaagcattgtgtaagttgttacttatgattgttttcctctctgctacatgtattttgttgttcatttctgtaagatataagaattgagttttcctctgatgatattattaggtcacccttggattgttgatgaacatgctgcaccagacaagcctctcgacccagcagtcttgtcgcgacttaagcagttctcgcaaatgaataaaatcaagaaaatggccttacgagtaagaaagttgtagccctttagtctccactctcattgcttattttcaagaactgatttccctgttaggaagatcgactaagataacacattttaagaactattttcaggaaatgaataaacttaagtaaatggccttacaagttggaaagctatagttctttaaactctcaatgccattgcttatattcaagaactgatttcccggtttaggtaatcgcggagagactctcggaggaagagattggtggtctgaaggaattgttcaaaatgatagatacagacaacagtggaacaatcacctttgaagagcttaaagcaggtctaaagagagttggatctgaattgatggaatcagaaatcaagtctcttatggatgcggtatgaaagaaccaaaacaaactctctttcctcttttcaaaaactttcgttaaacatcctctgtgtgttgtggtcacaggctgatatcgacaacagtggtacaatagactacggagaattcctagcagcaacattacacatgaacaagatggagagagaggagaatctggtggctgcattttcatactttgacaaagacggaagcggttatatcaccatcgatgagcttcagtcagcttgcacagagtttggtctatgtgatacacctctggacgacatgatcaaggagattgatcttgacaatgtaaaccactcttctttttcttcttctctttgtttacctccttcttcaatgtaactctattataaccgcgagcttttgaattgcgtaggacgggaagatcgatttctcggagtttacagcaatgatgaggaaaggagatggagttgggagaagcagaaccatgatgaagaacttgaacttcaacattgctgatgcttttggagttgatggtgaaaaatctgatgactgactcatcattctttcacaagttctgtttttttcttta

SEQ ID NO: 20576 - DNA, 1395 bp, Arabidopsis thaliana landsberg
aggcccattattatgtaaataagcccaacttttaatgagcctttgactcattcgtcttctatttttccatttagttctttttttaagagttatttccttttgtcacaagaataccttgccgacatgaaacaaatttatttgtatatatctatattcttagggttagttagtctttgaaacagagttaacctagcccgatctaaaacctaaatcaatggagtcaggaacgaagaagaagaagatagattactacacagaagatctcgtggtaaatatattagcgagattaccactaaagagcatcacagctttcaccttggtttgcaaggaatggaaatcaatagtcgaatctcaatatctacacgaactttttatgtctcatcatcaagactcgcatccttcatggtcactcatgtgcagagaaactcataaagaagtcattgctcactacagatgcgacacttggggacttacacaatctttaggctcttacatatcttctttcctaacacaccaattcggaattcacaaggaaaaggttactgtcgaggcttacactgatgtcggattgattcttgttagtttgaaacaaacctactatgttgctaatccaatttcacgacaatgtgttgaaatacctcctcttcctcgtctgcctcgaagagctgatatattcaaaccttctggacttgcaacaagaatagaaaacggcgtagttttaggttacaaagttgttctgatgaaagataccaccgataccgacgacattagcttactcatatattcatctgagacaggcctatggagtttcaacactgtccaatctccttatcttttgaagcgtgttgcttggttcaatcctgtcagcttgaatggaaacctttactggctttgctacaacaactatcgtgatcaccttgttgtatcccacaatttatatgctactggtacggaatctgatcagtgcagagttatagagttccctcatctagaaaacgatgtgtattttagaagagctttcacaacatctcaaggatctcttatgtatatgaaaattatcaacgaagaaaaagatgatggaagtttagggcttaagttatgtgtatggaggttaaagagtggggaatgggaaatagtatctgaaatatctccggcttgtatcaagagcggattagattactttccgttggcgataaaccctttcgatgctaataaaatgtatctgtggagtgagatgcataaatgtttaatatatactagcttgctcaaaggcaagttccggcgacacaagaagttggaatataatagcgatggccgcattatgagctttgctggagactggagcccgtatgaacacctctttaacccatgtctctccaggtctgctctcccgca

SEQ ID NO: 20577 - DNA, 881 bp, Arabidopsis thaliana landsberg
cgatattgatattattcatgatccaacaattgaaaccaacagtttctacctgatatgcagtgacttataatacatacctgttaaaagagttgctacctcctcgcattcacgtttattgtagaaccaaatgccatttacttcttgagatgcattacggtaaagtaaatatggaccttgtacttcatactcaaaatctcccaggagattctccaccagattatctatccagacaaatacagcaacacactgatgattactaatactgaatccttaaataagaacttgcaatatattactaaatctaaaccttttctagacacatgacacacaccaactttatttgaataaatcctgacctgtattacgacgattcatcacaataaactgaaatcgaggttgtgtacttctgaaagaaacaaaaaaaaggatccaatcagatttgagaagacgattaaagataagatacacatagttaaagatcgaaagtagtaaccttttgacaacaaacaaagatccttcaacgtccttacgactctgaatgacaaaagacagatcaatcattaggtagggaagcaaacatcaaattatgtaatcgaagattgattgagactaacccattggctgagctcaatgttgaattcatagaaagtgacatgagcggctgtgatgaggatttcctcgatgtatggatcgatccgctggagaactgtgagattgaggagcctcgtactgttttggtccagatttgggattatcttcccgttttgagacatcttttataaaatcaaagatcagaattttgggaaatctggattcgattttaccctaatcggaagaaccctagaattctgatttaaggtagctgagagatttggggacgg

SEQ ID NO: 20578 - DNA, 1497 bp, Arabidopsis thaliana landsberg
  unsure (1)..(1497): unsure at all n locations
tgacttgtaaacattgttttgactgtatcctcatatatcactgacgtcgcaagccttgttttattagattaaggagcctttgattcttaattaggttcattgtctagcaagctaatttgtaactcagtgaccttactgagtctcaggagtatcctgcatatttatggtgtctggagccaattagaaaagttttagtagctattggtagttttaagagtagtctgagaactgaagatgtgtttgcaggtagttctagacttggatgagacgttagtttgtgcatatgagacgtcgagtttacccgctgctttacgcaatcaagcaattgaagcgggattaaagtggtttgagctggagtgcttatcaacagacaaggtttctttcagaacatgctcttctcaagttaattcactctttgttgattttctgtatcatgacataagtcactcttttttattaaggaatatgatgggaagcctaagatcaattatgtcacggtgtttgagcgtcctggattgcacgagttcctagagcaactcagcgagtttgcagatcttattctgtttacagctggtcttgaaggtctcttgatttacttattagtgttattatgttctattttcaaattaatgctcaactacataaccacaacttcctaaccattgacaattcatgcttcatgtctgcaggatatgcgaggccgcttgtggataggatagataccaggaaagtgctcaccaaccgactttatcgaccctcaacagtcagcacgtaagttatcctgaattgggttgctctgttttagtttttaagaaactagtttgtggtaaggttactgagatcttataaattgtgtgtggttcctaatcaggcaataccgagatcacgtgaaggatctgttaagcacattaaagaatatgtgtaggacagtaattgttgacaacaatcctttcagctttttgttgcaaccatcaaatggaattccatgtattgcattttccgcagggcagccaaatgatactcaggtctctattagttgttactcttctcatacaattttcaacccttaagattattattaactcttggaatctaatcggattatcaaactttgaagctcttggatgttattctaccgcttctgaagcaactgtcagaggaagacgatgtacgaccgacactttatgatcggttccgcatgcctgaatggtttgagaagcaaggcataccaccttnnnnnnnnnnnnnnnnnnnnnttaagcggaacgtaaccgaattatcagaggtctctggtccacacaaaaagggcaaaggacttgtttggtacagtagtttcagcaatgaaagccacaggagaaggaaggcaccattcgtatgggttataatctatggtagattccttttaaacgataaactcttcacacattcttngatttcaagtaaaatnctgtagctttctctggtaattttggtaatgatcaagcattcttttccttt

SEQ ID NO: 20579 - DNA, 765 bp, Arabidopsis thaliana landsberg
catggttgctgttgttgccagtctagagattatccgccgtgggatatggaatttcttcaggtgagaaaacataagttactgcaacttttcttcaccatgtattagcgctatttaccgtcacataacatataatataactttcttggggatttgttgatgcaaaaaacaggttagagaatgagcatttgaacaatgttgggaagtatcgagcatttaagacggttccattaccgtttaactacgacgaggatgacgataaaggcaactagttttctcggtttctagtcttagattctgtaaagactgattcatccacaacgagtaggaggaagatggactagactaaagctggttcattgagatcaaggagatgtttcactcaggataacggatattcgctagattagccatagtaattagggtcactgatttgcacttaaaatttgtttcattgagagaaacatgaaattcatgggcatcaacaaagcaatgacttaaaaaccaaattctcccacaataacaaaagtaataatcagaaacattcaaagtatcagaataacttaaccaaataaattctaataatccctcactttcccttggtttcttcttcttcttccttcttcttcgccgcagcggctgcctcctccccttgttccaactcctttaacgactgagtccgcatctctttctgcattgctagaaacggtccgtagtaatcgacgttagtatacatacatgtaatcagcttcaatctagcatctcgac

SEQ ID NO: 20580 - DNA, 631 bp, Arabidopsis thaliana landsberg
taatacaaaaataacaatttggtaatgcaataaagcttgtgagagtaagttaattgtaaagttaattattttctgtggatgcatgaccatattaagttttcttaggctactacaatatttttcaaggacagtggaacaccattttccatttttacatccatatatttatttataaaccatttaaaactacttaatatgcatcagaaaagttaaatcactaacttaatcatacatgcaccacaattcatgaaattattaccagtcactaagtatcacacagagggtctactgtaacaatttcaatccatttggagcactagagctacagatccaaaaataacaagcaaatcaatcttcttttctcgatttaacatgttttaattaacacaccaagaaaacagtgaacgacctgtaaattttatatttttcttagatggagtatgacaacatctaactaacaaaacatgtttaatcatttttggatttttataattaaaactacagagagaagcaagttcatttgttttgtaaccagtttttaaagacgaatttatacagaaaaacttttccactaaaacatgccaacctatagatcgaatagttagagcatttcataagaaagctaacaaac

SEQ ID NO: 20581 - DNA, 648 bp, Arabidopsis thaliana landsberg
ttgtattaaatcagaaaagtacgtttctcggatttagttgatgcaataaggtgccaaactggtggtaaaccatatacatatcagcatttcacatgagccatatgtgtattcattaggtgccgtatgcagctagtccttctaaagcacgccatagaagtaatacgtatttaattatgtatatcgatatatgtaatgccttaaactatgtgatgtgtccaatcacgtattatcatctataatatgcgtttgttccttttgcatttagtagacactgagattcgcatgatacgttaaaccgaatctcataactctatatgaatccaaggtccacatactcactagtcactacaattgactagtttatggtagctgaaattgatcacaacgtacctaattccgatttctatatctagtgtacgtattgatattcttaatttagtaatagttttggaaaatataatctgagtttagtatattcgttgtctttgttacttttaaattttaataatagtctaaatagatctatattttatcgaaaggtctcgttgtagtggaagcatgtgagtacggaatactgattaaataaaatacctgttaagtaaagattgcagaatttccgacttgaggaatatcaaactgtataagctg

SEQ ID NO: 20582 - DNA, 1434 bp, Arabidopsis thaliana landsberg
catagtatccataaatgttaagaaatatgtataaatattgttatggaaattgattttttcaacgtggtgaggtttttagttgttaatgtatatattacaaaccaagaaatagcacttaaacacaaacacaagcttgaagcatgcatccctcaataagataatttagcaacgtacatgacaatattcaagtatagaacaataggtagataggttcaacgggagctatttattggtgtggtcttgatcaaacccgtgaatgcgcatcagagatactcagtagtggatacaattaagaattcaacaccgatatatatctgatcattcaccagaaatcccctagaagctttgtggagttcctccagcggcaagaacttggtacgtccccatgagcataatcttggatgaaccggatcataaagaaaccaatctaggcagtctttatcaaacatgtgatcattagtagtagcaaacggcttattatatagatgatatatgcatatagaaaatgtaaagcttagaaaacaaaaggataattacgtatacatacataccaatttcgaaatgattgcgatggagttggtccaacactctcaatttatagaccgcgaatgttctcccctttggaccattatttgtgacgtaattagacgcattcaaatacaaagacaacgagtttcctttcccatctccggttcctcttgggtacattactagtttcctggttcatatatatgggaaacatgtgcgcatatgtataagataaacatatttttaccattgttttgtatattttttttaatgtaacacattattaattttattctaatattttgaataagtgagtctatttagataatttttataaaaaattcatgaccattcaatcaaaacaagtcacaagatgagagtatatataagatttgcataccatctccgtggtccaaccgtgaactcgtaagacgaatgctcttcaccattgaaggaggaaaacttcgtgatcttccaggtgaatctggaattgttccgagccacctctatcagtttaaagcgttctgctgtccccatggttcgagggataccaataacggggaagtttggtatgacttcttcgcttatctcggcatagaaaaccgctttgtcgttcacaagaaacctctcctttaactgcgtgtgtgttatgaatttgactaccccttgagcaggttgtttttcgttgtgacaccccaccgagactgatacaaaacatatatttcaaattatcaaaataatacttgtgaaatatttgggtatatatatttatatatgtacacacacaaaaacataccgtagaaatattcaggtccagtctgagggagtaggccgattttgaagttgaatttgacttcccaattaggcccggtacacttttcatctatgattcatacagcaacagat

SEQ ID NO: 20583 - DNA, 852 bp, Arabidopsis thaliana landsberg
ggtttataggagttgcttggaaaccctttgatgcattggctaccttgaaatccattccttttatagatacttctggtgaagtatcaaatataatttacaaaattgcttagccctgcctagaggtaaatcttgcggatagagtttgtcctttgcacttatgcctagctcaggggttatcctaaggaaggatgacttctgcgtgcaagaatattttcattgggagcatggtgggatcttacttcaaagtttcctctaaggctcttttcatcctaggggacacaaacaatcctaagggtggaagtacttaaatcgagacttgggctaggaacaggtgatgttctacccaggttgattaaggattatagagaatgtagggctgttgacataggaccttttaactggccacatgcctcgtcatgggtaagctttgcctcgggcagactaataccagaaaggccaacacacaatgggagtggagagatggcgagagtagcatgtaccctccgtggcaagaggctggacggtggtgtatctgtgctctcggttggcgtgaacccggcctggtcttaagaaacccggtggtgagttgacatatgcaagggttaagtgctacatatatcgtgtggttggagaaccagctggatattaatcgattcggatcaccgttacttctcgaatatgaagacttggtcactgccctacacgtagcattccagtgaactaaaagggttgataaaagacgactagtataagccaagtgcttgaactagggtagaaagaactctagctgcaggtaatgacttaacttgataataaacctggatttttaaggatcactgttagtaaggggta

SEQ ID NO: 20584 - DNA, 1009 bp, Arabidopsis thaliana landsberg
cattaccttcacatgtaatcttaatgggccgaaaataccaaggtatttgatcgcacgaggacttagcgcaaagatagagcagatattgtaactagagtctccaaaatgaagctagatcgtctcatttgggacatcaagaacaataatgtctttggtccttcaagagcaggtaccactcattcttttatatttatctttctatcactattataatttacttttataattaatcaaaaatttataagtattttactttgcagtgctttacacgatcgaatttcagaaaagaggtttaccgcatgcccatatacttctcttcctagagaaggaagccaaaattccaactaccgcagacgttgacaagtttagatgggctgaaattccagataaatacacacatccgattcttcacgaagttgtcaaagagatgatgatacatggtccatgtggacttgccaacaaaaattcaccatgcatggagaaaggaaaatgcagtaaaaagtttccaaaggattttacgagcagcacacacatcaataaagatggttttcctatctacaaaagaagagatgatgggagatttgttgagaaaaatgggattcttcttgacaaccgttttgtcataccttacaatccaacactactgctcaagtatcaagcccatataaacgtggaatgggttagccaaagcaagatagtcaagtatttatttaaatacatcaacaaagggaatgacaaagtcacagctcagaatttaatagcaagggtacccttggggggtttttcccccccaaaaaaaaaaaaaaattttggggggaaaaaaaaaaaatttttccccaaaaaaaaaaagggcgccccccgggggggggttttttgggggggggtttttaaattttttgggaaaaaaccctttttggggggccaaaaggggggtttaaaaaattttttaaatttttttcctttgggttttttaaaaacccaatttttcccccaacccaattaaaaaaaa

SEQ ID NO: 20585 - DNA, 2075 bp, Arabidopsis thaliana landsberg
  unsure (1)..(2075): unsure at all n locations
ttctatttccaatgtttttcttgtagattcattagattacaatttgctttctgtctctcaactgtgcaaaatgggttacaactgtctttttactgatgtaggtgtaactgtctttagaagaagtgatgattcaatagcatttaagggggtgttagagggtcagctatacttagtagattttgatggagctgaactcaacacgtgcttaattgctaagactaacataggttggctctggcaccgccgactagcccatgttgggatgaagaatcttcataagcttctaaagggagagcacattttaggactaaccaatgttcattttgagaaagacaggatttgtagcgcatgccaagcaggaaagcaagttggtgcccatcatccacacaagaacatcatgacgactgacaggccactggagctcctacacatggatctattcggcccgattgcttacataagcatcggcgggagtaagtactgtctagtaattgtggatgattattctcgcttcacttgggtattctttttgcaggaaaaatctcaaacccaagagaccttaaagggattcttgagacgggctcaaaatgagttcggattgagatcaaaaagattagaagcgacaacgagacgaagttcaagaactctcaaattgaaggctttcttgaggaggagggcatcaagcatgagttctcttctccctacacaccacaacaaaatggtgtagtggagagggaagaatagaactctacttgacatggcgaggaccatgcttgatgagtacaagacttcggaccggttttgggcggaagcaatcaacaccgncttgtacgccatcaaccgtctctaccttcaccgaatcctcaagaagacatcctatgaactcctaaccggtaaaaagcccaatgtttcatatttcagagtctttggtagcaaatgttttattcttgttaagagaggtagaaaatctaaatttgctcctaaggctgtagaaggctttttactaggatatgattcaaacacaagggcatatagagtctttaacaagtccactggattagttgaagtttcttgtgacattgtgtttgatgagactaacgactctcaagtagaacaagttgatcttgatgagctagatgatgaaaaggctccatgcgtcgcactaagaaacatgtccattggggatgtgtgtcctaagaaatctgaagagcctctacacacacaagatcaaccatcttcctccatgcaagcatctccaccaactcaagatgaggatcaagctcaagaggatgaaaatgaagatcaagaagatgagccacctcaagaggaagacaatgatcaagggggagatgctaatgatcaagacaaggaagatgatgagggtccaagaccgccacacccaagagtccaccaagcaattcaataagatcaccccgtgaacaccatcctcggcgacattcataagggggtaactactcgatctcgtgttgctcatttttgtgaacattactcttttgttcctccattgagccacacagagtagaggaagctctccaagattcggattgggtgttggcgatgcaagaggagctcaacaatttcacgaggaatgaggtatggcatttagttccacgtcctaaccaaaatgttgtaggaaccaaatgggtcttccgcaacaagcaagatgagcatggtgtggtgacaaggaacaaagctcgactcgtggccaaagggtattcacaagtcgaaggtttggattttggtgaaacctatgcacccgtagctaggcttgagtcaattcgcatattattggcctatgctacttaccatggctttaagctctatcaaatggacgtaaaaagtgccttcctcaatggaccgatcaaggaagaggtctatgttgagcaacctcccggctttgaagacagtgagtaccctaaccatgtctataggctctctaaggcgctttatgggctcaagcaagccccaagagcatggtatgaatgcctaagagatttccttattgctaatggcttcaaagttggcaaggccgatcctacactctttactaaaac

SEQ ID NO: 20586 - DNA, 644 bp, Arabidopsis thaliana landsberg
atgaggctgcagtatataaacccacaacagtgacatacaaatgagcattataccttttgacaaaggggtgggaggacttaacacgacacgtccaatgcccttaaggttagagttccgtttaactgagctagggcctaacatagatctctcattagtccaattggcagtttctctttcttcggggcctgaatcagaagatcaatagaataagcaaaacatggattctgttaagaagaaaataagatcctccagtttttatatggtctaggataagaattaagaagcatactgatgttatggcctaacactggtgaatcttctcttgaaccatctgagtctcgctcatcagacgacggatcagacagaactaaatcttcatttggctcaggagaactttctcttctgaaagaataatctcttttcttctccaagaaatcctgaaaataaataagtagacacaaaagtcaaagaggagtatattaagtcaatatgcaacttaagtatagataaagccgcttcagtttatgaaggttacaggcgatctcttttctgtatctgacgcttggcctgatgtccattgagagttttccttagtaccgaagctaaatattggtgcttccgtcttatctaatgtgagactaata

SEQ ID NO: 20587 - DNA, 514 bp, Arabidopsis thaliana landsberg
tgaatttgtacaatttgatgtttcacctctttcctttttttactacgacctttatattgttttggaaaccgttgcaacattaggaaaagcctgccagaagatagacgtacaaggacactaaattaagctccaatgcatgatcatattaaaccgtacgaaaatgtactctgactttagcacaccaagagaatctagcctagtcatgaattagaggagaacaagatgactcgtacctcaacggtgactcttagcaaaacaatttcaaatgtcaaatatagtacatattcaagtggcgacgacagatttaccttccaccgtaaagtaaaaatccaagggcgacgaacaatgaaacacctacaattgtatttataagagagttgagacaagtaaaataccatatattatatagcacgacaaatgaagtaaattacctgctaagaacatcttagatagaattagcataactccaccaggcttccacattcaaagcaactaaagagatatctgaaagtta

SEQ ID NO: 20588 - DNA, 634 bp, Arabidopsis thaliana landsberg
aagctgctgaatactttgaccaagagttggcttctaatggtgatatagataacaatccagtggttgacttaggtgagattgcaaagggtgaggacaagagagaagatgagtttctagccaagctagcagatgcagaaacccctttatatcctgattgtttaaaccacaacaagctatcggcagttgtgtctctctttaggcttaagaccaagaatggatggtctgacaagagctttgatgagcttcttgagacgctgcccaaaatgttgcccaaggacaatgtgcttcacacatcattgtatgatgtgaagaagtttttgaagagctttgatatgggatatcaaaagattcatgtgtgtgtaaatgactgctgtctttttagaaagaagtacaagaagctggaaaattgtcccaaatgcaatgcttcaaggtggaagattaatatgcagacgggtgaagtcaagaaaggtgtgccacagaaagtattacggtacttcccaataatcccgcggctgaagacaatgtttagaacagaggaaatggcaaaagacttaagatggcatttcagtaacaagtctagtgatggcaaacttcgtcatcctgtagattctgttacatgggaaaagatgaatga

SEQ ID NO: 20589 - DNA, 1497 bp, Arabidopsis thaliana landsberg
aacatttctttgttggctatttacctaagaatgacattgcagttgtcaacaaaaaccgttgcttcgggatggttttgtttaaacgcatgaccagctggctcttcatactcgatcgcccactttgtattagatacaccttgttatacccaaaacatgcataagtgtttagaagataaaagtatatgcatgacatgagaatataaatacataccagccttttctagtccatgagatagaccaccacatccagcaaaaatatctagtgtagctagacgcatctctttaggtacctcatcaggcttcataagaattccagaactagttccagtctctactcccttccccttcttttctcttagaagtgtttcatctttaatagtagagaacttcaacttcatattcgctggaaactgttacaagacatttcaagaaacagttcaacttcattaagaaacaaaaaatattcataagaaagaaaatattaagtagaacaaaaataattaaaatatttacctgcttgagataaccagtagaggaatcatagaaaacttcacagaagaagatatgatctaatattggatactcacgacataggggcatatcatttttcttccttacttcacattttccttgtagagcctcaggaggaagaatatatgtgtcatggctataatacaactaaaaatttgcaaaaagaaaaagaaaaaaaggagtataagataagcttttaaacattaccagaaatgttacgtaagaatatagtaaaaacagttgttacctcttggatgtctgaagcataagccttttcttcagaaatgtcctcgggcctataaaaccttgtcagtttaacctgaaatgaagcattactagcttttctagattcttctagaacaataacatccagcaattggcaaacaacaaaagcttttaacccaacgttccgaccacacttaagagttgttcttctactagtacccttcttcaatccatcttttgttatgtagttggggagtacatagacaaaatctccattatgatactctatcccattggagagaaatcctgtctttgaatcattgagtttagtttttgacctttcctcttcattctctcttatcttacatgaactgcagaatccagaacctagacccatatcatttcttggaagactaaagaatccacctctctcaggtgagtacaaacttttgcagtagtagtctgttggcaaaccattagtttttctttcttctgctcttgcccggtcaagcttatccacatcgatgttctctttcctgtattgatgcccccacagccttgatcgaatctcgagactaactgttccttttatgtccttaagctggacagtaagacattcattagtcaagaacagttccctctcgttagcagccattcctagaacagtctcagatcctctttgtaagagtttcccatgtagcatcttgctgtggtttgaactctcgaacatgaactccgcaa

SEQ ID NO: 20590 - DNA, 1089 bp, Arabidopsis thaliana landsberg
  unsure (1)..(1089): unsure at all n locations
tgaagaacatatgagattccataaagatccaaatacctggacgaagaagaaaatactcaagaggattagtttctcatattccaatgacatgccatatgagtttgcctagttgtttatgtcaaccacgagctttcccatttccaagtgtaagctcaagatcctccatacccacatcatgtatcctctctccttcccagggcttaacttggctattctcaaatttaannnnnnnnnnnnnnnnnnnnnnnnnnnnnnnnncagtatttggagacatctgctgaggcgcaggtttcacaagattgaaggtaggagaggttggcaccatagaggcagagaatggctgttgttgtgcaaacttttgaaagcttattcaatgaccagaatcaacagtggaagagtcagactcatcacattcaggtatagtagccggagcatggaactggcgatgatgagtaggactggcaggtgcagacaccgcataaaacgggtagttcaaagaagtcattgactgtttagcagccatggacatggattgtttggtaaaagattcccaagtaggcaatggtttggagtttctagaagttggggatgacactggtggagtgacaggagcactgtttgagattctaagtggaggaagcgatgaaggaataccaccattcctgaggaaagggaagattgtggagatattgtgtggatcaccaactcgagaaggactcgggaatgaagaagaggaaggactgacttggtaagataagatggggctatcaaaagtggaagaaagaggactttggttatgggaagagtaaggagttgctcgagaagatgatccaaccatgtcaccaggtagaggcttgcgtccctgttgctcatagaacaataccaaaaacatcacaatgtcacaatcaatcaaaagctaaaggagagatctaaatatagctaccaagagaaagtaaagctaattcggctctcaaattagtaagaagaaccctaaaggtcactttcttcgcaaggaatctcgatccaattttagaataaaactgagcttcctcagctaaaaacccccaatctcataccccagaaaaatcc

SEQ ID NO: 20591 - DNA, 1120 bp, Arabidopsis thaliana landsberg
caaactttggctcgacgcagcgaacacaaggaaccgacgcttcggtgacagtccagaccgtgctaacaacaacatggagagcgaagatgctgatccggacaaagatggagttgatcctgtgaatgaggatgctgatgaagctcttgatggtgaggatgaagcaggtggtactaccttttaagtgatctactctttttatggtttgattattgtttaattatggttacaagacattaaccttgtttaattaccctcgtttaattatgcttttcatcttattatcaagacttgtgtgtaagatataatcaactattttgatgtatgatattaattatgcctttctgaattcctgtttatacatttgaattcttttaatgcaaaacgaattaatacatcaattagaatttattaaaacggaattagtcattttgataagttggcaacaaatacagaaagtatagttaattgtaactaataacaccaaaatagtcgacataagttgttgctaaattgcaactaaagcatgtggtagtttgtaaataataagtgacaagaatatcgttagccttgttattaaatttttgtgtctacatcgtaacatgtgttacaagaagatttgttgcacataattacggttagtctgaaggtaataaattgttgcaatttacttcaatgatcttgtgacagtttgtaagaggtacttacagtgtatcttgtaacaatttgtatcaagtttgttattaacatatattgtctcttccttgtatcattttatgacatgcttttttgttgcattttatatcagttttgttattacatttctgtaactaagtggaaaggatacttactatatactttttgctatttggtagcaattagtttcgaaaattctgaagataaatgttactattgtgcttcaattattttagtggtaagtggtaataaagagtatcaaagtatgtccacgatatttgtaacaaattcccatgagtttttagtcttctttttgtaagtttataacaaggttttttgtggctacgttgtggcaaatttcttaccgtttgccacacaaatattttgcgtcaagaacattgttacatattttattttgatgcatttc

SEQ ID NO: 20592 - DNA, 675 bp, Arabidopsis thaliana landsberg
ttaaaatagtcacaatcgcaaagaatgcacatctccagaaaattatcgtctgtgaattctgaaaaatcgtaaggttttgcttcttctttagtttctttttcgttgtctttatttttcttgctactatgaaaccgcttcaataagtctatcatttcgagttcgagcaattcaaagtctttactggcgaaaataatttgtgatcacacaaaagtttaaagtggtagtaaaaattaatgttatgtctacatgagaaaaaactttaaaataataataattgataagtgtattaaagaacttactcttcaacatctaaatggtatgaggtcaatgttaatagtgagaaccgcataaacgcttttatctttattattagccaaatatacaagctgtgagcagcaacgataaactcaatattcggatacttttttttttaaaccttcaacgggagaaaaaagaaaggttaataaaaaattagaaagaagtgaaaattcttaaaaataattatttaccgtaaatgttacctcaatgaaaacatgtatcacataaggcgtgatgtgtatatgactttgaaagatcttagtagcattcttctctttgtcctttctcttagggtcatcgggagccataagttgtgctgatgcgtcaagatcctttacgtattctagagtttttatt

SEQ ID NO: 20593 - DNA, 426 bp, Arabidopsis thaliana landsberg
tcttaaacaagtttttacactaaacatactattagctcagacaagccaagtttgaagatttaacagcaaagttttaatctttcactgcgatacagaagaggcgtagggctcaacactctacagacatggccagggatcataataagacttggttcatgaatatcaaggcatcaatgaaaaggtatgattgcctgaattttttcttatgtgtcaggatatattacttacctcaagaatctctatttctttcatctagagtacaaaaaatcaatgatctataacgaaggacttttacttaattcggaacaacaatgactctccatcctaggcttgtataaattgaccatgaatgcctaaaagctggataggccgttgagttactcaccataatgagacagggtaatcccatatcctacttaatcttgc

SEQ ID NO: 20594 - DNA, 1343 bp, Arabidopsis thaliana landsberg
gagttgtacggatcaatacgcttacgtctcagcaatccagccaagcatatgtgactacagagatctagacctggacagaacaaggacaactcaaagtctaacttcatagaagctaaaatatggggagctaattatttcaaagacaatttcaacagattggtgaggattaaatcaaaggttgatccagataacttcttcagacacgagcagagtatcccaactctgcccgtatgaagctaagctcatgacaaccacacaataccatatgatttgagtaaccaactaggtgttgttatccgattgaaccgtgttttgcaaatttaattacatgtcaaaaaaatatgaatccgtatgaaatcttttaacgtaattgcatttttttgtcaacttaatggacggtaatccacaaaacaagctaaaacaaagtcaacattttcaagacatgacaaaaattgcctaactgtcattatccgccgattcgtttgactacgcaacatgccaacatgtaaattaatgtaggcatagtcgtcgaatcgtcattaagcaacgacggtcatattatggagaaacaaaataatcgtaattagtactctctctatttcatattagttgtatttaaggtttttacacacaaatcaagaaaacataaaaatctcatttaataaaaacatcgtttattattaccaattcaactaataaaagaatagataattaaatataattggttaaaaaatattaaatacatttattatttgcataaaaatttaaaaacaacatttaaattgaaaaaaataaaaacccttaaactacatttatatagaaacagagggagtattattaacgcaaccaaatttctaattagacttgactaatttaaggagtctcctttgatcacaatattttatcttcatataaagacatttcttcattgaaccaaaacaaatattcaattccatcatgtgaaaaaataattgtaattagttgtaaactcaaccaccttatcttatcttataaaattcatactagtgtctaagcacgttacttccatattatattgtcatcgactaatcaaatgaatcttgttttgacaatcctttataagtatataaacacattttcttcattgacgctaaaaagaataaaaacacaaaactcatccattttgcttctctcttgcatattcgctgctaggatgggaaattcaaaaccactccctacaatttcttgtatttcagtttttgctctatatttttcattctacacaataacactaacttattcaacctccctacaagatgatttcatcaaatgtctttaccgaaacgcaaatgtccgttatacac

SEQ ID NO: 20595 - DNA, 554 bp, Arabidopsis thaliana landsberg
attccttagtagatatgactctccaatacaaccttctggtcttgctggatttcttacaaagtcttttagaactttcatgtacctacaaagtccaaagaaaaagatatcagaatgcagaaaaagatatcagaatgcataagagttcaaataatgtttacctttcgaatggatacatccatctaaaaatggactggtcctccaagtcttgcttctcttcctagatgtactgtcaaatgaaccatgatatcaaagaagctgagaggaaaaaaccgttcaaacatacacagtgtttccacaacttcacgttccattagtgagataatctctttgtcaatgactctctggcacaaatggttgaagaatgcacataagcggaatattgctgtcctaggaccttttggtaatagccctcttagtgcaataggaagaagctgctgcatcaacacgtgaaagtcatgagacttgagtcctgtgatcttaaaatcctctaatgatacaccccttcatatattagaacaatatccatctggtcctttaaaatcaaataatctttt

SEQ ID NO: 20596 - DNA, 692 bp, Arabidopsis thaliana landsberg
attctcgtacccacaaaaccatttgttagggctgaaagagtaaaagaaccccattagagtatactgttggcttttagctagcaaatgcttttaccaatatttttactattgcttttcaaaattttgaagttaagggtgttttgataatagttttaatatttggtattgtacaatgatagtattttaaattgtttttttaaaaaaaaaagattaatagaaaaatgaaaaatataggttctgaatagaaacgtgcgattcaactgcagataaaatgcggtgcacttcaaatagtacatacacatatatatgcagagaattttgttattatttgaaccgcaccgcatagtgcgatgtggttactattccaaaccataccattttaattttagaaaactttatagttattacaatgcaaacttacatgacataaacatgtatgaaaaatataaatattttatcatttggccacttacataacactatattaccgcctcttagtaccgcttgggtctcttatataagagacgactcttaagtaataataacccaattctacatttattatttaacacaaataatatacttaagagttcaactcagagagcccactattgtggatgctaccatcgtatcaagcaaccgattctttactttcaaaaatagattctattttaccggaacttttcaatgct

SEQ ID NO: 20597 - DNA, 893 bp, Arabidopsis thaliana landsberg
cattctagtaaccatcgtaagatataatttaccatcgtattttaattaggataatattagaggatgaccaaatttgacagtattattaataaaatagcctttgtgcagaaaagttgggtaaataatattttttaatcctgcgaaataactattttactttttatagatgagagaaactctttctttccgacaatagctgttatatgtagggaacaaaagacaatacgaaataatgattacaccgctacttcttaaaaaatcatgcaatattagaccactacttattaaaatcacacgcaatatctcttataccttaaaaatgtatacgtaaaagaaaacttagttaaaagatagccatttagaaacagttgtgattgagtatagaaatattgcataagatatttaaggacatgctatttatttttattacattaaaatgtaggtttattggtttgacaatatggtaaatgagtttcaacagagataagcaaaccacatatgtgttatttatagattacatgtgattgtacaaatttgcatgtgattataaaaaaaaacataaatcatgaatcagtaacttacttgtgattttagtaaaaaacatggattattagtaaaatgcacattatcttttaaaaaatattattttatcaaaaaatacaaacgttttaggaaaatatacatatcaaatagaaaaatagcatgaattattcaaaaattacatgctatcgtttgaattgagacatacagatcattgtaattttagtaaagaacaagtattatttaaaagaaactttgaaaaatacaatattttagaataaaaatacatgtcaacaaaagtaaacggcggtggtgatgaataccgaagaggcggcggtgttatggatatggtg

SEQ ID NO: 20598 - DNA, 593 bp, Arabidopsis thaliana landsberg
gagaaaacgtcgtatattgaactttttggtatatctaacgtctcaaaagatcactttttaattatatatgcatttcattattaatgttaccaatttatcataaacacacaaaaagacaatatcatgtaaaccataaaatgtaataaaaagaaaagactaagttaaaattactaaactaagaatggttaagtagcaaacagctaagttgtaatatacgaaaatttctagtcattatcaagtaatgactattataaaaatagcaaaaataaaaaaagtaaaataaaagtagtgtttgatacattaccatgatttttttattttttttcttttaaatgaaaatattttgttaagagtaagattaatggatgatttaatgcaatataaaactttaaaaattttatcactaagttttgttatattttaatgatattaatttagaatgacatgtggcactcactggtgtgatgatgtgtcactcatagagttggccaagtaatatatatgattatcaaaaataataagattataattaattaaatttacttatgaaaaccactaattttagcatcaattccaaagccttgcgattgata

SEQ ID NO: 20599 - DNA, 2126 bp, Arabidopsis thaliana landsberg
  unsure (1)..(2126): unsure at all n locations
tactttaattaaatacatgataggtatcggagtatttttcaaggatctatgtacaagaacactgacaatagataccaggggcaattagacaagaatatcccagtgttgctctgtaacttggagaaattattttcccctgtcttttttgacgtgatggaacatttgccaattcatcttccacatgaagctgctcttggtgggccagtacaattcagatggatgtatccttttgaacgattcatgaaatctcttaaaggaaaggcaaaaaatcttgctagagttgaggggtcgatagtcgcaggaagtttaaccgaggaaacgtctcacttcacgtcgtattactttagtccaagcgttagaaccaaaaagactcgtcctcgacgctatgatgatgtaggtgttgcacctacatataacgttcccgatgttccagatacctatgcccaaattggtagactcgcagggaagttgaaagaagtttggtgggacgaccatgcgctttctcgcgcagctcacaattacatactccgaaatgttgattacattcaaaaatttgaaaggtataaagcaacctagttttattcataatttttatatttaataattagtgtgatattaattaaggaagctaattaaacagctacattttaatttgtaggttatttgattcacaaatccgtgaagcatgtcctggattagaagaaaaagagtatgaaacttacaaagatcgtgattttgctagatggttaaaatactatgtaagtataagaatatttgaaagtaaaaattctattacttatttacttttaaaaatgacaaatttaatattttctatgtgtaggttataaatggatgtggaaacgaaccattaccactttggttgcatgagcttgttcaagaaccaagatctaagatcagaactgctctgatgtacttcactcgcggctatactttccatacgtatccatatggaagtcgaagggcaactgcaaattatggaatccatgtcgaaggtgaaactgagttttatgggattctgcaacaaattctagaagtcgaatatccgagacttttgaatttgaaatgcatcatgttcaagtgtgattagtttgatccggtgatcggtccagaggtacgtgtaaataacttaggcatggtcgatatcaatgcaaacaagacttatgccaagttcaaatcatttatcctagcatcacaagcaggacaagtaagctttctatattacccgcgtgtgaggtcacggcgtgaagtgtggttgcccgttattaaagtgaatcccaggggccgcatagtcggtttagttgatgatattgtgatgcaacaagaaagagttagagaagtttccataccagacataacaacagaagatattatccacattgacctacaaaatagagaattagaagacatcatgacggacggttccgaaaaagaaaaacaataagacgaattcagcaaatctgctgaaagcgttgagtcaaaaaatgatagtaatgattcagaaaatgaataagaataaatgttactatattgtttacttttgatgtttttactaaatataataaataaatgaataaataattcagaaaatgatttatatatactttcaattttataattttaaagatttttggtaatttcaaaacttataaattcttaataaatttctcattttaaatatctgaaatttttggatatttttattaatttttgttttttgaatactttgcgaggagttgctattgacctcgcaaatccctagcaatttgcgagnnnnnnnnnnnnnnnnnnnnnnnnnnnnnnnnnnnnnnnnnnnnnnnnnnnnnnnnnnnnnnnnnnnnnnnnnnnagcaaaatttgcgagggaattgcgaggctttttaaatatatatatacactgcaaccgtgtttgagtgcgctcaaacctagccgcacacaccgaaaccctaaaattttcttcttctctgttcttcttctctgttcttcttctccggatcttcttctccgttcttcttctcctttgttcttctccattcttcttctccgtcgtgccacatcctctacgaggagatccagatagccgccgctaaccaggaaaccctaatttcg

SEQ ID NO: 20600 - DNA, 510 bp, Arabidopsis thaliana landsberg
atcgaacttccttggaacaaaattcacggtctttgatggtagtcagaccggagcagcgattatgcagaagagccgctcttctaatttcatcaaagtttcacctagagttcctcagggaagttaccccatcgctcacatttcatacgagttaaacgtcttaggctctcggtaaacagtttttacattcaagtatgataatgcttcttctagtcttttgaccattctgattttaacagtcttttgagggtattaataacaggggaccgagaagaatgcgttgcatcatggatacaatacctatgagcatcgtggagtcgcgaggagtagtagcttcaacatccataagctctttttccagtcggtcatcaccagtctttaggtctcactcaaaaccattgcgcagtaatagtgcatcatgtagcgactcaggcaacaacctgggagatccaccattggtgctgagcaacaaagctccacggtggcatgagcagttacgttgctggtgcttaa

SEQ ID NO: 20601 - DNA, 638 bp, Arabidopsis thaliana landsberg
catgaggttgatgcttgatcctagatcacacaaggaatggctgaatctgcttggagagatcgagcagtcaagaacaaagctacctggatcgggaagtttctcagtgctttgccctttggcaatggagctaacatgttcagaaagtaccaccctcttggacttgttctttctgaccttcttcagtcgtatggaactgatgtctcttgtcagtagattagcttcctcagagcagattccattgtcgactaggcgcttgacatatctcatgagttgatcagatgagttctctgaagcatccttaggaattatagttagtatcttctccattattgccttgcacttggcatcatgaatctcctgcttggaacgacactgtcttggatattgaacatgaggagtgtagacagactctgtttgcataaggatgcgaacttcaagaggtgcagtgctgacccagtgtcgatcgtcactaggagtgtgttagaaatcattttcagaaattagttgaccataaggtgtcgatcaacactggtaggtgtcagttgacaccaactctacagctgcgagctccaactcgtcttctctgtctatacgctccacacattatcccatctctgactaataattaaataggaaag

SEQ ID NO: 20602 - DNA, 706 bp, Arabidopsis thaliana landsberg
aagcatcgccaacctaaaccacctttaatcaccgggattttgggaaatcgtaatatttttgttggaccccgttaagcattttaggcgttatgaattagctatcatccgtttagtgcctaaaaacattcttgaacattgtttaatcgtaatgttagaaatacattgttgtaaatctcataatttatatatatttaaaatataaattatatcttattatagaaatacgtcacattagattttaacttgcggtacatcgcagagctatattttttagaaaaaatcaaactgtaatttgcttaattgattaatattattatattatctattgtttgtatttttctcaatgtacaaaccttttatatatatatatatatagatattatttagtgtataattactctattttaggatttaacatgtggtacgacggacaatttttttaattagtatatatgataaatattagattttacaaaatttttatttagtattaaacttaataattttatattagtgctggaaaaaaaagaaattgatgctgataaaatattaaaattagatttaaactgtgttataactttgggttaatgatattataaattttgtaataatattaatgcaaacccatcccatcatataactctagattgatatcattaaaatttttgggttaatccattgaatattttttcaaaactaattgaca

SEQ ID NO: 20603 - DNA, 680 bp, Arabidopsis thaliana landsberg
aggaatggagagataacaaagaatacgattctgcatcacagggataactaaaagtgttctcttttcttatatgaaagatgggtgagcaggtacaacattagcaacgtatatataacatgcaacttttattctctgattcatataaaacgaaaaaacatatacattttctgctgaactccactataccaaaaatgtctttctccttcatgcctatttataagcatactaatttctagagaaataaacaacattctttcactgggaatacataactgtgtgtgtctatgtcttacgacgtcataagcctgttccaagataaccattactgccaccagaactacctagaggggcagacaaatcacgaacgagaaacttcaccgagtgttttcccataccatgtaatatctccaaacattcttggagatcagaatctgtaaccagcatcacccattcttcttcatcatccaagtacttcagctgaaacgacccgtcctgcagtttaaaacgttttccaacttctttgtagagctgaggacacccaactgatggctcgaacttgaaacgtacagtgtcttctctataactggcctttacgatcagcgttgttgatccactctcgcaaaaattactgttgtgggttctcatttggttccgatcttccagggaagtaatcaattccc

SEQ ID NO: 20604 - DNA, 1860 bp, Arabidopsis thaliana landsberg
ggccccactaacaatgccgaaggtccgcccctggatgatgcaaagaataatgttaatttttaatatttcatttataatatttgtcgtttctttatagaccaattataaatacgacttctcgtgactcagtcgcatatatatatatatatcgcgcccaaaaaaaagaagacgatacaagttggctctttccttgtgatgtattttgctccacaactttgtgattaagaaagtcccagtgagtttgacgaaaaagaaaaagcaaagtctcattgttaattaatggcatatatacttactagatagtttaaaagctctatgcgtaatccaaatatgcagcttaagattatactattggagaagtttattactcaataaactaaatcagctatattttgctatatataccctctagccttttgtccatttgaagagcttaatatgaaaaatgaccaattttaccatagatttcctatggcgagtagtcctctcccgtaccataggaactacggcacgtcttaacgcaaaaggaagtaaatagactttgccaaagatgtttccttttttaagaaattataccatcttcacttgtctcttttccatcatgatttggagactttcaactattcttttaacgatcatataatctttttctgatggttgtttgcaatctcacgcatcaatcttttcaatatttacaatctcatgccaatagttttcattctttataactttggcctaataatgttactggttttcgagtccaagctgacgtaacggaaattcaaatttaagcatggtttagatgtgtaagagaaaaaacgatttatttataagaaggtaaaaattacacaatacaaaagaaagagtaataaataaatgaattaagaaatattagaagttccaaatgtcatacaaatcccaaaatataatttgggtaaagcaaaatacaatgataaataatttgcatgaaacatcaaataaacaatcgaatttctcaaactcagaagcaggcgtcgaggacacaacagcaacacatggccgcaagactgcatttagaaaattaaagcaaagaaaattaatctatatttcaacacacaataaccgatccggtttgatagtaaaaagaagactagaatccatcacccttggactacacctctacgtgcggccccggttataatagaaattaaacaaaaagtagtatcaagaagactaaccagcctttcaagaatccatcacccttggactttgtctccaccggagccaccgtggcatgactgatgtcgctcgtcgggtaaccgagcggtggcggtgtcatataagggccggtagacactggcggcgtaggataagctcctaattacacatatatgatttggcgcccataagttttattaccataagactttagaaatacatgatcattatgacgagattgacaacatatgatgcttaatttgtaagaacaacaaacctgaagattggttttggctgtattggctcatcttcgaacagattatgatttgtttttgaaaagtgtttaatgaaaatcgtatgtagaggtgtagattaatatgaagtgaagatagagatatgtgtatatataggcaagggaagcaaaaaggaggtcggtttagtagaaccgcgtgagggcaccattaattgctaagtctccatatatttattccaacgacgaacgaaaactgctacgaagcttccttttttttgttatgtaactcaaattttaagaataagtaaatgactcacacatgcaacgaataatatttattttaagttttattgagatatgctaatatattttcaaacagaggaattcgaagatatatttacaacttagtt

SEQ ID NO: 20605 - DNA, 728 bp, Arabidopsis thaliana landsberg
aatgcctcttgaactttttttgttaatctcctcattacctttaatgacatgttaagaaattgctcgatttgtttggcgattgcttgacttgtcatcacatgtctccacagttctcacatgtcatcacactacttagtgtaccaccaaaaatctggtaaaccatactatcataagaggaaccaggagaatggagacatttgtccatgcatctagcaaattaaccagatactcatgttcatcttcatgtgcctcatattcgtgtatttttaatacgcgtagttaagcaatatatgataagctagaattatagtttattttactatattaattttgactccacacaatgcgtggaatacccctagtaaactataaaaaaaatatatgaataggaagacgtaaatctttttgaccttgaatgaaccttaacttaacaagcatccaaaacgtatttttgttatctgtttaattttactaaaaatattaaattttaaaattttatgattgtgtatcatatataaatacttgtaatttgtatcatttatatgatatttatatttatatttatattttataattgtcactaaataacgatataccacataaaaagtttgttttgtacaatcttatcttaattaggcagatgttatatgtctaacattagtgatattaataaataataaaataagaattatctgtattgaagagtaggtaatgatgtttattactta

SEQ ID NO: 20606 - DNA, 912 bp, Arabidopsis thaliana landsberg
tcaggaaaatctcactatctcaaggtttacattatgctgctgttcgtagtactgcacttggtgccccttttcgtccaatcaccgtgagagacacaattggtgatcttccatcagtagaaaacggagactctaggacaaacaaagaggtatgataacacatctggagaaaatatctatacatacatatttgctaaacacaaatgacgtgaacccattaatttattaatttatgtgggggaaattcttgtttcttgcagtataaagaggttgcagtctcgtggttccaaaaggagataagaggaaacacgattgctctcactgatcatatctgcaaggctatgaatgagcttaacctcattcgatgcaaattaatcccaactaggcctggggctgattggcatgacttgccaaagagaaaggtcagtcttatacatcctacctcaggaatacctttgtcaggttgactacggtcaaaagaattgcttttgaaactagaaatcaacccaaatcgctttgttttaatatcacaggttacgttatctgatgggcgcgtagaagaaatgattcctttttgtctcccaaacacagctgagcgccacaacggttggaagggactatatgggagattagattggcaaggaaactttccgacttccgtcacggatcctcagcccatgggtaaggttggaatgtgctttcatcctgaacagcacagaatccttacagtccgtgaatgcgcccgatctcaggtaagaaaaactcttctgttcccagtcagtcctatagcatcagttacagacttagagattgcaaagcactgaatggttttgggagatagagtagtaaatgtagcctttatcgatatggccctttaagcgaaattggtggtaatgaaaacctgcagggggtttc

SEQ ID NO: 20607 - DNA, 1376 bp, Arabidopsis thaliana landsberg
  unsure (1)..(1376): unsure at all n locations
tattacccaaatcctcaaatttctcacagcgtctttttcacttcaattcttctactttgtgttttatggtgctgtgaaaatgttctgcagcgtataatggctgtccagtacaagatcccggattacgttcatatatcgcaggagtgcagacaccttctctctcgcatatttgtcactaattcagctaaggtactactttctcatttatctgagttgaagctgtcttttctatatttcaatcttttgatgacatgtcataaatttatgcagagaatcacacttaaggagatcaagaatcatccgtggtacttgaagaatttgccaaaggagctgctagagtcggctcaagcggcgtattacaagagagacacaagcttctctcttcaaagcgtagaggacataatgaagatagttggagaagcaaggaatccagctccatcaactagtgctgtcaaaagctcgggatcaggagctgatgaagaagaggaagaggatgttgaagctgaagtggaagaggaagaagatgatgaagacgaatacgagaagcatgtcaaagaggcacagtcttgtcaagagtctgacaaagcttaaaaagaaaaatgctctctgtttctcttactttatttcttcttcaagaacactccttggtgagttggtgacttgcttctggtaaaaagaaaaacacatttgtcaaagccaaaggctgtaaactacgtgctggttgtttcacttttagattgatgtcgttgtactgagtaatgagcatgaaacagaaggtttatattattatatgatactatactataggttttcgtctttgtgatgatgatttcagttcacctataaaatccgaataaaccgaatctgaacaagatttataaaccgaaaatctgaaaaaccgaaaagaacgaaccggatactaaccgaaaccgggatttgaacacttaaggttaagggtcgagaaaccctacgaaagtgtatctctctcaatcttgacaagtttcaaaacagagacagtcatgggaggaggagagaagaggaaatctagtttcaaaaacctagctaatgcaaagaagaggagaacaggacctcacttacctagctcaatactcaagaccattgcgaatgagaaacgtcctttgaactctgacgaaggagacgatgagatcgattctgcttacggtgatttttacgagtacgaagaaggtgtgcctgaagaggaatctaggaaaaacaaccgctacgaacgcgtcgttaactacgaattcgagcttgcagaggattgcgaggttttttcaagtcttactatggcagttctttntcttttaagttgctgttaatcgacaagtaaaagtggttgggtacacgtaataatt

SEQ ID NO: 20608 - DNA, 576 bp, Arabidopsis thaliana landsberg
gtgattggtttgttgtaatgacccaaaagatgagctctgtcaattgaagggacgacgtcagcggcgaatagatggctcagtttctctctcttttctcctatcttccttttgatcaccagattgcatctcaaaaaatttatcatgtgcgtttgattttgtttgcttgggttccctttcaagaatccttagggtttagttttgattggaattcacttccaataaacaaaatattagtaatggtgaagagtgagaacacacaatgaaggaatagctctgatttcgaatacttcaattgcaaaactcttcttgtttactattcactttcttcttcatttgcaaaatgatttttggcaaggatttcatatatactcgtgaatcaatttctctgattttcccttcatcatttcctattacatcccacaactctaagaatatcttctctgcaatctcactatcaatcgcaatttcatcaattccaaacacaaatctttttcttctcctcactatcacaaaattgtaatcttaaatagaatagtgcttttgattgacacctttgggttcactagatactatccc

SEQ ID NO: 20609 - DNA, 601 bp, Arabidopsis thaliana landsberg
ctatttttagcttaacttacaaaataactaatgaaatatacatttatgggaattcgatttttcgtttgttttaacacatcaataattcccatcgatccgttggcaaaacgcaattatgataacaaagattactagtgaggaatgggttcttgcagcacttgtcaatttgtccatccatagtcacaagtcacaactaatgccaacgagaaagtcaactaaagcgatgcaagaaaatcatcataactcagcttcttcctttttttttgagatattgatgtatatgtacacacaaagacgtacatacaaaattcgagtttttatataaaacgaatcgttttaaacgatgataaggagtaaggacatatggaagctgctaataacatggctaattaactagctataataagagatcaaatatatcttatcactgataccaaaaaaaataaaaaaaataactatattgtacatatgagtgattcgcgggattatacagacatacggtcctcccgtattaaaactttatgttaaaataatagagttgtagttgaacaaaacagctagactaatcgtcgatcgctgtgatcaattcgttctttatatt

SEQ ID NO: 20610 - DNA, 920 bp, Arabidopsis thaliana landsberg
tacaactactggccaactatgctgccggactgcgaggcttattcggcgaagtgcaaaccatgtcagcgacatggcccgatgaaaaatgtgccacctgaaatgttaccctcagtaacagctccatacccgttcatgtgaagggccatggatatcgtaagactatttcctccttcgtgatccaaaaggttcttgctggtgctaactgactattacactaaatgggttgaagcggacgcatattatgaagtccagtctgctgcagccatcgcatttatctggaaaacataatatgtcaacacggtcttgcgtatgagatcgtcacaggttaaattcttgagggcatgcacatcaaatgctgaaatcactgcgactgtttacatccggattctgactatctcttctgcaccatgggcttggttcagagcgttcaccttaggcttaacgatctcttcctgctcggtgagataggccttcatcttgtcgagacggttttgagccttcctagtagtatgggagaccttcgcagctcggtcggtctgaagcctaatacattctctctcctcgtgctcttttaccgcgacaagtgcgacctgaacttcaccaatctctttcaaaagatcagcctcgtgaccattaagtctggtgacctcgtcattcagcgagttgatctccgccttgtgggtctcatcggcatccttaaaagcggccatctccttcatatcccttgcatagatgatctttgcttggtccgcacatttcttcaagttgtcgaaggtgtccctgtctgcgagcttcaacctcagtttgcgatcgtacgaagcgatcagatcattggccagagcggcggtctgatgaaaaaagattgcagtcagaacaaacacagagaataaaaaatagaatcttgtgtatcgcacatacct

SEQ ID NO: 20611 - DNA, 1325 bp, Arabidopsis thaliana landsberg
tcatgattgtaatcagttataaaggacatgaatgtaaatccacacaggttgcatcctgtgcctataaatagatgaacagtatcactgtactgttcacgctgacttgtattcactcgcacgtcgcacttggatttttaccttctatcaagccaaaggtataaatgtaattcaatattgtttatattcattcatgattaaataacaataaatatatattataacatcatttcattattcatgttgattcccatgttttatatgcttcgtctttcatctaagtatactatgatcatgaaggtatgtccttcatgaccttcgtctgaagaccgttatatcctcagggaaataatgtttccaaggacgaagggtattaacctttaacccattttttgtgttgccttgttcttaattcttagcatttgagaacaagtccccaacattggcgcccacctccggtcaactcacttccacctttctgagctgatggcttcgttcaacactcaagctggagctgcttcggcttcgaagctggtgctcccgataacaggcggttcttgctcagagccagctaacaaaaagcagaagaaggaggctcaaagaagggtgcagcatgttggagtgcagggacccttcattaagtcaaaatggtctcacattccaattaccttctctcaggaagatcttcagctcaaggactatccccacaatgatgctatggtcatttcttgtgtgatcaaagggtttctggttcacaatgtcctagttgacacaggcagtgcagctgacattatatttgccaaagccttcagacagatgcaagagcctgaagacaagattcatgatgctacacaccctctctgtggcttcggaggaaggcatatcgtaacactcggcaagatcacgatgccagtgaccttcggatttgtcaacaatacaaggactgagcaaattgtatttgatattgtcgacatggagtatccttacaatgcaatcattggtcgtgggacactcaatacttttgaagcaatccttcacccagcatatctatgcataaagataccttcggatcaagggcctattgctattcatggaagtcaggaagctgccagaagggcgaagaaactggacagattcaaaagcaatccataacatagatggagctgaagcttgtgagcaatacaagtttagaagggagatagctgcttcagccgatcagccgaagcccatgctcttatgcgaggacataatagagcagaaggtgctgttgggatctcaaatgtccgaggaacaggagaaaaccttgataaggtttctgttcaacaaca

SEQ ID NO: 20612 - DNA, 1088 bp, Arabidopsis thaliana landsberg
tttctgtggaaaatgcttggtaatgtgcaatgtctattgggattacgctaactcatcaaggaattatcactatttctctccaattcatgatcagcttttgacacatgacaaaaatcttcacctgtaaaaaaaaaagctaaagagaaaaaaattatgttacaaaaactgtgttaatatgattcgaaaagttaaataaggagaactaagaattgtaactaatagttaaactttgagaggatttttctgatttaaaattagaacatgttaaaatttacataggataagaaaaagaattaacctttttcatgcagtaagaaacatgtgaatactataatttttcaatattggtggaaacaatttttgtgattttgggacgtagatggtttggtcatagcctccttcgactacatcaacatagtcctttgtatcgttgtttttgctctcctttgggtagcctttgctcctgcgagattcaacacatcgactccttttttaacatcacaaagtcttatgaccgtgaccaacctttcgtcctttgcggatgatttctcgagtttctataatctcacaagtgtcaatccgctcccaagccattgtcacacagctctcttagtctctaactcgttgaactctatctatcttttcaaagcattggggaatgtcttcctttgtattgtgttaaactgtggatctttgaaatcctcctccttgtactggtttttatttagatgcatgaaacattggtatctataaatagtttttctattatttctcaccataattattaaatgccataaagtggagatttaattctacaatctgctggtttagtgatacgttacgaatacgttaagataaaccaatcgcatttattctattcttttcaatgtcttcattacttctacttatattttaaaaagacatcaattttttgattatgatattattttattgctatattaggtaacgttaaaaggcattaattttgattttgattcttcacaaggattcattgtatggttttaaaatagatcagataaaacttccgtttaaagtccttgaccaatgtaccaataggatatgatttt

SEQ ID NO: 20613 - DNA, 608 bp, Arabidopsis thaliana landsberg
aaagaggcataaccaagacataccgaagtcaactcgatgcaacaagctactgttttttcatgacaagaaccactagtgaagcattactcctcatcaccaatgctttaactagtcttttgacacatgaagttgacccagaacaaagactttcagctgagattgcaaccacaagcacagaggatcatgtttcagcaatctctgctcctatccaagcccccccccccccttcgaccctccttagacagccgaatggaatccatgcttgcgcagattcttggcaagtttgaatctgtctacacagatcttaatgggaagatcgacaatctacgatctcatatatctgagttttctcctacatcagtatctatcaatgcagtcacactacgcagtggaaagcagctcaacccaattcatcaacgcgaacgttcggctcagacttcatcttttccagttgtagaaaaagactcagtgtcgatcgatgcatcagggtgtcgatcgacaccaattactcttgatgactctgttttgcctttgtcgagtggaatcgacaatttcacagaggagaaggaaattattccagatggtgtcgatcgacaccccatcccatg

SEQ ID NO: 20614 - DNA, 833 bp, Arabidopsis thaliana landsberg
atggtgcactctggttcagccccgtaccctgacccataattgtcgtcgccgacgatgatacattaacttgcgaaactgctggccgccgactactcttgttgatctctgccattttagtatgaacagtaattcgagaaaccagaaaatcctctttttgttagatactttaaaacgaactcgatcgaaattttctccactcaagcaaagactcgaactggaacagagcctcaatcggaattgggtttaagttttgtcagaatttttctgcgtcttcgaatacggacttcgtcggaactgttctgcgtttctcgaagacagtttttgattttattttaagttttaaaattatttacgtttttttatttaattttaaagatttaaattatttccgtaaccagaatacaaaggaacgaaactgaacagttttctttcatttctcgttccagggcagattcatccgattaagtccaaatggctaaaagctggttggctcaatccactttacctctgagcgatcatattctttcttggtgaatgctttggttagttgggatttttttgtcctaattaattgattgcgggcacaaaaaatttatttatccacttacaaaaaatcatcgtttatcattcttttaatttttataaacatgatttgccagttactcgggttaagagtgaatttatggaatactatgataagtttagaacaaaattgcgatcttccgtattttggagaacacagtggcggtttgagtaaccgataatccttaaaataaaactttcctcgaaccgacagtcgttctaactgttgatcttcatgtggtcgtggcatg

SEQ ID NO: 20615 - DNA, 291 bp, Arabidopsis thaliana landsberg
  unsure (1)..(291): unsure at all n locations
atgaatatgcggaagatacgtcaagatgcgtgagaacgggagaattgttaacctaattggctaagagggaaataatacaaaaaatacttcatttatttttaatttgtccgtttaatatatgcgttatttaatttacctgtttaatatttaagttaatttttatgtttattgaaaaccttttttttttttttaattttagcaaaatcagacatccgagttaacgggcgntaatagtgttgacgaaatcgctaactgtggttgaaagttaaccatctaatgaacactatttat

SEQ ID NO: 20616 - DNA, 2520 bp, Arabidopsis thaliana landsberg
  unsure (1)..(2520): unsure at all n locations
tgaaaattttcaaatttttatggttttttctatgccttaaatgatgcaaaatttgaaataagaaaaagagaacacaatgttaaacatgtcttgaaccctccctcaatcttaaattacacagtcccttgtgtaataaaaatctgaaagagaattcaagaccaaaacacaaaacacaaaaagaaaaagaaaaagctaatggtatgtacaatggttgaggtggtgtgacctcactgatcaggtgaagtagatggagactttatcgtccatattctcttgagtataggcaggggctgaagttgaggcgggagggttttgctcgttctatcgatcgcgcgtgtgaaagctcgtctctgcctactccttggctctctcaactcgaagatcatttcccgaggctcaaaagatgaagctcagggttgatcgatcctttcaggtctccttgcagctgagctcgttgaaccacttattcttactttgggggtgggagacggtggccttggcttgctctggaagtctttgatttgagcagccatactcttcagtgacttcttcatggttcttatcttctttttgaaacctttcatcgttttgttatgaaggttcccaagctcttcaagcacactgagcttcttgtgaacttcagctatctcatctcctccttgatcagcatcttcttcatagtgagcttgctcgaatttgttggtctcttgctccggttgttcgctatgttgctcgaattcgacttgttgctcaaactcaacaggataatactcttgttgctcatactcagcttgagtatactctggttcatcttctctagctcctccgatgtcgatgttcagggcagagggagatgacatgaagttgatgttacgccttgtcttaacagaagtttggttctcgcaaggtaggggtaacaaagagggtccaagctccggatggttgaacttgaagaggtagtgatccgccggagttgtcttgtcaagaatatccttccccttgagataatcgaggtcgaggaacttgaggaacacgtcagcggttcggaattgtatccctgcagctcctaggattggcgttaagagaccaccaacacaaagacttccgcgaatccccgagcgatggatggttgcagcatactctctatagctcaataggtgatccaaaagaacgacagtctacgaagtgtctcctttatcacccgccatcttcctcccatccttggtctctctcagaatgaagaccaaagcttgatcaatcatgcatagctctccttcatcaataaatccggtcttctttggaaaagggtgttggcgatgcatcggtgggggtatctaattacgggacttcgaattgaagaagtcttgctcttggcgggcgagtagggttttggaccggtgattgttgtccaaagagagtgtagctcgtcttggtcatagtcttggcggattcgttttccacttggaaacccaaaaatggtatcaaagtggctaatatcaagagtatactcgacacccctaaccttgaaagttatgtaaccaagacctcctctttcttatttctctaaatcatcaacacaaaagtgaactttgagggttgcaaagagttggcagctctcctctttaaatcccccacattggcagctcatgaacattgcaagattggccaattccatcaagtattgcacatctccacaaataccaagctcttgcatcgtttccttatgagggtatctagttccctcaaacttcaactccttcaagtattgatagtactcgcttggggttgactctctcttcctccttggccggtttcttctcccaacaggggctagtgtatcatccccgatgatctcaacctctgcctcagaaaccgcttcttcaaagactgcctcttcatggtgttcttcctcagccttaacaaccctcttgcccctagctacttcttctctttgcatggctgagcgacttgaacttcccccttgaatcaagcttgatctttgagcacggcgagcttggtgaatttggtgttcagtcatgccactcatgtcaaacgcctcaacttcttcgaaatcaacaaaatcttctagcctgagatgaactctttcttcttgaatccatggagattggtggtgagcttcaacaaggcgaacaagancctacttctnctagaggtatcaaaggaaaagggaatcagtttttttggtgatgaaatttggagcttgaaactgattgaatgcttgaggatagactttggagtgatcgagtaactttggtaaagtaatggtgaaggggaacggattcttaaagagtgatagggagcgttttaggggaagggtttggaatgaagacttcaaagctttgtgagggagttgcgaaaatgagatgatgaaatacagattttcaatgacggtttgtcgaagttaaagggtggaggagaatggtgtttggaaaaaatgggaaaggatagaaaagttgattggatatggtgaggggtatgggtaatagcttagtacatcgc

SEQ ID NO: 20617 - DNA, 440 bp, Arabidopsis thaliana landsberg
gaaatcctcgctttgaatcaaaaaaaaggaaattgatcacaacggtcaattagtgttcacttcggtcattagtgatgatggcaacgtgtatgggatttgaccataacaatagaggctgaatggatataatttagtattgaaagtcttttctttccattgtttctattgacaaataatctcaatcccctttttggcttagccttacttactcatgtatacagagactcttttcgttcacgtgtcctctacacttatgtttcaatgaatgataattccaagttcatatgctcatcatcatccacatttcagagtctattcattcttctcagcattcatgaagcaatagttctctggcactctgcaaattttgaagcacccactgctaattccttctccctgtcttttcaccattatatactttagattccatggcctaagtc

SEQ ID NO: 20618 - DNA, 774 bp, Arabidopsis thaliana landsberg
  unsure (1)..(774): unsure at all n locations
ccgtatataaacatgaactaaatttgttaaaaggatgtagataatgtaaaagaaattgacaaaaaggcttgtgtatagttataggtttaaacctcttaccaccaatgtccttggaagatgaaaaagatctgtcactgttcattgatcctttggctgaagctatgagaagtctgtgagctcttggagacattgtactcagcttaccattggctgcaggaggaagagagtggcgccgtgttgtcccatttttctcaggcttctcttgagctatcctcggagacccttgtcctcttattcttgcctttgcagatgcagttggagccatatagcttgggatttttctcccactctgtgtaagcccatcgtcttgatgatgattttcaatctttgcaggtaatgaagctcgtctatcgcttggctttgtgttctcagaagcaacatttccattctcagagcttatctgcgcgtctggctcctggattttctcttcagcactatcatctctctctgcagtcttgagttcctcttcagctttatcatctctctcggcagtcctgagttcatcttgctccggcttatccaggaccagtgacttctcatctttatcgagatcagactctttcgaaattgttacagggataagattcatcttttcatcttcaggagcatcaactaaagaaactgaaacctcttcaataggcaattctttctgcactgcatctgcaatctctttcttcttctcagctgatttgcgggtagctntccctatcccat

SEQ ID NO: 20619 - DNA, 1404 bp, Arabidopsis thaliana landsberg
tctaaaacgtcttatgttttgaatcaaaagaattaccaaatacatcacctccactttatatcaaattgacttttgtaatagtaaatgtgtttaagaaatccaatgcaacaagtctttgatattattcaaaagagtcaaaacaaagaacagaacaacaaatcaaagagataaagctgaaactagatgttttagtgaagaaaaccagaacaaaactaaccaaagcagtttgaaacactctctctaaataaacatattaatactctctacataatgcaagaaagtaactactacattataatctctaaacttaaacttggtgtttccttctatagtagaacacttctaatccggttgcttttttgatccagaaagtaaacaacaaactcttcaaaatggttgggtgcaaagacaatctctcccatatcagaagtgcccaggacttctaaaccgccatggaattgtccagtaacacctgtatgaaaagatacgagtacattcgaccattgttgtttcttggtgtcctccaaaacccacaaattgaaatcatggtggtcattgtgataatttttactgacaacagctacttttccatggtagtttatcaaagtaattccattcgacgatttaaggccctcgggaaatttggatgcaacttccaaactttcagccctcacatcaaatctcaccaagactgttgtaaaactagtgaaagcactgtaatataaaatgccatctatgcacaaagatttttcgccacaatagtgaggagtgctgcattgtatcattctccatgagctattttgagctcccaatgtgaggacttgatgttcacaaaaccgtgtaacattggtcaagcacaacactttgtattgggcattgattggatcatatcctaaaaagctttgggagattattccacttgttttgatagttggtaaagttatggacttacctatgctgggattaaaaatgacttgttctccgctacataaaaagctcatcaacccatggacgtagctagaattttcgtgtcgtagttccttgcgagataaaaaatcaggttgttcctccacaactagaggtttggtttaagttcctccattagagatttataatgtttcggaagataacgtaaacacctagcacgccaaaagagcccgaaccggtgcggttttacgggtgggcctggagcaggatcccacggtaatattggagttgaaacatgagttgatttggagaaaaagtacaacattttgttataaagccttagacagtcgactaaagcgaagaggaggcgaggctgcttctgtggggaagagtaagacgtgaaggatctgatgaataccttacctcggatcattgtggcccatacctttgatccacaaataaacctagctacagatt

SEQ ID NO: 20620 - DNA, 339 bp, Arabidopsis thaliana landsberg
gcacagttggtgattgatagacaccaatttccctgcagtgcttgtcataaacactatagctgtggcggatgcgtgatatctgaatcataatagttgtttatcatcctactgagccccgggacgtaccaagtgccaccctatttgaacgagaccgtatgaggaagtatttgaaagaagcgattcaagaagcattcttatcttgggtacgacacccttgtacaaagagacgttaaaagtatctctgtaaaaaccatgatgagaacgtcgagtctgaaaacctttgaagcgcttctatgcttaacaaaaagtgtcataatttatttgtgagaaaccgggcat

SEQ ID NO: 20621 - DNA, 1756 bp, Arabidopsis thaliana landsberg
attttgaatgtacttttgtcttttcatgtgtaatagaaacagaaaaatgcggattactcaaattgttgacaatttttcgagtttttgaaagtcgcatgcttaaattatgttggcaacaattttcagcatactgctgattgattcatatttggtgattacgtttgtttcgttgattgtagatttgtttgttgaagacattttttgttcttgggggttgatgtagtaaatgaatattaaaatctttatattatttgcatccacttcaggataagataatattgttgtcttgctgaggaacgtgttatacgtgtagtacgtgtataacttgcgttctctgaaatcattcatttaaaaaaaaaaacctgcgttctctcctttcttactactctcgagtctcaaacattctctcttttttataggcccaaaatatttcgaaatcaaaaggggccgaaatacgggcctaaataatttgtgtgaaccattttatcatacatggttgctaagttgctatgatgtcgtatccttaggagttaggattggtactcacgcctagactgaacggcgtgacatgcggaagatcgataaatggcatcatgacctaacaatattgaaaggatcgagatatgtaatatctttaagctcacgaaaagatacaaacaaacatcgaataaattatatttacatggattcctctcttttaaagtcaaacaaaaaatattatgacttggaagtcttgaacattgaatgttctttagaaggcactataccggtgtaccggtgtttcaaataatgtcttaagttttagtggaaatttatttacttcccaaaaatgatctctaactatcttaaggaacaaccatgcagataaagaattttaatactagtttatgtagagtgtttcatatgtatttttttccgtcatcattaagttcgtagaaacttcttttgcaagtacgaaattttgcaagtacgctacaccaaagtatggatttgtcacttggttaatgatgaaaaacaggttagcaacaggggaaaggatgtttcaatgaaaccaaaatgcagatcaaagctgtgtcttatgccaagatcctttggagacaagagagcacttgttcttccaatgtccgtattcgagaaaggtgtgggaggagctggcacgggggatcctagcaaacaagttcactgaaaaatggcgggatatcatgagggagcttgcgaacaaaaaccgagacacaacgaaaaggtttatactaaggtatgtgtttcaaaacacgatacactctatttggcgtgaaaggaatgatagaagacacggagaaaaaccatcaagaaaagagaaatttgtcaagctgattgatagaaatataagaaaccgtttgagcaccataacaatgaaaggggaagaaaaatacattggaggactttaagtgtggtttgcgtcacaacaaagtcaaggatagatagattgaaccatattttgattcggttttaagaaaagtttgcatttcgatgtataaacgtttgcatttttttttaatataatttaacattagattttttaaaaaaatacaaaattttatcaattttaggtgtgacaaagtaaatttcatcattttaaaaaatattaaaaagctaataattatatcattatattacaaatcgtgtcacaaaaaacaaaaatcaacatgtcaaacatgaaaaagcgttacaagaatagtttttgctcaattgctaaacaaacaaataaataaattat

SEQ ID NO: 20622 - DNA, 1408 bp, Arabidopsis thaliana landsberg
  unsure (1)..(1408): unsure at all n locations
cgatgtggttgtcttgatgaagtcacgagtagcagttgtatttatacaaattgaaacaatgtaaactgtaatatcgacacgtgaattcgttgaacgttaattcgttgaaggaactaaacgttgtaacttttaataaaaaagcgttgtttctatgaaagttcaataaagtaaaatagagtttgaaatacgctatggggatttaatgtgtcttgtactaagtagaaattcgtcttgacctcggaaatttgtcttgaagcaggttgcggatatcatcaattaatatgtgtgtttataatctttttactgtccaatataacatgtccaccgataacagtccgtttggatttactataagtacttgatctgagttatatgacctaaaagggttagcaattgagaatcttttctggggaattaacttattcaaacgtgctcaacactttcatgtcaaccaagaaagttagatgggggtttgaatttacctaggattaatcttctaaagatataagatatatcaagtatagaaatgtatatgacaagataacgagggacatcacattatgaacatattaatttatattcttcatactctccgtaaagctccgcctataaggtagctctatagcattcggcagcaaaattctcatatgctattggtttgtacaatacagcattcaaagcatgtggatttttggcttcaagacattttgtgaagaaatgataatagatggagtgcgtcatggaccaccacatgtaataacgagatttgtcaaggcggacacaacttagagtttccttcgaatacacaaccgctttaaataatggtccaactttcaccaagggtttcaaaacatacacgccttcttcagcaacgtagctaacaattttagcaagtactggtgccggtatgtgaatttcagggataacagcaacctgagtagaaaaaaaaaggaaggagacaattgtttttttgtttatgttgaatgtcaaaagtataaaactatagcttatgatacgctgcactacctttttgacacctgaaacagatgagggttcactcatgtcgaccttcgttaacttgagcataatttctatgttttgaagttgaaactgatggaatgggtatggaaggaacttaaacaaatcgtgggaggttttgtagctagagattattatggttaaattaatttttatagttttccggtttattaaaagttgtagttgtgaaggtggaaatattcccgtaatagtgaagtttatcactgttatggagagaagtaaatttagtttggtctttcaaggtaaaagagaataaaaatattctctggataactaccacatgatctacatattcacatagactctgtgatttttagttaagtanataaggaatatttaattttacaat

SEQ ID NO: 20623 - DNA, 1976 bp, Arabidopsis thaliana landsberg
acgttttttgttatctcatgtctcctgagtatgtgacacatggccaattctcaatgaaatcagacgtctatagttttggagtattgatccttgagatcattagtggcaaaaagaatagcagcttctaccagatggatggcttagttaacaatttagtcacatatgtgagtcccaaactttctttgattctcttaaaagttaaaacactgattatagttctgaatgtgtatatattctacaggtctggaaactttgggagaacaaatcattgcatgagctcatagatccctttatcaaccaagatttcacaagcgaggaagtcattagatacattcatattgggctgttatgtgttcaagaaaatcctgcagatcgaccaacaatgtctacgattcaccaaatgctcacaaacagctcaatcactctgcctgtgcctctgcctcctggatttttctttaggaacggaccaggatcgaacccgggtcagtcgaacagcaagtcttttgcttgttctgtagatgaagcatcaatcacggacgttaatcctcgttgaaaattcagcatttggttttttcttgtttccacaaacgtctatcgtttatttaatgtccgtttatgaaaaagtttacaaagggtcattttttcagattgaagattcaaatttgaagtttctatattagtcaagcatgtctacaatatctcgagtgctgactattaaaatttatagtaattgtaacatcgatcattagtgttagtcctcgttgaaagttaggccaatctaaaccctttatcaaaaaagaaaaataagctttggccaatgttgactttatattctttcataagggtaaaaacgtaataataaatattgacttagagaatccaactacgtcttccccttaaaatccaaagtagtcaatgtctggttaatgaggatgggtcattccgtcgttcgagtagaaaattcagaagttatgggccatattaatgataagaaccactagtagtaaccaacaacaacaccagtcacacatttttctaaagaaacaaaaagaaaatggcaaagacgagttgtgaaataatcctctgcttcttcttcttcattttaagcttcagggtcatttctgtttctgcacaacaaacttgtgacaacactgctggtagtttcaaacccaatagtacttatgataagaaccgccgactcatcctctctactctagcttctaacgtcacggctcaggagggctacttcatcggttcgattgggattgctcctgaccaagtctttgccaccgggatgtgcgctccaggttctgagcgtgatgtttgctctctctgtatcaggaccacatcagagagtttactacaaagctgtctggaccaggcagatgctttcttctggtcaggtgaagaaaccctttgccttgttcgctacgctaaccgccccttctctggattactcgtcatggatccactaggagcgatattcaatacaggagaactcaatacgaatcagactgtgtttgatatcgagtggaataatttaacttctagtatgatcgccggaataacttcttcttcatcaggggggaacaattcgtctaagtactactcagacgatatagctcttgtgccggattttaagaacatatcagcgttgatgcaatgcacaccagacgtttcgtcagaggattgtaacacttgcttacgacaaaacgttgtcgactatgataattgttgccgtgggcaccaaggcggcgttatgtcaaggccaaactgctttttccgatgggaagtgtatcccttctctggtgctattgatcagattaatttaccaaagtcaccgccgccttcaattacacccccgtctcctatagccaacataaccaagaatggaaagtccttgttggaacattttcagaaaattgtcttgttttgtttctgtttgttttttttgttttttttggtttttgtgtatt

SEQ ID NO: 20624 - DNA, 1757 bp, Arabidopsis thaliana landsberg
  unsure (1)..(1757): unsure at all n locations
atcatgatcataccaaagttagagaaagaggaggagatttttttaccgaaagagtctcgtagttcttttatttatgaaggacatgcaagtcaatcagtttgggtctcgatttgaaccaagccagattaatcttcctatcagagacggtttgaccatgatttcgaatcagtggatacagagaaacatccgagaagacagagaacatccataggatcgtgaaaaaatataacatgtttagcgaaaaaatctgaaaaggttaaaaaaaagacatatgttacaactcatgattagtccctgaatttcaaaatatattcaatgtgttttggaagaaaatatatatatgctagggtttataggagccaaaaagaaaagcaaataaataaattcaagataaaacaaaaaacatagttagataagagagtaaattttcgcaagatgaaacaaaacctaatatcttttggagattttattaattaaatattttgcttttatttcatgcaccaattcatgatgtttctataaacccaaacctgcaaaatcatacacaaacaccattaaagatgaggatcgatccaccaacgcaactaaaaagacatgaacttaagagactactttacctttttgtttcggcatttttcttattctttttcatctttttcaatatatttcatgaagatttacctacaaacataaaacacatgattagatgatacccaaaagttatttatttgacacaatcaaacgaacatggaactcaaaaaataaaataaacaaataaacaccaatttatcaaacacaagcacacaataaacaactagattcataaaaaaaatttgtagctatataaaaaatcataatatcaaaactatctaatgaggaaaaaaagaaactggaagataattgtgtggccgagactcggtatttatagcttaggaattagggcaaaacccggtattatccatttttcatgtttgtaaaatagattttttagggttttacatatgactgtgtatttttttgggctatttttttcaataatttcaatagtttctttataatcaagttagacaattttttaatcatccaagacacgatcatttctttaatattgatatatgcaatgacagaaaattcaaaagtattgacttatataatattcaattttcgctacctttttatttttttcatacgaatactcttcagatcttgttcagttgaagtcaatccaaactttaatcatgagcttatcacaatgttgttgaagtacataaacatggaattaatttatttataatcgagttagcaaattttaaaccacacaagtaacatagttatacataattgtataaaaatatcgtatattgttgttatatgtatttatgatagtaaaaaagtattaaaatcttataaataatcagctttatacatgaaaatatataaattaatatttcgagttataaataaatgtaaccataaaaattgtaactatatattatggatctaattttatcaacaatacaagaataaacaaagaataagcatgtattagcaaaatgaacattcaatgtaaatattttttaacaattttcaaaacaaacccacgcgtagcgtgggtattcatctagtaataaagaaataaaaaaacttaaaaccataaaccttgagtaaaataaaaattataatgatctttatataattatctattcgatcacanaaactaaaaaaaatgatgagtatattaaatatattacaaaaat

SEQ ID NO: 20625 - DNA, 1366 bp, Arabidopsis thaliana landsberg
gaggagctttttctaggctccaatcgccaattgttgctgcttgggaagatgtgccaattaactcctcttgtgcaactcaattgcattacatgctcaatcctatccagcagcttaccataccctttgggaactttgtctattgagggaatcagagcatgcttcaaaggaacagcaagtgtcatcttcatgagaaattcatcagccaaaaaagagatagtatccaaatagaaagtcttcccatcgatggtaggcttcttaaccaccttattcatgtcaaactgcattgtaagatcacctacattcaagcctattctgcccttccttacatcaataatggcaccagttgtgactaagaaaggccttcccaagattagaggatctttaggttctttctcataagataaaaccacaaaatctgtaggaatgtagctagtaccgacttgtacagggacattgcatatgataccatcggatctacgaacagatcgatcagcaagaacaagagtgatttgcgtaggctctaaatctgtcaaaccaagccggagcgcaactcaacaaggcatcaagttgacactagaaccaagatcgcacaagcatcgatcaaaactctcgttaaggataccacaattgagaacaaagctacctagatctggaagtttctgtggaatcttgttctgaataatgtcgctaacctctgtagatatcttcatcacagctttcttagtaagcaaatctttagtaaccatcctcttcacaaactgtctgatcataggagaagacttcacagcatctataagtggcatctttacaatcaacttatccatcatagctttgcatctagcatcatctagctcctgtttggacttcctaggactctataggaaaaggaaccttgggttttgttacctttgctgcagctgaaatcgggatttgaagaattctaagatctggatgtagttggtgtcgatcgacacctaggtaatgtcggtcggcactgtctgtttcacctgcatttcatctcattaatagtcgttttagtgtgttttgcatagttaagatgattttgcattaggattgcatgtgcattgcatattgggttgtttccaggggatttggatgcttttagtgttcaaacagaggagatacatagaagaaagtcaagatactaaatcacaccttcacccaaagtactcgatcgcaaccttagagccatatcacgccaaatagctatatcacatccctggagatgctagtagctcagtttcactctatagcgaagccggaggaatcaacctctcttcatcactcgatcaccatgaagcccatgtactcattctgcactcaacaagacaagctgagcatacat

SEQ ID NO: 20626 - DNA, 736 bp, Arabidopsis thaliana landsberg
ctccaaacataagttgtgttaaccaacaagagcaaaaggaaagagatctaattgagaatctgcccggacagccttcagtttattttaagcaatatggcggttatgtgaccgtgaatgagtcagcaggtcgatcattgtactattatttcgtggaagccaccattaccaaaaactcatcaccccttgttctatggctaaacggaggtatgtatctaccatgtctctagttctataaaatgttttgcttttttcgttttcctattcaatgagaaaacagacaagctaactcacaaaattgatgaattatattttgtccattaaacataaacattatataagtatgttttaaaaatgcaggaccgggctgctcctctctgtatggggcatttcaagagcttggtccattccgcgtacatagcgacaacaaaacactctataccaatccttattcatggaacaacggtacaaaccttcttctaatagaatgtttagtttatcttctttttttggataatacttcttttgcttctctatatacgggtttttagctaaaagcccgtttcttcttattcacattggcagtggcgaacatgttattcttagaatctccggcaggaacgggattctcatacacgaacacaacaacggatatggagcatcccggggacatgaaaacagcagctgataaaaacgaaatcttggtgaaatggctggagaggtttccggaatataaagg

SEQ ID NO: 20627 - DNA, 601 bp, Arabidopsis thaliana landsberg
ctctcttcctacacttttcttctttctgcttgcaagaagtatctcatttgtcgtcctaacgtttagtttgagtgagtaacgttaagtttaagaacctgcttagttgctgtgtttttaatgtttctattcggttctttggtgatcacacttcagagaccttcaagtttcatgacatttaggagtacacgaagaaaataacgttttcaaactgcgcggattctataccgcagaattttacaaagatttagccactcttcttttaagtggaaaataaacagaattattccaaaccattaaaaactctgatgagaaaaacagagaatgttacaataactctgcttataatgaatacagacttactaagacctcaatgaccccaactgctttccttttggggcagacaaaaaaaactcgcaaacactaatcgattgtgagctcagaagacaactagaaggtgatcactcaggcactcactcctgactaagtacagtgatcactcagtcactcagtcctcactaaatacaagtctgcttatgaatgggcacatggctgcaagaagtgccttgcgacactcttcatgtggcagatgtccgcatactga

SEQ ID NO: 20628 - DNA, 1557 bp, Arabidopsis thaliana landsberg
taagagaaaaaactaaagggtaagaaaccgttaatattggcattttgtttgaaagaaagaaacaaagtttttttctttcttagatgctttttggaaaaagaaagcagaagaaaatagctggaaagtgttcaaatgccgattcaaaacaaaaggagccttacgtcaaaaagctcccataataggaccatctttttcaccataacaatgttagatgagatctaaaaagataagatgacaaataacacatgctacttcaaaatactgtctcaagatcatccatggatcaaacataaagcaaaataccaatagcactacaaatatctgtctaagtaggaaatatcaatctgaggcaaacaaaatatctgatcaaacagaacaagactgaaaaactgaagagtagagagatatatggtgtaatcataaatcactggcttggagaacggtctccattttgtgctccacgagggactggggtcgggctcctgctctgcctagggacagggctttggctccttgcttgttctggcgtgtagctcctgttttttcttgggctcacgcttcttcttgggcttctgctgtggctcttcactctcccaggacttccactgcgaacccttgagccattatggggtggtgagcgagagtatgacctctccttctcatatcgtctatcctgaggtgagacagacctgccataagacagagttggagagtagaggtggtttaatccatcagttaactgtaagaatatctgacagtatgaatttcacaggcatgcagagctagttacctagattgatgtcttttagcaggaggagaattatagccgcggctacgtgatcgtgatctacgaccacggcgaggaggagaccgagagtaccgaggaggagaacgtcttctgtcctggaatctgttgctcctacaaacatgaaaagatacaagttgagatcaagtcatctcattgtatagacaaactaatgcttttttctaggaagaatgtcaattcaccttccacctcgatcccttgttctcatctcagttggcttcttccggttttcttcagcaaatacgacagtcaactcacgaccaagaagaagataaccatccatttgatgtttagcctcagcagcatcagcaggatccataaactgaatgaatccaaacccccttggatctctgcaacaaatccaacaaacaaacaaaaaatctcagcctagaaccaaaaacacaataagcaagaaagatgtacagctttgacgagaagcctgtagaaaaagttggcattacaatctcctgcaatagaagccatcgttataaacatgaaaaagcaagcacttgcctgcaaaccttgcaagtttcagtataaagatgacttctccaagacttgatatctcttcaaattgaattcaaacccaacttgcttccaaccttcactaccatttagaacatcttccaaagaactctaattacttcattggtctcttaactctctagattcactgtaaacctaacaactttataaacagactcgagtgtgaccgacatggacatatactg

SEQ ID NO: 20629 - DNA, 758 bp, Arabidopsis thaliana landsberg
tgtttcaaaagatgttgtaagtaaacatatataatcaatctaaaaagaagctagtttacttatgtgatatgtaaaaactttgaataaagaaagcttgtcaaacattccaacattatagatggtattagatatttattcaatcaattttgattattacattcatttgataagagatagtgataataatacttttttcttacttaaggaccatcctcccatttgaaacagtatggattgctttttttatcacgaggaatacgacaaatagggtttccatcatctgttcctacttcccatatacattctttacaaacgggaaaacgtccatctggattatcatctctgtatactttaaaaatataaaagtaatgagatccgccattatgccaagtaaagtgacaacgaaatttcgtaattttccaaaagttgacatgaaagctgaaatcccatgtgctattccaaggaatatggaccattccaaaatcatcttcactggatctgcaatgtacattcaaaatttctttattttttaccttattgcgaattacaacatgttttttagttagaggtaaaaagccgtcagtgtccgaacttggtgattcggcaggagcattagaaaaatctaatgcatacacaaaaagaataagagtagaatagatcacaaataatattataaaatgaggtttattattgaaagtcataactatgtaaattaaattatgtaggtgtggttagatagaacttagaaacaccctatt

SEQ ID NO: 20630 - DNA, 1711 bp, Arabidopsis thaliana landsberg
  unsure (1)..(1711): unsure at all n locations
agtttaccattttgttagataacttattgattacaggtagacatttaaatcgtcatatatattagcagctacaagattgataactgtaatatatccataagtattctataaaaacacatactagcttcactanaatctagtttgcaaacttgaattagatcctaacatgttttaccttcttctcctggatcgtcgaaatatggtgggacgaccctttcatacaacacggttggtattgctttttcttttgaaatagatattttccatcctccggctaacctgggtatttaatgccataacttgttcttgagttgcaatgatctccccccttacaatgttgttaactctactcattcttggagtatttattggtgccatatagagcggtccgactgggtctgagtagtagtgttccacctcatcttgacctgtgtatatgatgaagaagactattttcagatgtgttcgttagtgttatgtggcaacacatatattattcaaaaatttgcactttacaagataacatacctatcctggccagacaattgttgctagataattcatcttggtccatcagctcctcactggagaaggttatactattcgatggtgtcttaaatgtcgagtatgttgaagataacgccactactgagacatcgccactagctgggtcttcgcttccaagggtaagatgtattgactcctccgtatttgaacttctttgccctctaaccacgttatcctgagcattagccggagtcatgtcgagttgtccacccaccgagctagccaaacgaatttctctattctgcatctctctctacatttatgcctgctggtttttcctccaaactgcaaactccaaatccatatatctctccttgtaaaggacacgttccttccctttagcggttgcacgtggttggccttgggttaggtttctcggtgcgacgcttcctacacccgtctctcccgcattctctcgtatagttatgcaactcctgcctaagtgggttccggcatcgttcttgtcctgtctggtaaccccagtcacactattactaggtacgttaccgaataacattcttgttattgccgaatccaaagctgctcttgtttcactactatttcagtacttatcggatatcgcttctgaagtcatacctcatatatctaagacgcctcggtttgaattaactgttggtgtacccactatcttccgtatggttttgaccttcaagtgaacctcctctagatcagaacaaattgccataaacaacgtcatatcctcgtcatcgagaatatggatcaggtttgcccgctgcaaatctgagctcatcatccactgcggccactgataggatagttccacttcatctttcaggcttagagtcagtctttccttcacagcttcaaccactttagcgaacgtgtctctctcatggagctttaccgccaagcataacccatctaactagactacgtgttcatagcatacggattcatatcttttccactctcctcgaaccagtctaacgatcatcgccatggtgcctgtcgataatcaaccataacggcaacgttagcggacaagtaggacataaattacaaaccctaagtcagggtgtactatttattaccctctacctaagttgaacaaagtaactcgagaattaactgcttacatgagtctccaataaattggattttc

SEQ ID NO: 20631 - DNA, 2717 bp, Arabidopsis thaliana landsberg
aaaaaatgttacatactttttcgataatctccaagttttgaaaacaactcgaacaaaaaaaaaaagcgtcactgcttgcgtcatcaacaaaacacatcacacatgactgacttaattacatgagaatatttttaccactttgaaataagaacaaataattagtaatttaaagtagtatatccgttgtagtagtagtagtcatgggggccacttaccttcttgcgattcccaattccccgcgagatcttattgtgtacggaagatgataccatttccattaactctgtttcatcttaaaacgcaaaacgtagcgttttacgcacaacttttatgtagtcatgatccctatggaccttaatccaatacaaagctctgacttggatttcgatatttaaagataattgtttgggcctttgatgggcctcattaatcagatgttttacttccctgatctgtggataaatttcttaaccaaacaaaactcaaaacccggaagatagatagagaaagcaacgtaaagatcatgaacatcaaaattctcagtcgtcaaaaaaccaaaaaaccttttctttcaaatttgataatctcttcagaagctaccaagaagaagaagagaaagaagagcgttttctaaatggaagaagagaaccttctcaatgagaaccttctccatcccaacgagtcctcaccggaagaaactcaagtcaccaccgtatcaaaatcgaaatggaccattcttgtactagccatgatcctcctcttggtctacttaaccttcggggtttgcacatactcattctttcgagaccaattctccggaaccgagaccaatcttttcgtcgacgctttctatttctccatcgtcacattctctacagtcggttacggggacattgtcccgtcaacttcaacgaccaagatcttgaccatcgtcttggtatcaaccggcgtcgtatttcttgattatctactcaaccgcgtcgtgagtcacgttctaagtcttcaagaaaacgcgattcttgatcgaatcaacaagacaagaaacagagcgattagagatcacattgccgaagatggcaagataaggttaaagtggaaactttgtttagcgttttgcgccgttggtctctgcgtcggaagtggagctttgtttcttcacgttttcgagagattggattggttggattcggtttacttgtcggttatctccgttacgacggttggttacggagataaaacgtttaagacggttgaagggagaggcttcgcagtgttttggcttcttctttcaactattgcaatggctactctgtttctttacttggctgagatgagaatcgatcgtactactgtcatgaaattgcccccgaggtaaacatttgcaactctgtttctttcattcgaaattctgtttttggttactgattgatttttcttgttgttggtttgtgattagtgaatcagagtttattgtgttcaagcttagagaaagtgggaggattagtgaggatgatataaagcagatcgtaagagagttcgagaatcttgaagaagtgccatcaagcggatcatgacaatttgccaaagatcacattgccctaactcttgtctggtactagatatgaaattgcagagatgcacatggttagtttttctttttgaattttagtataaaatgtatagaagaatcacaaaaatgatgatgacgatgctactctgttttgaccttgggacttgaaaaggaagaaaatactctgttactgcagtccaaatgttttttttgtatatgtgtacatcttttggcagtaggtttaactatttcatgacactttagtttatattaatttttcatggttataattatataagaacaacatgaaacttactccaagccgtgtaaaagtcgccataaaaacaaacacccaattgaaatagctcaagtacaatgatacataaacacaataaaccacaaaaacagagaaataaaaaagtgagcagataattggtttgtggaatgaagacagaaacagagtaggtaaaatttaagcttgaggtttgtcccacttgagtggcttgacgacttcccaggtgaagtcagggtcgtctctttcaaagtgtccgtaagccgcagtttacaagaaccttccgtttcctcctctctttaggtcaaggttaattgtcatcattcctggtctgaagtcgaagctctccttcacaatctttagtatctccttgcctggaatcaatccagtctcataagtgtccacaaagacagacaatggctcagggactccaatggcgtatgagacctgaacaagagccctacgagccatcccgttagccacaacgctcttagctgcttgtctcacaatgtaggctccgcttctgtcgaccttggttgggtctttacctgagaatgcaccgcctccgtgagctccccatccaccgtaagtgtcgatgatgatcttacgcccggtgagaccagcgtctccatggggtccaccgatgacgaatcggcctgaagggttcaagtggaagatggttttctcgtctaggtacttctctgggatgactggcttgatgacatgctccttaaggtcacgggcaatttcgtcgttggtcacagtttcatcgtgttgggtggagatgaggactgtgtggacacggattgggacatggcacccttgcattgtagtatcaacagtgacttgggtttt

SEQ ID NO: 20632 - DNA, 1108 bp, Arabidopsis thaliana landsberg
aaacacttatattttataaaaatagtaaaggatcacgaaagtttgcaatttaaaaataaaattaaaaatatttaggtcaatttttgtgaaagcatttaagtgttaaatttaattatgtaaaaatatgttaaaatatggtaccacaagacttacggatttaaggatgaaatattaagtctggtttgttttcatgtatttaaatttggtagaataattgttgataatgtcctttgcacactaccctttttcaattctacccttttctatttgccatttttatttctactctctttaattttttattcaccattttaccctatttagaaattattttatattaacaaaatgaaatattaatattttcgcctaaaatattccaaaataaaatttcccgccaaaattttcgcgccaaataaaatttttgttatcatttttcccgtaaattttttttttggcgagaaatagatttacaaaggattttaaaatggttttaaaatattttaaaagatttacaagagattttaaaagggttttaaagatttacaagagattttaaaagggttttaaaagatttacaagggattttaaagggctttaacagacttacaagagtttttaaaagatttttaaagggtttaaaagtgttttaaaatatttacaagagatttttaaagagttttaaaagatgtacaagagtttttaaaagattttaaaagaaattataagaaaaccctttaaaaactcttgtaaaactttttaaaacgttttgtaaaggtgcacaagagttttaaaatggttcaaaaagagttgtaaatgttttaaatacgtaccattctttttctaagagttaaaaaatgattgtatagactttataagagttttacaaaggtttaaaatccttgtaaatccttttaaaactttttaaaaactcttgtaaatcatgttttacccttttataagcttttaaaatctttgtaaatcattgtataccacttacttatcttttataagcgattgtaaaccatgcaaaccttttttaaaatcccttgtaaatcattatttgacacttatttatactttaaaaacgattgtaaatcatgttaaccca

SEQ ID NO: 20633 - DNA, 817 bp, Arabidopsis thaliana landsberg
cacctgaacacaataggtaaccggataaatctatcttttcaaaacttttatagacatagcattaactcatacatacattctggggtatgtgttttttgttcactttaaatatagttacttcattgcattataaattggcaattacatttattttagagttaaagccataatgctccagcacgtttaagcattggaacaagcgagcaattgagatggagactcatgacttgattggctccaccaacaagctgccctccaatgaacaccaccggcacggtcgggctgcatcctagctgagctaatgcttgctctatctcccttcctatgttgatctcgtcgagctcatagatagtcgggttcacgccaaagtctaagaagagagtcttaattgtatgagacatgcagcatgagttcttgctaaaaattactaccgatttctcagagatcatcttctgtaggttctccattgtttttgtaattctgaagaaagtgattcacggaggatgcaaatgtgtgtcttttgactgaaataagagactatactacaaaaaagtgtagagagcttataatctttgggtgaagataagagatgactttgagtttgtgtttgatgtagtgaaaggtctccaagggtcctttatatagctttctaaagggcgtaactttcatattacgggtctaaatttaatgtagcctttttcaaagagaatcaactttaggacataataaatatctcgaataataaataaaaaatacacacaaaattaaaatttagatagtgggaatatctcaaagattagagcctaataaggagggt

SEQ ID NO: 20634 - DNA, 856 bp, Arabidopsis thaliana landsberg
tcacaaaacattgtcgtagaaaaaaacgacaaaaaggggttacattgcgtattattttagagttcattggataattattcattttttggaggtggagaataaagatgcaaaaatagatgagttagagggtttttgtttgcacaaaatcctaaaaataacaaaatttgatttgatatgtttggatatttcactaataaatttgacacgtgtcacgatcacgtgagttaacaattttgaaaacccaactttatgtagatatttagcacatatattggattatgttcattgttttcataaccgatccgaactgctctttccaaccgtttaacccgctatccagaaactcttctcctctaagtttagtgttaacaagtcatggagaacctcatcgtatagaagttttacaaaccaaacctttagattgattcaaataatttcacgaagaaaatattataaatcgatttatttgtttaaatttggagatataaaccgatgattgattaattatgtgaagctatattacttttattttctctttgtagtcaatatttcttagttaatgttacgtgtttcacacatggagtttcaactttattaaatttataaaacggctaatcaaatacctaattaaaatattcaaagatgtgaaattaaaaaaattaatatgacagtttcacatttcaatccatataaataagcaaggattttattgttatttatcaatcaaaaacaaacaaagtattaagcatatagttgctatactaagactttttactcaatttctcattatgtttatcaaaaatgtgttttcacttctagcggttctatgtatcatagtttctgtaaatgctcaatt

SEQ ID NO: 20635 - DNA, 443 bp, Arabidopsis thaliana landsberg
tttctgatatgtaataaacctgttttactttgtagatgattccttattggtgtgccgcgcatcctcagtgctgggagcagatggtggataggtggtgctcgcgtgagtgggatgaagcgcacaacgctagccaggaacggtgtgtgatgatgcaaggtccctcccaccaccaaggcagccgcagcctcggcaaatatgcagaagcatgggtacaccctcttttttattttggtatataacactggattagatattatttctaactatctcgttggttttcttgcagtccgcgtcacatggtggccagccttgctccatcttctcagcttatgctatggcccacaagggcaaggcgacgtccgatgtcacctacaacccggatgatgggcccgaggcgtatagcaacctcgccgtctacacccaccttcatgagtacactgcca

SEQ ID NO: 20636 - DNA, 1445 bp, Arabidopsis thaliana landsberg
tttcctgccttgcaacttggagtcgaggtgccccgttcttttgaaggcgtcgtaaaagagtacgtcaactgagcttcccgtatcgaccattatacaggacagttcgtagttgcctacatcgattctgataacgagagcgtcatcgtgaggtttatcgaggtcagtgacttcactttcccaaaatgtgatcccatcatcgggctttttccttttgtgttggaatctgctttcctttgatgagttttgattgagttgatcgaattgttgcagagttgagatcctcccataatgaaatcgatgtgtttcggggagaggtgctcagttacttttctgcaaaattttgagaggcgtaatgggaacatctagtttttcttttccgacgcgggaggaggcgtagtgactgacctttctgtcctgcctcctagatcgagctccgcaaagactaggtctatgggttcctcccaggcaggtgggggagagtcacctcctttcggtgttcgtacccgtttctttcgtttgggagcttgttcctcctcctgctcgtcgggaggagggatttcagccttggagtttgaaccttttttagttttgcccccgactgcaattaattttttgacggcgcaacactcctcggtagaatgtcctcttttttgtggtacttgcagtattttttgaggtcaagttcaagagtttcgtcctcggctgcctgttttattgcgaataggggatgctgcccttggatttgattttcctttttcaagggttttatagttgaaaaggaagtgttttgtgctttagattctttgaatcttagggctaaaacggtgagttcctcttcggctttggcgaaatagagagctttgtgaatggcattgtagtcacccgcataagggcatcgggcacatccaaaagaccgaatgagaaaattttgcccggatgcatagccaatatacccaaccggtgccaaaccatcaaagggcaagaatgggcaagaataggcacgaatggggaaagatgggagaagttaggcgtaccgcaacaaagtttgccccgccggccttgaaaccgacttgagtagacacctcacttgcggtgcctagcggctcaagtaaccaaccttggagccgaagtcgactgagtcttggagccaaagctgatggggcagtggagtgacaccggtcgccacgtgtcgccacgccatcacccgagacacctgtcgcctgtgggcgcggcagctgtccggaaatgtggcagcggacaatgcagtcaggccaaccttggacggactataaatatggctctctccgcccaatttcatttttgaaggcgagagagagagattgtaaggttgtccccctaataactcgtgtgaaatcaaaaaactagcccaaattcagaaaatcgtcgcccgtgttcgaggagacattgtgcgtatccgagaatgt

SEQ ID NO: 20637 - DNA, 1247 bp, Arabidopsis thaliana landsberg
  unsure (1)..(1247): unsure at all n locations
gatcgtcggatggatcagatcagccagacggattggatcggatagaccgatcgtcggacgggttggatgggacnnnnnnnnnnnnnnnnngaacgggtcagacagaacgatcgtcggatgggatagatcgagaaaagtgttcgaggaagcacgaaggatcagtgcatccaaacacacccaagggtcgcccatggatgcaatcttaccggtacagggagaaagcttctcgaatggttaaggacacgtgattcaacatataggatcaatatcgcggccgccttcatgtatctatctcctcagctatggtgaaactgatcagagatcggtaagaccaaagggtgactcgacggataactaacgggaaagtccacggtaggaaccgatggacaaaacggatgttggacccgtgagcaaacctaaggccgacggaagaaggatttcatgggctagcttacgatgatccgatggatgaatccacggacccttgggtgtgataaggatatagttcggatcgtatggatggatcaataagccgaaagctttatcgaccaccatagaccggacggataaacggttagtaaaccgtgggcggtcgtagtaaacgaccggatcggaaacatggttggttcgataagccaagggttcaatcgtccaccatggaaccgaagggncgtacgtttggaggacggatggaccaataagccaagagcttgattcggccatcgtgaaccaaggaaatcgtacgatcccaatctctattgttgtcttaaccagtggggttggttggttgattgtatggctatgatttacaatgtaccactcggatcttgtgttctatggagttttctttgtttcttatgaatctattttggtttacttttataatgccattgagatcctgtttggttctaagttattatcaagattcaagataaagatgttaaaagcatgaaactgaacctttgtgtcggaaagcaaacatgtttaaacttacaaacatatcatagagctcatacttgacatcgacaaactcaatactatataggttgttcagttttcactatatgagcttgtgtcaacaactatttgagcttgcctccgacataattcgaacaacaacaatcgttttgagttttgtgatgaaccagatctgaagtgggcttgcgcccaaccccattgaaagaatgtctgtccagtccatgaacgcgagaataaacaaaacttaaacagctcccattgcggcttac

SEQ ID NO: 20638 - DNA, 1744 bp, Arabidopsis thaliana landsberg
ggcgagaggaaccttgcactccatgaagatgttctctttttgactttttctatgatgtattcaaacatttctttcttgtttcttccaaattgttcaggtaagcctaagtgttttcccccgcctctttggtttggtatgttaagaatgtcatttaatcgcgctcgtgtagaaccatacacccgtgatccaaaggttatcattaatttttgaacatttattttctgtcctgaatagtattcatagacatcaaaaacatccttcaaagcctggcaattcttcgcattagcttggcagaaaaataatgagtcatctgcgaattgtagatgagtgatggccggtactccattaccaatacaaactccctgtagttccccgcttgttgctttttttttgatgagatgacttaggatatccccacagagaataaaaagatatggtgataaaggatcaccttgacgtatgcctcttgttggctttatatatccatgtggtgatccattgatcaatactgagtagtgaactgattttacggccaccatgatccagcttatccatttatcacagaaaccaaaaagacgcattgttgtttccaggaaatccgattctactctgtcgtatgctttactgacatccgttttcaccgccatataagttttcgaaactcgctttcgaactttaagtgaatgcataacttcatctgctatcattacattgtcgttgatgattctccccggaatgaacgcagcctgagagtccgaaactatcgagttcaagtgaacttttaaacgattaactaagcacttcgagatgattttatactgaacattacacagagcaatgggcctatagccagacaacgttagaggattattgattttagggatcatacaaatatttgtatgatttatattagacctcatgtttgatgtcgcaaataaatttttgacctctttaaccacttcaactccaacaatatcccaacattgtttgtaaaaccttgcagtcaatccatctggacccggggctttgtcatctccgatttggcaaatagcctcatagatttcattatcagtaaaatctttcgtgagttctagattagccgtttgtgtgactgttttgttgaaatccgcaaagttcagtggagaaacttgaataccattagagatgaatatgttagtgaaaaaatcttgtgcatgttctccaatctctttatcagccgtaaacatatgttcgtggtcatcccttattgaactcattatgttttgtgaatatcttgtttttgcacacgcatgaaagaagcccgtgtttcgatctccctctctcatccattggttgcaacttttctgtttccagtatctctcctcatcactataagcctttgacaatgcttattggatatgtggaataaacctccgttatgctctaaagtacttgccatagctctgttcaatctaccttggagtgtttttattcgctcatcagagttcatgttagacatgtgttttagccgtgccattgcccttctacaactagcgatgcgttctgttatcggcatgtgatggggagtggttgtggatttccagcttgtgtgaacagtttgcttaaagattggtatatttaggatttgtttatcgaaacggaacagttatagtacttgaggccgctgaatcattaatatgttcaagaattggtcggtgatctgatcccttgtattccaagaactccgtctatgcattagcaaaag

SEQ ID NO: 20639 - DNA, 1299 bp, Arabidopsis thaliana landsberg
ctttctaaactcaaaccgaaattcaacctcgtttaattttattatttaaacatgtttataaattcaaacgtacagtaaaactcgtttaattataaaatttaaactctttataatctacaaaaaatatttttaatctcatataatcataaatttaaatcctaaccctctcttatgaaatcaagctgatatataattttgtattggtggcaagttagattatataactaaataaatttattttttatatattaggtgacaaattttaattggctggaaaaaaatagcgtgaataaaaagatttatccataaagatgaacccaagtatttttctaatctttaccctaaactaaaagattattaacataaaaaaattcgattaagtccataaaaatatgatgtaatttactattagtgtcgtttttgcttagtaaatgactaatgagatgatattttacagctagttgagatatctctaaacacatctctttgtgtcgaccaaatcttgccttaagcaaaggccaaaggcaagtgcagaaagtttgatcccagtggatgcatcgccaataaacggcccatattgaatcataattaaacatgaattatgattaggtaagtaacgacacgtgtatagaatgtgtcttcccctaactacgtgtccaggattggcgcatcgctgtcaaactctccggacgtcgccagacatcgccggacatcgccgaaactttgattaacagccgccaatgagtcatggagcgatgtgtatccgcctgccatgtgtcgacctcgaatccaacccaaaaggacatcgaatctaccggattgagagacaatcacaacttcaaaaagtttatgtaaaacaccaactccagggaagctccatcaccaactacacccatcttgatgtagatctgaatccaacgttgctctctcgtctagagcaaaagacgctatgaagatgttactcctcgatcaattggagaaaacagaaaaatctttgaagagaaactggtgaatcgatggaaagcgaggatggagggagatcgaatcccgctaaaagcgagagaagaaaccaaatttaaccggtagaaagatccgactgtaaatcagaatttattgatctcgaaaacgaaaatatatacaatccggattacacccgaaccaaaagaacctacgccatattgttcctctctgaaagaattttagtgagagaagtgaagaaagttggagagaggtttagtttttttttttctctttaaaacacatttaatatagctaaaatgatttattatgtatgacttt

SEQ ID NO: 20640 - DNA, 799 bp, Arabidopsis thaliana landsberg
ctccggtggcaaatgagtagataaaaatgtcagcagtcatagtcccggagatgaaagaaaggacgatagtgtagataaatatgttggttatctcgatgaacaatccgcatgagattgctagccgtccgatctcagatgtgtgcagtttccaatcgatgatcgaacggatgacgacaggagctgccgtgttggacaaggtaatgaggaaggctaagtaaaatgttaagaaatcgcctttgatctgcatgaaacggatgagaaaccagaggaaaggaagccagatgatgccagaaatgactaaggagcccaaagttatgacaatggagttcttcaagtttcgtttcatgaagtcaagatcgatctcgagaccgatcaagaacacaaaggctgttcgtaaaaggaatgagaaaaagatgtaatagcttgctgaatctttctggaggaaaaattcgtggactttgcggattattgtgagcagactcaacacaatcccagcctgagcaaaaatgattaaaacgtcagttttttctgaatgttataatatgtcaattttcctgaaacgaaaccttattaacatcctcgtgtttcttgcacaacaggctactcttagggtttaagtgcacactcgtaaagttcagggagtaaattttgtaaaaaaaatagaaatcatggatactataataaaacgtcaatttatgagtactataataacgattttgtgcatgaattttacttgggtttgggtttcactatcatagagtttaggagtcaaattgcgaaaaccttaaaacaaaaaaaa

SEQ ID NO: 20641 - DNA, 1599 bp, Arabidopsis thaliana landsberg
ttagactcgcataggaatatcgaaaattcctaaaggtttgagatcgaactcattaccttcgttcgcaccgcttcgacggaatcaatagtttcgacaacttggtttcgtcggacgaccagattaagccgagctccgcgctcgcaccgtttcgacacgatcaatagtttctacaactttggtttcatcggacgacaaattaagccgagcttcgcgctcgcaccgttttgacggaatcaatagtttcgacaactttggtttcgtcggacgaccgattaagccgagctccacgctcgcaccgttacgacggaatcaatagtttcgacaactttggtttcgtcgggcgaccgattaagccgagctcctcgctcgcaccgttacgacggaatcaatagtttcgacaactttggttttgtcggacgaccgattaagccgagctccacgctcgcaccgttacgacggaatcaatagtttcgacaactttggtttcgtcgggcgaccgattaagccgggctcctcgctcgcaccattacgttggaatcaatagtttcgacgaactttggtttcgttagaataatcccaaagttttgtgatcgaattcattactttcgcttcacaccgaaccggggcattcccccaaatcgaatttgcaggaataacaaaacgtcctaaaggtttgaaaccgaacccatctccttcgcttcaaaaacgacgcatcaatcgcaatgagcgccgagctcaccatcgcacgttcaacgcttgcacactcaaccgccattccgattcgcaaaaattctcaaatgacccaccgagttccacaccggcattgtttttcaaaaaaaaaagggtgggtatatatatatatacatatatatatgtatgtcaaacctacacctccgtaatcgctatacaaatcatctcaacgccgttacctccgaagaattcaccgtacaagctcgacgcttacaccatttcgacgaactaaagctgcctacgattgcacttgcacatttgaatcacagcagaagatcgatcatgcgctcatcttaaatgacgcaccgataaagttgtactcgccgatctcaatccttaaacgaaacgcacgaataacgaagcaacgttctatgatctcagccgtcgacgcccgtggtctcatcatgcactacgacctgagcaatgattcgttccccgactcgaccttcttggccatctcgtccatctgcgtgatcgtcatcttccttgctactctgaagcaaagcagagtaacaaagttcaaacctgagctcggcaaacagagtttaaacgccaaatcctccgaccatgagatcacgaatattaaaggatgtcacctcagccttcaacaattcaacgttcgcatccaatcttgacatcatctcgttcgactttatcttcacctcgccgccttcaatcaacgcctcgagagtcttgatgtttccatacacgatagaattcaaaaactttggctccgccaccttcgtatcgtcaatataggtcttgatccgatccaatcgcttctcgatgagctccgccatcttatcaaccgccgaccttcgaacaaagtcgacatactccaaccgacgc

SEQ ID NO: 20642 - DNA, 456 bp, Arabidopsis thaliana landsberg
ctaaagtctccctttcgtccttgctgaaaaacatgataagttaggaactttctataaagaccaattcggattataacttgaagtaagttcatacctgaagagaaagtatgaagaagcaggcttctttggtttgttagggtcaacgttttcgttcttcttcttcttggtcgccttctccttctgcaagagacaaataattatgatcctgtgagtctctgagttgaaatagaccttggtgagttaagtgtgagtgagagagagttattaccttgatcagattatcagttttctccttcttcttaagcatttgaagagcttcttgtttgtggagtttcaagagttcctcttcttctttcttctgactcagggcttcttcttcctttgtcctcttgtattcctccattgctggccggtatgtctccttgttcttctttgccacctatttaaacaagaata

SEQ ID NO: 20643 - DNA, 1200 bp, Arabidopsis thaliana landsberg
cgacgaaggagatagatatatatatacgtaaaccattttatttttttgttttctttacttgggcttcaatgggctcaggggactgttattcttaacaaaacaaatagggtgggttcaaaggattgggtttggggtgttacacaatccacttaaatctttcattcccaacctagtagctagtccaaagatgttccaaaagctagctaaaaacaagagctaaaaccttgtcgttctcaatactttgaagatttcaaaatctatagcattttcatacaagaggcctcactcacaaatagtacataggcttgaaagaaaggttttaaggttaagggtagggaaaaccattctaaaggtgagaatggccattcgggttaacaaaagattggcaaaacgaataagataacccgaatgagtcttttagactaccatgagaatgcatttaggatccataagcgagaaatcaatatcaaattaagtccaaattcatagagatatttcaaaagtcatgtaagcttcacacaagtagaaattgctttcgagaaacgcaaaaatctaagcaaggattttccattttttccaagatgatcaagcaacgattaactgtgattaagggctttaagttcaatcctaagcttgaatttctacaaggtaattaaatcattatcccctatgcaaatgcaaatgcacactagatgcttctagactcaatcctaaaagagaaaattaatatgcaaacttacatgattttttttggatttttcaaaattttcagatttttttttatttttctcaaaacatagatattgaaaatgcaagactcaaagaaataaaatcaaaacaaaacataacgttagatggttagtctctcccccaaacttatttcaccttctcgatgtgagagaaaaatatgaggaaaagactaacgaaaataaagaaatagaactaaaagaaataaagtcgtatatacaagtgataccgtggagtggctaaggcatggtggagtggtctctcgaggcgttcttcctcctagacgagtgtgatgaagtggcgggcgtttcattattctcatcactctccaaaatattgtctctatcttcctcttcatttgaaggacaacaagctcatcctcggaagagacataatccggtggttggagcatcttcacttcttaagtagcttcgctatcgcataagattgcac

SEQ ID NO: 20644 - DNA, 398 bp, Arabidopsis thaliana landsberg
aggatacataatttcatttgataaaaaataaaacagaacacatgcaggtttggattttcgagcacatacaattttattttttaaaattcactagctatgtaatattactatctacatctttctatatttagttaacatgtacaatttgtgacgtgagtgatttctaagacaatctccaatggtcacttatatatttttctttattttagaggtgactttattttaaaaatattgtgatccaatagtcacctctaaaatagagtttcttcaaaaattgaggaaaaaatagagttaaattgtagaggatcttattttttttctggcataaaggaaactctattttagaggcatttgactattattggacacctgcttaaggtgggggaaaatattagaga

SEQ ID NO: 20645 - DNA, 560 bp, Arabidopsis thaliana landsberg
aggaatctgggtttttcttcaatatgaagtattttgaggatgttgtttacaatggaaattgggatgaggttgagaggggtctctctggattcactaagggggatgataatagatactctatgaagatattcttcgagataagaaagcagaagtatctcgaggctttggataagtaagtcatggttggggatttgtttttttttttttcctttcagtgagatagcaaaagaaaaagagtctgatttgtgattgaccttggtgacttttttgttggtaggcatgatcgtcccaaggctgtggatatactagtgaaggatttgaaagtgttttcaacttttaatgaggagcttttcaaggaaataacacagctcttgacattggagaacttccggtaatgttatattggattaatgtagtgtccaaagcctttgttttcttagccgtagttcaaaagaaagattgatgcatagttttaagtgtttcgagtttgatcaacttttagggagaatgaacagttatccaagtatggggacaccaagtctgcaagagcgatcatgttg

SEQ ID NO: 20646 - DNA, 1164 bp, Arabidopsis thaliana landsberg
agaaaatccgggtttacgtttttttggggggaaattacgggtttacgtttttggcgggaaaatcacgggtttacgtttttttgccagaaaaattacgggtttacgtttttggcgggaaaattacaggtttacgtttttggcgggaaaattacgggtttatgttttggtgggaaaatcacgggtttacgtttttttggcggaaaattacgggtttacgtttttggcggaaaaaacacgggtttacgttttttgcgggaaaattacgggtttacgttttttgcgggaaaatcacgggtttatatttttttggcggaaaaattacgggtttacatttttggtgggaaaatcacgggttttcgtttttggagagaaaattacggttttatgttttttggtggaaaaattacgagtttacttcttctcaatttcatcgcttgtatatttaagaaatttggaaaaatattgattttattaaattggtttagatgtgttggttcaacttaaatggacattggtttagagattttagttggtttaattcaattttacaaaacttaatggttaattgggtaaaccattgaaaccattaaccattacaacccaacttattttattcatcaaaccaattgatccaataactcatttgacccatcaattcatttgagtcaaaaatttcaactcattagggttcatgggttgagttgagttgagttgacccataaattttgacccatttttaacacccctatacgagatataaagatttatatcattttaaactactttccaaaaaattataattagtacttacataggtaaaacaaattaacaaaaaaaagtttaactaaaaaaaggacatataggttttagtaggcaaatggccaattccaccccaaacttagttgctttatcgtatccacacataaaactttgttgtgtgcctaaaactacataaactcaagataagaatgaattttatacacgaacaaaacgaactttccattacagccacaaatgtataaacgcggatgatgttccgataacctaatattgactatgatgacgcgctgtacacaactcgacttaaacccatgccctgatagacctgagatcgcgctctttccgtatattctactatgacaattaatatgattgcaaacaaat

SEQ ID NO: 20647 - DNA, 621 bp, Arabidopsis thaliana landsberg
ctataaggattagcctgagctccgttctgacaattgtaataagacgcacctcttcttgaacaaggcacactgttccgtttcaaagactgatagcttatgtattttgtggtcgccaatattcttctattgatctctgagtccatttcttcttcctccgccccgatacactctgctattgaaccgtggcagcctgaaccattgtctccagtcgtagcccatgctacaccaccgaggtcgttggcgaagccggcttggaccggaggtgaagagatgatgaagacgacgagaatcgtaagagttaagaacagagtaaaggacttgtccattttcttgcctttctttgggttcttttgtttggttattattgcttaagttaatgtttatatatacatggtgagtgcgtggactcgattttttaattttggagatgttgaagaattttttttctctttttttggtatgggtttcaaaatctattttgtgaatttattaaaagtttcagtatttatttagaagaatatgagacatagcatgacaattacttgttgatttcaatactaataacaatttctctttggtatattaaaaatttggaaaattttacccacccccttgtttaaa

SEQ ID NO: 20648 - DNA, 1759 bp, Arabidopsis thaliana landsberg
gactttattatggctttttcttataattttatcattccttactttgatcttatcccgtgtcgttaccagataaaaaggtcacccaaaaataaatgaaatgtggcattttatagatgaaataaaaatatcacaaattaaaaataagaagttattaaccaactcaattaaatatgtacctcactaattaagttatataaataaagtggacggttaaattcattttggtttactaacgtaaaatacattaactattgactatgaatagcaaagaaagaaagaaagacaaaaagaaaatataaaacttttttaatgtatatatattgtactatagtctggtgtctgattcctttttcttataacgtagactttagtgttaatcctcagagcccaaggtatcgtctgagccattccgctacttcattccaattagtttccctgtacatggcaaagacatatgttcaaacaaatggtaatgaaagcaaagtaaagagaagtaattcatgtttagacccttgatatttttttaacatgatttggatccagtcatgagaagggaatgagcacatttgtgtacaaattcgtatggaaccacatcagtagctgtgacacataaaattccaaaattagcatgatctcgtgattgttatctaaattgtagaaaagttatatagatgatacacatacaatgtgtaagtaagattggtgttgattgaggttgaggacgatttggagcccaggggttagatgctacattgttttgtaagcttctacaagattgtattaggtttctcatgtttaaaatgtgagtctaaacattagtacaaagtgagtgacagtaggacttgaagactctacctccagccaggaagccatcctttaagccctaaaacaactcgtggctttatttgaagccgttgattagtgtcatagcaacccttactcgcaaggtagagagcttgcgctgcaccaaagcccatacctcctattcctatcatgactattcagaccagagatttataaatttgatatatatatataaggtctaaagtatgtatattaatttagagtgtaaaaaagtataagttaccgtttgggggttcttcagataaaaggttagcaatagataaagcagcatgatttaatgacgccacatcatcttgcatgttttcagaaagttctgcggtatcgaaccctgattcaccaaagaagattgtagatatagtattgttaataatataatattagcaacattaaatgatgtttttgataaaattttaagtcaagtgatcttacatgcattggtttccattccacctaggatagtaagggggcgtctaggagcagttgggcaaatccacttaacctacacagaatcatatatatacttattcttagaaacttaaatcaaatttcttttaggatacaagaattgtgacaaaacgttcttgttcatccatccatacatttttaagacccatctgtcttgcaaatcgagttgaactgcagacataattgatatagaggtatcagagccggaccaatgaaattcggggcgctatttaaattacgaaaataaagtatttttgttttaaaaactatagagtaaatagaaaccagtttaaacaaaactctaaattatttatttgaatacagtgagaaaaacttcgaatacaaagacgaacaagattcaaagtatatacatttttagtgaaatgagtttaaatatgtcttagaaaagattaattcaatacaaaagata

SEQ ID NO: 20649 - DNA, 3607 bp, Arabidopsis thaliana landsberg
aagttataacaaaaaaaaagggtttgtaagaaattttgaaaaattcaatggctgggtttctaactcgtagctgttattataataatgcatcagaaagtgtttctgcgattttaatctcatcattaactctcttaaatcttctatttctatatttagttgttcttattttttcaactagttacatacaaatcttgaacttattttacgttggtcgttccttttggaagttgaaccttgtacttctagttctagtttgaaatctttgggggaaatgatttacgtaaggtcaaggtcaagtattatatattaacggttttaacaaataactactattaacggttggttctaaacctagaaaaactacatatttaagtttagaacatcttgcttgataaaaaaaagtatctatattttgcttaactatttttggttttatgtatgaattggtatattatatatggacatactaaaatgacagattaagtttttctcgaaagcaaaaaaaccacatagaattcattttaaaagggttttagttaatatctttttttttttgtagtttcatgttcgagagttatacatttttgggaaatcacatgatgagactttaatatgcttctcattggtgaagttttattggttcatactagtttattaacccccattacgcaggggtttgttgttatcgattctttaaatttattttttggtttagtaatcatttaaatgaggtttgttgttatcaatttttaatatatatttcggtttagtaatgcaaaagtactattataatttgtttttggtttttttcacataaatatttttatataaatttttagtatcatttacgttatttaacattttattttaataagaaagaaaatatatatcggattaaatttaggtatgaaacatattacaaatatgatgtgtcattttctcttacttatttatattatcaaagacgttgttgttaatatagcaataataaaaatattttcaaaatataactgaaaataaactaccaaaatatgtacacatttggacatacaatatatttctcttacttattagtaagattttgtttgctattaatcaaataattaaagagttatattttttttcactaaaattccgggttgacatctccccatttttaccctttttatcaatggcaagagttaatttgatttttgtgatgatttgaagaattcttttgggtttgggaaaaccacgatatcctcaaagacgcatatgtaagctgctgcaaaaattaaatattaactgattaagtctaatcaaatacggatagctccctatcattacaagaaaacaggtaaacgacgactataatcagcgacaacaaacgtagtcataacattatacgactatttggcgacggatttacgactcgcatgcgacaacacgaaaaattgtagttacatagtcgttgttttacgactatcgtatgcagtcggcaaagagtcggcaaataacgactatttgacgattatattatggaagggataatgttgtcgttgcttagtcgctaattaacgactattctaccgtctattttatttagtcgctaatttggcgactaccggacgactagacgtcttagtcggcctgtagtcgtagaaacgtcgcaccgtagtcgtataaagtagatggaaaacgtgtttcgcattggtaagtaagtacacctaattatttagttgtagtcgtaaattagtcacaaaaattggcctatataataaacgttcacgcaactcttctttcaccaacaaatcaaaacaacaacaacattaaagagaaaaaaaaaatattagttactttattgtataatggcgggaaactacaattatggcggtactggcggtttctatcgagattggatgtacaagagatttgatgaagtgacggggaatttgtcagccgaatacgttgcaggagttgagcaattcatgatattcgctaatagtcagccaatagtacagagtagtcgaggtaaatttcattgtccttgtagtgtatgcaagaatgaaaaacacatcatctcgggtagaagagttagtagtcatttgtttagtcatggatttatgcctgattattatgtttggtataagcatggagaagaaatgaatatggatataggaacgagttacacgaataggacgtattttagtgagaatcatgaagaagtgggtaatattgtagaagatccatatgtggatatggtgaacgatgcatttaattttaacgtggggtatgatgataactatcgtcatgatgatagttatcagaatgtggaagaaccggtccgtaaccattcaaataagttctacgacttgttagaaggtgcaaataatcctttgtacgatggttgtcgtgaagggcagtcgcaattatccttagcatctcgactcatgcacaacaaggcggagtataatatgagtgaaaagttggtggactccgtttgcgaaatgtttacagattttttaccagaaggaaaccaggcaaccacttcacattaccagaccgagaagttaatgcgcaatttaggacttccatatcatacaattgatgtttgtcagaacaattgtatgctattttggaaagaagacgaaaaagaagatcaatgtcgattttgtggcgcgaaaagatggaagcctaaagatgaccgtcgacgaaccaaagtaccatatagtcgtatgtggtatctacctattggagaccggttaaaaagaatgtatcagagccacaagacagctgcagcaatgcgatggcatgctgagcatcaatcaaaggagggagaaatgaatcatccttcagatgcggcagagtggagatattttaaaaagttacatccccggtttgcggaagaacctcgtaacgtttatctcgggttgtgtactgatgggttcaatccgtttggcatgtctcgtaatcattcgttgtggcctgtgatcctgactccatataatttaccccctagtatgtgcatgaatacaaagtacttatttcttacaattttgaatgttgagccaaatcatcctcgagctagtcttgatgtcttcctccaacctcttattgaggagctaaaagagttgtggtctactggagttgatgcgtacgatgtatcattgagtcagaattttaatctaaaagcagtgctactgtggacgattagggactttccggcgtatagcatgttatcaggatggactactcatggtaagttgtcttgtccagtttccatggaaagtacaaagtctatttatctacccaatggacggaagacatgctggtttgattgtcaccgtagatttcttcctcatggtcatccatcccgtaggaatagaaaagactttttgaaaggaagagatgcttctagcgagtatccaccggagtctttaacagaggagcaagtttattacgagcggttggctagtgtaaatccaccaagaacgaaagatgttggtgggaacggtcatgaaaagaagatgcgaggctatgggaaggaacataattgacacaaggaaagcatcttgtgggagttgtcttacaggaaggacctcaatcttcgacataatattgatgtgat

SEQ ID NO: 20650 - DNA, 716 bp, Arabidopsis thaliana landsberg
agcagctctctcagtaaaaagccctctagcagcaatcctacaaacaattcaccaccttcacaaagctccataaccaaatgaacagcatgctcatcctcataagtctccttcaaagtaacaacattaggatgctcaggcatatgcctcataatctcaacctctctcctaacatcttcaatatcaacagctgtcctcagcttcttcttcaaaatcgatttacaagcaaaaacgtcgtctgtctccttatcagtacatagatacgtaacaccgaattctccacgacctagctctctccccaacgtgtatttagactcgatctcacgacctgttggatcattcaaaacgataagcttaagaggtcttccacctccatctccaccaccgtggtgaagaccgtaatcaatcgagaaagggttttgcttcttccttccttttttgggtttgttatcgttttgagccaatgatcctgctgttccgcaacaattacccatgacttttccgatcaaacccaaatcaaaaccgatgaaacttgagagattgaggaccaaattccaggaaagtaggaaactttaagagaattctggaagagatggatgagaaaaaaaccaaggaggggaagaaccatatatgaaagggggggaaattttcaacgcgtgaataccaagaaggaacggcaaaatcattttgttcgcaaaattaaaaatggccaaaaaatt

SEQ ID NO: 20651 - DNA, 595 bp, Arabidopsis thaliana landsberg
gtaatccttttaaccgccaccatctcaaaccgtgggattcttgcgcaaaaaatgcaaaacatcaccatctgctggtagtctgcataagtcaaattataggtcaatagcacattaagaagttaggacaaaagtataatctgttgagagtataagcatttacgattgactgaaagcttcaacttcagggaagtcagcattgacatgaacttgagatgtatcaaaagagtaggacaaagttttcacacctgctaattcatttagtataagttattatagaacacatatactaaaagtaagcaatataatgtagcaggaaataactatacctttatatgccataattttggcaaaacgaatgagaaaatcacattctttccttcaagttcctgacatgctctgaaaacctgttgagcgtatgatctccacaatgtaatttccattctctcatccctagtagaaccaatgaataaatataagcatattatatttgaacaaaatacataaactaataagatagagacattacctttcatctctaatttcaaagttaatctttgtagtcggcttattgtagtctccaattgctccaactcgc

SEQ ID NO: 20652 - DNA, 245 bp, Arabidopsis thaliana landsberg
agtatatgacatgctcatatcctcggcacttacagggaggtcgtaagcatgcgaagtctgaacatgcaacaccgcttaaggatgcaataaaaaaaacagacggcgaacaggagagcaagcccagttcgcttgtagatgaacatggctccatgcaaaaggaaaaagggttcaaccattatggtaccgagacattgtatagtgggtatataggagtagaactgaagtgtgagatatttatggggcct

SEQ ID NO: 20653 - DNA, 1218 bp, Arabidopsis thaliana landsberg
ttgaaggagagccagaagaagacatggatgaagaagttgagccgtttgtgacgataagcgaaggaattatacaacatttcagtcatgaacatcatcatatgaagcttgatgtcaacacggacagagattacgacgagaataacttgtgtcaaccatgtaccacgccaatctattttggtaacttcttctcctgtatgcaatgtgatttcattctccacgaggaatgtgcgagttttcgtcgtaaaatatatcacccgatacatccgcatctgctcactctatcgagagcacacaaaagtgaccatcaggagtttttctgttcagcttgttcttcgtcgtgcacaattggtttcttctatgagtgtaatgaagaaaattgttattttaaggtacatgtggagtgcgccacaatttctgagccgttagtccatgaaagtcatatgcatcctttattcctaacatccaaacctgaagaggatccaagaagatgttcggtttgcaaagagagcagatatgctaggacaaatgaaacattcaattgcattgagtgtgactttgctttatgttttgtatgcgctactttacctcaaaaggtgaggtataagcatgataagcatgtgctcactcttttttatgggaacgagacaagtaccataacgtattggtgcgaaatttgcgagggaacaatagatccaacaaagcggttttatgtgtgtgatgagtactgttgtctcactctacacattaaatgtttgcttgggtgggacttatacatgaagcatggttcatcttcattttatttagagaaaaaggtagacgttctgtccaataatcatcatatgactcgacctatttgctgctattgtgagaagcgttgtccatacaaaatatgtttggagtggtctggatcaatatattgttcgtcagattgtatttttactttcttgatattttaagggacacttctctggttgtaaaaactattatcaaatatgtattctgttgtattgattagtcaaccactgagacgtccactagaactttgcatcagtgaacatgtttttattcttttgttccattcaaaacaattcacatatagcagatatctcaagaacaagattaatacgtttgtgaatctcccaattcacgatcttaacttgagcaagtacgtgaaatataagaatggaatatgaactgagtgccgatagtaatctaaac

SEQ ID NO: 20654 - DNA, 884 bp, Arabidopsis thaliana landsberg
  unsure (1)..(884): unsure at all n locations
ttgcatagctcgactctagaggatccccagctcgaggttggcctttccgccatgtcaaaggatgacctcgcggacagccttgcatacaacagcctgaaggtacagaagttgtaaacttaaagtttaagaaattgggaataatgtttttattcgcatgccaaacgtttatccttctttttcgcagggcttaattctgagcaacgccctgagggtcaaaagaatgtggaggatgaaagctgcacaatagctcttggcaaccttcgatcagaggtaattcagctgagaaacgaaccctggagaaggacaaaattctgatttcattggtgaataaagtgaaggaagatgaggcgaaatacaacgcccaggccgaagctcaaaaaccaaggttgaagaccttcggaaaaaacttgttgaagccaataaaaattgtgcggtcacaaaggctagctaagaaattagcgaatggtggaagaccaagctagagaaaaatattgaggagcttcgtgaatctatggaaagatgttttgagaaatccttggattttgtgaaaaaattaaaaactagcttttccaaagtgggtgcttattcctctgaggaaaattttatccgaggcgaccccgagggcgttgttgagtggataatcggagaagccgaagctttcgaggaaatcctgagcaatcgtggggatatttgtgctttctctggcgctcggggaattgcggctattctggagaaggctagatgcgatcacgtcaaagctacagccnnnnnnnnnnnnnnnnnnnnnnnnnnngacacaaaagacccttcagctgaagcgactttggtgggcggaaagttttattctgatgtctgggtgaacggtggccgagaattggccaaca

SEQ ID NO: 20655 - DNA, 634 bp, Arabidopsis thaliana landsberg
tacggtccctaaagttagctagcttttatttatataagacccttccttgcgccttaaaccgctggtttcagcttttgagctctcagaacctgccaggtcaatgaggttctgcagatataagtgaaattatgagcagttaatcagttgttcacctttaagtgttcaaagagtgcaacaataaacagtttatatagttgattatgctccagagttgaagaaaaagtaagctataaccgaacataaaattacaggataagaacaaagatgttataccagctgcgagaggtgtactgctccaccttcattattgtcacccaagggactactctctatagtctgcaaccaaaccagttataacatctttcaaaaactttactgatagatatgaaaagacagccaaactgtatacttacattactaaacaggggaaagcaaaatcaaataaataaaggtagggatgctatgaaagagaaaaagaaacataccagggtaaacaaagaatggaacagagggctgagcaaaagaaaacctgcggaaccaatatgacggtgcattgtcatcaaacgaaaattaatcaagatgacttgcatgaaaaaaaaagaatgaagaaaaacagtagtagatgtaagagaag

SEQ ID NO: 20656 - DNA, 505 bp, Arabidopsis thaliana landsberg
ggatctttgggccttggatttcaaaatcagcccaatgatcgggggcttgtgggggacagatatacctcgggtccactagaaggataagagacctcacgaaaggcccaagggccccatagttcgtaaggtcatcccctcgtgggcctgggaggaacgaccagtggagcagattaacacaagactggatcgatgcaggcccagatggcccgatggatttgagccgtgatcgcaacagtgacccgaccttctcgcgcaggggccccgtacatcggaactgagcgaggatgagtcggctaaactataggaagatagactcagttagttcactattactttggcacacgttgttatcatatccacatgtaatgccccacggtcgagtatataaggcctagggggcaccccttcaagacgatcgacatcactcattacttagccattcaccccgccctctacgttttctagcactagagaactcccttgtaacccatcacataaagcactc

SEQ ID NO: 20657 - DNA, 626 bp, Arabidopsis thaliana landsberg
  unsure (1)..(626): unsure at all n locations
aggttcctagccaaaacgctgacaagtgcatcagcattttttttctgttgacaatcttacggtttttaaagcaaaaaaacacncaggatcaaatacattgtcaaaggtaagaggttgagaaattaccacgacagagtaaagactcaatacggttttcacttcagtctcagcaatggaaatgaagtccttcaatgtctgttatcaaatatataaaactaagttttaagatttggaactaatctcaaatccatggttgatcaaaatatccataagaacaaaaccaacatacattacgaaatgcttgagaatcaggaccatcagtttcggctgcagtgagctcctggttcagtttttccaaatctgtgattatatcttgcatttcctcagccagagacttcaattgtttctgaaatagacacaggacaatcaaatgatgagccaatagaaactaagaagcagaggacgaaaaaaagcacaaatgcaaacctttgaagctgattcaagactttgaagatccttatggacgtccagaagatctgatgcctcggaagcaaggacctggagaaagaaagaggatgagtttcaggaccattttctaaaacaaccctcgacggaatctagaagct

SEQ ID NO: 20658 - DNA, 1314 bp, Arabidopsis thaliana landsberg
catctctgactctctatagtgatagaatcctgcatagcctccataattttgtcaccagcaagtacatatggaacatgtccaacattttcatcaccatgctgctcatatgatttcaccatttttcaatgttgaaaatcactatcttcttgttctgaatctcgtataaaattatgtaacgccattgttgaggtttcaatcttaacccacttcttcaactcaaacttgggatgtttcctatctagaattctccacttagtcttccacaaaccaaaagttctctcgattactgatctcaaactagcatgtttatggttaaacattttttagtgattgtaggtggttctcctctattgaactaatctaaatggtatctaatcctatgctgaggacctaaatatccacttctagttggataaataggatccactaaattatacttttcaaccggaggatgaggaaaaacagtgatgtgggtagcacattatgatagcaccttcgtgtcatgtgcttttctaggaactccaacataggcttatgtgaactttagactaaaattatacatagcgagaatattcatagttggttcggattttctacatataaatcgctctaaaaaccttgatggaggatgcacgggtgcatgagtaccatcaagggcaccaatgcaatccctaaaataaggcatatagcgcttaacctcaagtataaaaagactaatatatgtgacatcaccccttgtaggtttcactatgtttgttgcaagtttcaaaagagcaatcaaaatctcatataacttccttttcactacgttaagtgaatgttgatatcgttcagctaagacccgtacaattaaatcttgtgcaaccatctctattaacattgcaacactctcctcaagataaacatgacaagattcctctaacttataatgttctgaaagtgtcttacataagctcctaaatgttgattcgttcatgtcttgaatttgtaccttagattcaaacataaacgctggacacgacgccaaccttcacctctatttgtcctcactcattgtctgctagtgttcactccagttcctctatacatgtcttgtaaaagagcatacatgttgttctcatcctctagtaccaaatccatgtcatcatcctcaattaaagctctaaatgtttcctacaaaacaagaatattaagtggagtcaaggggcggttctttaagttatcagagctagataaaattcaagacaaaactacagcgatgagaatcacatattactcagtgccacctaaagttccctaaaaaagaatgagttt

SEQ ID NO: 20659 - DNA, 801 bp, Arabidopsis thaliana landsberg
tagaaaataaatataacagttctatacatattatagtcaacgtataagtaaatattaactaattaacccagaagaaagtttttacgtaccaagaaaatttaaatagcaacgaagaataagattttctaatgcaagcatgatataataatactctaatagcataagaacagggtaaacctacaaaataaatatgataaatgtacatgtattatagtcaaccacccagaaaaaaagtttaaagtttgacttaccaaggaaaaacaaaaaacaaaacattgaggcaaaaacagtgattttgaggggttttttgtgaaaaaataagagattatctctttgtttatatagagatggatgtttacatattttttgtttagaattatgtatataatcctaaacattctttttgatttgtagaattatgtatataatcatttttcttctataattgataaataattgtaaactttccttttttttaatagttggtaaatttaattagaattatatagtaggacagcttttctaatttctatttttatctaatcagatacatataatttttgtataattatcttaattagttttttctaataaatttctataattatcttttaaggagaaattaaaatagtattttttcctatatttcttaagaattggtaacttacatttggccttttttgtcttcaatttctatttttaactttaataaaatacatatagttttcttatatttccatatagtttaaactatagttttttccatatagttttttctatatattttgtttgacacgtgtc

SEQ ID NO: 20660 - DNA, 838 bp, Arabidopsis thaliana landsberg
taggagatatttagtgtacccaaagtttgagaaggataatactcttaaagaaaaatgcttccaaacacgttttaatcattgattatcaaagttcacgttcattacatccccgagatacaatgtcgatctacaataaatgtcacaaagatatcaaaaataaaacaataatataccattggcatgatttaaattgttggtatattttttcacttggacaatcgttcctctactgttcatttctctctctctttctgaagcttttttcaatttcttagatctactttgtttttcaccttcgttcttcatggtaggtcctagatttgcaagatgatgcaggagtgaggcaagcttacttctccgacattggagtggtgtggtttttccgtttagcgtggcagcggtggccctttcttggcggacgagaggcttctcttccaagtcttcctggttatggatgtcagtgaagatcggtggagtctttcttggctcaaccgatcggataaaagctgtagttgtggcggaagacgctgcggataggtgggtttccggtgcgtatttgatgtttaacggcagatccagttttggatctgagatggcttatgcgggatttggttgtggaggggttgtctgagccttcacccttccctaaccgccgtgtttttgtctccatcggacgagattgaaaattgctttgcttctggaagattttcagagctacggttttggaagtcagaggcttggaaatgagtggtcattttgctaggttgggggatcgaccaaattgggtggcccgaaaatccgaaaactggaatttatttccgtaaaagctttgggtgcc

SEQ ID NO: 20661 - DNA, 774 bp, Arabidopsis thaliana landsberg
tcgagtaacaacataatcttcttttacaaccatacactatcatctaacaaaataacaccaaattctaaaatccaattagtttttttattagcaataatatgattaggagaaagtttagcaaagaaatgctatcggtgtattaagacatggtaactgattaagaataagaatcaaataaatatatagaagagataaaataatgctattctataaaatcataaatttatagaagagatggtaaagacttacggagaaacatgagtgctcactagtgtgaaataaatcctccagaacctcctttctttcatgaaacgagggcaaagttcgtatcttaacttggagatttgctgcaacaatgtgcaatgtgcatacaaaatcagctacctagattcctagagtagacactacaagtcatataacatatgaaatctcgaatttgaaagttgaccttgacagaggttagaaccagagtggcatgtctctcttgccaatccgagagatcctttcgaacattcgaagcatttgttatcacatcggaaacttcatccccttgatctatacaagtagctcacattcagcgaaacgaagagccaacaaaatcgaaacaaaaatcaacaaataccttgatcaggaaaagcttggaatgtagcagaggtcaagccttcagcgaactctctcaaatcatccgttacaccgaattcgagaacgctccacttctgaaccggatcctgacccggataacggtaacgattatatcagcgatcgatttgatgt

SEQ ID NO: 20662 - DNA, 1050 bp, Arabidopsis thaliana landsberg
tccataatattaagattatcaaaatctatgattaactatcgctatggcaggtcgataccaaacaggcggagattcctaatcgacttctatgtcatctttcccatcccagtggcggttaagtcgctgcataaacattgttcccaagccgtggttaaggcagaggctattcaattgaaaaatatcgtttcaagagatttttgggatgggagagagagcgttgaacaggaatatcaaccaattcaaggatcatacctgactcggagattccgaatcgacttttcaaaataattccttggtcagaagaattaactgccatcaacatcgatattgtgagataatttcagtcggcgaaggtagctccctttctcatctgtaaatatcaactgtcgttttattagaaaccaaatcaaaacaaaactatgctaactggttaagcaattgatggtttagattgaaaaggatataattgtctatttattctccacgaaacaagaaaaagtgtctcatccctcagaagtgcctcaaaaggaataaaagtgcatagaaatgcctaaacgtgtcacattccctatatataatactgaattgatattttagctcagaaccggtaaagcaaagatatatatatatatatatattgtctaaaagtaagtattataattttataatatttgttatagtttaaaattattttagaataaaattaattgatattttggcgcaaaaagtattatattaatattttattcttcaattcctgacaaattattatttgagaaattatattgtatggtaattatataaactattaataaatgatacatcattaataaagataaataattactaaaaggtattttaaaaatggtaagagatttgtttaagataaatatatataattaaattgaataaatatagaaaattatgtattttaattttagaggaatgacacatgtcgaaagaatagagcgccacttgtcagcctaatagagaatgagtttgagaaaaccttactttattatataactagggaaaggctcgcccgttaag

SEQ ID NO: 20663 - DNA, 2337 bp, Arabidopsis thaliana landsberg
tagactaagacaggtaaacaaataaaataattctttttatatgctgaacaccataagaaaataaaataaaatcaaaaatttatcaattacttaatatttcatcttaaatatctcacatcgaaaatagcaatggtttttttaatcaaaatttgtcctaatggattaaacatcataaacacaattcggttggttcctcaagcacaccatccctccattttgcggagttcaagtcctcttcaaatgcagtttttccacaaagttatctttgcagttgtttttttctaccatatcctcaatttttctgttgctttatttgcatctcccaatgaaagagtggctctagtatacaatttgttgatgtggcgattgtctagtccttaagtgtatttgggttggaatcctgttaaggtaaaagagaaatatcaagtgagtatagtttcaagatttatttgatgtcttgtaatcacatttttaccatgtaataatgagaaatgtttattttcgcaatataagagaagaaacagagaacaaaggcatatatttatgaaactacacatttagttctagagtagcatatttatgcttcatgatatataaccttatgtttactgctttgaactatattttagatataagtttttgagtcttttttgttatttctagagtctttttagagtcttttcatgtattttatggagagggacaacaatgaagatgagaagacattttggagcaaaaaataaggaaaaggaaggtaaagacgatttcactttcagattcaaataagagtgtcgatcggtttcggtccagagatgtccatgaagctttcaagttacagatgtggaaatttgccccaaaagacttccctatttgcattattagttcctaaacgtttttaggtcatatatatagtattagaggtcattgtttagacctatcaagttctatcaagttctatcaagctttttaccaagttttctttcagagacataagctattcatcccctgttttaagagattcattcagttttcagttcaatgaagagatattttctaactcttttttttactcctttgtttatgctttcttattttgcttgtttcaatctccatgtctgagttgtctgcttgttaaggttaagatttttgattagggattcatatggtttagtagatcgcccttttgctaggttatctaaaggattcttcatctttaattgttcttaatactagttctagagtaattaactagaacttggatccagaaaatagatatacccaccataggtatctgtagttggatctattatttgatgagcctggtctataggtgtgtaataagaatcagcatatttactaaggtgaactaaatcaaactcgtttataatgcatgcttaagtgaaggatttctcggcttctcttgtaatcttatctataggcatagggagatttttgggaacaccactggttattccaaaattagagtttgagtttaagaatggttcaataacaacctagctatcattagaactactaaccaatagtttgttaagaataccctaaacctgactctttattatcttgtttcacaactaatcaatttgttgtttacttactttgttttctttttatttcaatcatattgctctagcttaatgtcaacacttaactcattgtgtcaacaaaagaactttgtgtaaatcgatccttaaatgctgcaattgatctcgtatttgagagagtagtcttagggtaatttgaacagtatcagtgtggcaaggtgttactcgacctcgtcgtcgagtggtgtcatcgagtggcctggactgtaggtactcgaccacgaggtcgagtaaatgggaagaaaggctcaaacgttactcgaccagggggtcgagtgttgtgctgaaagtactcgactacggggtccagtatatggcttctgattccagttcccttcttctaatttgcttgccaacaactccaaatcaccagaaaacaactttgaaatgcaatatgtatgcaaagctatcctaattatgcaaagtatgcaagaatgatgaggactgatatgaaacagtgatgaatgttatgaaactagactcaaaacgatgatgaatgaatgcagaaaacatgccaattatagacatatcaactcccccaaacttagtctttgcttgtcctcaagcaaataagaagacatagctgaaggagaggtttgaagtcggggactcagaatcaaagcataagataaagtaaataagctcaatgtacaagttaatagttctaagatgtgatacgattgacgtcaagatcaaccaatccctttaacattca

SEQ ID NO: 20664 - DNA, 585 bp, Arabidopsis thaliana landsberg
  unsure (1)..(585): unsure at all n locations
acggacttttgcaacagatacctaggcttattacattagccctaacatgtttatttcattgcttacacgcatatttctcaaaatctttagaatttgtgtaacttgcaagctccgctttcaatgaatctgtcttcaatatatctaggcttatgcaacgaaatgtgtcagtagattgtttcatagatctacagttcatacatgtgtacaagttactaagggtgccttgaaagatcttggaaatctcataagaggggagacactcgtcaatccttgttagcaaacaaagaaggaattcatgagcatcttcttgtgctgctgcgtttatgtgatgtggtaatatgcctaattaagcaattaagaaaccctcgttaatcggatttagtaaaaagacaaacttggggnnnnnnnnnnnnnnnnnnnnnnnnnnnnnnnnnnnnnnnnnnnnnnnnnnnnnnnnnnnnnnnnnnnnnnnnnnnnnnnnnnnnnnnnnnnnnnnnnnnnnnnnnnnnnnnnnnnnnnnnnnnnnnnnnnnnnnnnnnnnnnnnnnnnnnnnnnnnnnnnnnttgatttgaacacccactaaca

SEQ ID NO: 20665 - DNA, 2187 bp, Arabidopsis thaliana landsberg
aaaattttaaaagatattagttaatttagaaaagagatactaaattttatagagtcacctcgcaaacaagagtccacaaacgtttataagctctaatcaaagatcacagtctctccatcgaacaaattccaaagttgctcaacgtcaaacgccaaagtgccctccttttctgttgccgccgcttctgtaaccagcacatctacctcttggccctcgtctagcaaacgctccaaccatatattatctccaaccataaaattatccacaaaatcatctttctcatcatctttgttacatgtgatactattttcacaaacattatcgttgtcgagtccaaggcatggaggaattacaccaacttcagactgtccatcgagatggttgcagccggtttttatagagaagaatcgaggccgaggcttaaaaatatcgactttttgggccagtgtattaggaggggttataatatttatcctttttatcttagttttacaacacggttcatgcttcttactcagatgggtgttccagtagttcttgacatcattagcggtccgaccaggcaatcgaccttttttcaaggaccacctaaacattgttaaataatatacatataagttattagtgttgaacttatggctcttgaaataaccattaaagtaaacaatacctatttcctagaagcttatgaaggcgaagaagaagatcaacttcatcattgctaagtcttcctctcttgatacttggcttcaaatagttcaaccatcttagtctacaactctttctgcatcgatttagccctacataaccaatagttgacattaattataccaaccaagacggcttttgggtcattttctatgttttatcttgaagaatctaagcacaccaatagaaagattaaactgtttcaacacagtaaccgtttgttcataaattttcactgacttcactcaccagaagacagcccagtgaaatagtttaacaactttacatgagcttagcatcttccttgtttgtgaagaataagctatatatatatatatatatatatatgtgctacgtaaataaaaaatagtataacttttttatttatataaaactcttcgtttaaataaactgcataaagaattattctgaataaccagttgttttttttttgtttttttttgttttaccatacactagcatatgaatcaataatttgctccttaaaacaaaaagaaaagtaaaataaagatttccgaatattatatatagagaagagaatattcttagtcatgaatatatctgtgtgtgtaacataccagctctcaaaggaacttgatgccatttgccttctccatacttatcaatacatagcctcaagagactatcttcttcagcagtccatgcacctttcctcaaccctttggacgaaccctccatggaccaaagatagatatctaagcaaactataagaaaaggattgagataggtatatattgtgacttcagagatccttggaggagtagagagtgtgagtatctgagcggaaatatatacacacgtgacgggcttaggaaagtgacgtgcatgtgtaatatccacatttctgttttacatgtcgtgctttatttgctaagttattgtttggtttctgatttgactagagaaatggttcatagacacctaacttgtctcttcatcctttttctgtacttcaaaacatgcaaaaatgaaaaaataggagaattgatggcagatggtctatatatatgatgaggctatttttctcttgtttttctttcattcacagattattggagtgttttaatccactgcagatctcacaaactttgaattcttaacactaatgtacatattcatcaagtgatttttttttttccatttagcagaattgaacttccccactctagccttcatattttgatcgctttacccttaattcatcttcatcttataagtgtatactgtttgtttagtataaaagtatttctttgtaacacatctcctcagaaacctcaagggggactaagaatatattatatcaatattttcttgctataaataattgaaggaccaaaaaataataaaataataataataattgaagaatttatgtcacaaaaatatttcatgaaatttttttatctagtaaaaaaatatctacataactcttgaccc

SEQ ID NO: 20666 - DNA, 419 bp, Arabidopsis thaliana landsberg
gcttttattgttcatgaacctaacactcaatctgatccaacttcagactattgagatgagagttcacattgattgtgtgggatgcgaaagcagagttaaaaatgcgcttcaaaagatgagaggtgaaagatctttgatctctcaagcaaattgctttaaacattttgtgttaatcacaaacctagatatataacatatctgactatatcactaatctctgctaaattgatgacaacaggagtggatgcagttgaaatcgacatggtgcagcagaaagtgacggtgactggctatgccgatcagaagaaggttctgaagaaagtgagaaaaaccggcaggcgagctgagctatggcagcttccttataaccctgaccacatgggcggaagcagcagcaacggcggctacttctacaaccc

SEQ ID NO: 20667 - DNA, 599 bp, Arabidopsis thaliana landsberg
tagtaactgcgagccttgggttatggcttttgggtacgtgattatttactcttgcctagggaaagaagagaccctctgttatggactaaggtatgctgtttttggtctctgtctctgatgcttaatctggctttctctaacaatttgttacaggtgtcatgtttttataaccaattctcaattttgttgcctgacatggttcatggttctttatattcttggttaatttacaggttgcggagttaataaaagaggattcacgtatagaccgatatgaaaaactcctcaaaggtgaaaaaataacttatgggaatggcaaggtatgaacctggaatagttctttatcctctttcactcttcgatttctatatttacatccattgaatgttatttcctcattcagtggaaggctcacttagtttatccaagttgaagaaacagagagagacgcagaagaaagtcagaaaaagtatcgactcaagcacaagcttgcaagagtattacaacagacgaattgccggttagaagctgaaaaccttttgtaagtgagtatttctattgtgtcaaatagacattcttttaagattgatctttatctg

SEQ ID NO: 20668 - DNA, 3864 bp, Arabidopsis thaliana landsberg
tggcgaggttctgttcttttacaagcaatcttttttttcaatatgtataaatatttaacatttggctacaatgtattttttatcgggttatatattgaaaaaacgtttttctcctcctttttcgaaactctagccagggcagtcactgatttgcggttctaaccaatggccaagtaaatgacttttttcttcaaggcctcaatttccatctttttgatatcttcatgaatctatctggtaaatatttgtatacttcgactgatgatttcgcggccatcttaaaaatatatgactaccttatatgactcaattcaatattctatacatttactgtctttttttccaccaaaagttcattccatatattcacatatactccatgtttgatcaactttacacgtttcgagtgataccacaacctaaagcttgtaggttaactaatagccaaaaaagaaaactatgtatgtaatagtcgttatattggaatcatatctcaatgtggaggaacccagactgtattggcccaaccactatgttttctacccaaatatggacatcttcagtcgcattttgaaccgtgcacacatgctcctcttctacccattgcttttaaattttatttttaaaccaaatcatttaactactctttctattttctttaagtaatacgaactaccaacgaagttttttaaccgtaaattagctttatgcactttccggtggaatttatggagtgtgactggtatctacgacaacgttgactgtgttgtttgtatataactaatctacagcaaagaataaataacggaaaacaatggtggcacaaaataacccggaaaaacaatggcaacacaaaatgttggtatgcttacattccgaaagtaaacaagacagcaaatatattttggttattgttatcttcagaaactctattagtatctttaatatattttgtagaaacaacttgtttgttatatatcctttttatattatttgaaaagttaggataaaaaaacaccaactttaaagttttgatacgttattacgaaatttatttaaaatgcgattagattgtttgtataatgagaaaaagtcgaagcacctattggattggaagagcatcaatgagtgttgatgttcttcctttcattttaaagtattacaaaaagttggttatacctttaagttaagattatatgtgcacttagctttttagcgagtatttttttattagcgaatatcatttcataagaatcatataaaaatgaatccggatataaattctgattctttttgttttaaatcaaaattctgattcttttggtcgttagttttcttggaaaaatggaaattaagtaaagtctctgaaagacactttcagagagaaaaaagaaaaaaagaaagaaagtaaagtctctgaacgtttgcccaaacaataaaataaggtaagtctctgaacgtgtatgtttatgagatcgcatttgtcattctatcatctggaagcttatggattcgctttatgtcttgtctagatatactaatagccaggggcgaatctagaaagtaattctatataggacaccatatatataaatagtattaaatttaacttaattatctaaattatatattgataaaaaacaagatacaaaattgctagatatgagcttcgaacgtggattggtatggggcacatatcactgtaataccatttaagctaactctatttttgctgaaaatgatagcttatataatctttatagaacttagtatggggcacgtgccccacctagcttcaacgtgtgtcaacttttcaaaattgttttccggtcagttacacaaaaaaatttcgtttaggataatatttttataagactgttttaaattccaatgaaatatttttaaaatacacatgctgctaaacttaatttctagtcaaaaataatataatagaatggaatataatctcaaaagttattttgcttatgtagggttataattaaatattcaaatttttaataattcacataaaatggaaagaatactctttgattccatagagatgaaaaatatatatcctaagagtcattgattacttttctacaaatgagaacttttttaagacttcacactttactatatatgtataaataaacaccaaaaatatggatcattcgtactcatcaatactacacagacgaatattatcgcaactaaacccttgattgtcattttcattacatggcatcttcactagccaaacccaacgtcaaaaccaagaagaagatcaagattagtaaagacactgaaaccccagattttgtgtccactcatatttgcatcaaacgtattcataccacgcaaacactagaccgggaagtggttctacggagcatacgtcaacgccgacgtgtaaacaaagtcaaatcggtattccaaatactgtttggtttcccgttaacaagcaaaaaaacacgatggtaattgcgatcaagatcccgatgatgcttcaacagtgccttgacgttggtttgtaagttgtaacttatatatataaaagtgataagtcataagtatgggtccttcaattttgaagacaactctgtcatatagttgagaaatgttaattctcatgtgcattatcgctatgatatctatatcttttcacaaacaagcctacgcagattctttgtactttttagtaaaatggtgaatcgtggcaatcttagctaattggaaagtcactaaaagaaggattgaaagtcaaactcgaaaactttaaaatgtttatgccagcaaaaatgtcacattatgagtgaaaaaaatgggttaaaaataacacattatagtacaaaaaacaacacatgatgagtgaaaaaaataaaataaaaataacacatgatgctaatgccagcaaaaatgaaatataactcatatcattactcattcgtacgggaacataataattagaagttcaaataaaatataaactgatacataatcagacgacaaagcctggtcatggaaacttatatgcatattcaaagagtgttagcaacaaccttaccaaaaacaaagagggttagcaacaacttgatgaaggtaaaaagtctccaagatttaagaatttgttgtttttttttaaaaaaaaagaaaaaaaaaaaaaagaaagaatttgttgttttattcctttcttatgtgttttgtcttcccataaaattttcaactactaatgcttcgtatagatctttgaatctttcaatatagatcatgttcgtttccttgaagtgctcgtccaattggttggtatagttgactaatgactaaatattttttattctagctgaacatcaatatgacttatcatgcatatatgtgatccaaagtcatggtcttagtttatgtactgttgcaatattccttcctatctacatatattacatcatgaaaacaaggtaaacttatcatctaaattttttagttcattcttcagaagaaacttcatgggtttccacacaaaatcgccggaccgagtaactcatggtatgtgcattcatgtcttaacgataatgacttaattcatataaactatatatgtaataaaatctctttttttttgggttggtttataagaagaagaagaagcaaatataggagttgataatcaaccaagagaaacgacatcaacatctcttaataggtcacaaattattacgacaagaaactggtggatttgtatatttgtctgttcgggtttggtcgtagcaggacgtattttatccatgcttctgctaaacttctactacatccaaacaggacgagatgtttgtgatgacccaaagctatttaaaggcacaggcttct

SEQ ID NO: 20669 - DNA, 476 bp, Arabidopsis thaliana landsberg
tcttcgacccatttaaacaaatggtcctacattatcaatcgaaaattttaagatgaaatcaaaaaagaccaaacataatttcaaatctacttacatcttgtttcgttggacagcggaagaatggtcttccagggttagtcttcgacgccgaggtatagattacgacgtctaatccacattcacactttgaaagaaacccacgttcccaacgacctccgtcttgaatacgaggatacgaattcctagaaatataactcattgttgtcgctcaagatggagaattcgggtatgaagaagaattggagttccaatcgcgtttagaaatgataaagaagaagaagattcagagaattagggatcgaaaattgattttagcgattttattggatttggggtttcgattaagtcaaaaacgacgcagttttggtcactaacagagagatgtttacggggtctaacggctgttaatgggtctg

SEQ ID NO: 20670 - DNA, 645 bp, Arabidopsis thaliana landsberg
cctctgttaacatgttcctgataatgacgcttgctaggacagttggatgtgcgacaacacaaacaggattcagctggttcactgccatcaatctgatcccatagagttttcaaagcagtgtagtagctagatagatccatggaaccctaacgcagatcctgaacttgttgaatcaagtgaaaagttctaggcaagttcgtcatatgaaaacgattgtatagatccgtccaaatcatagtagcatcatcaaagtttagaatactaccatagatttgcttagaaacagcattcaacatccacgatttgaccatactgttacacctataccagatccgaaagagagggttaccttcatcaggtcgcggaagagatccatcgatgaaagcaagtttgttcttcgcatcaagagaaatcttcatcgcagagcaccaatgattgtagttcgttccgtcaaggcgatcagctaccaaagacaaaccaggatgatcggcgctgtgaagaaaatacggcgagtgttgactattaacggcatcgagctcagagaaagatccaatcggagcaacatgagctggttctgtggaaatcggagcacgagagttcatcacagccttcgatttcgatccagaagctccagcatctacagat

SEQ ID NO: 20671 - DNA, 220 bp, Arabidopsis thaliana landsberg
ggcggtgagaatcagagaagggagagttagggttcgagggcggagagaatcggagattagggattgagagctgagaagacaaaaacaaagaaacaaaaaccctaattaagaatcgaaaaataaagaaaccatatatataattagagagataatcgagagaattgagagattagggtccaaacaacacccttatttgtctgaagattaccttggagatgga

SEQ ID NO: 20672 - DNA, 1716 bp, Arabidopsis thaliana landsberg
cttctcttttgtgccttttcgcttctcatcaaccatatgctacaaacaacaacaatttctgttttatctttcagcaggtaggatcagaaaccagctatgaagaagagcatccaggaaaagagaaactctcccggcctgtccatgagaaaacaataaccaaggaagaacctggttggccatcatttgggcaactccttactgatctctgcaaacttgctctcgagtttataaccagccacctagttccagcccgattccaaaccaaccccaatctaaggccattaaaagatagactcataatgcctgaagacgaacaagaaccacctcgagtccaaaggcatactgccccagcaccaatctcagaatcccgacatgctcacttacctaaagctgatgatagttaccctgaacataagacgccaaagctaagatcaagtagtgtaatgaaggaccctactttgtcatcatccaagcaccatcggacatcatcaaaacggcaggactatgctcagttctatgcctcgggagaggttgcccaaccgaagatccataaagagcggtcaaggcgtcgtcatagagataaaacaaccgagacagaaccaaagccaacaccatcagatacggtgaagcctgtggagtacagtaatagttcaaagtttgatcattacaacatgaggagcagcaagtatggacctgaaactccatttcgattctagaaagtaaaatcacatactcattagaacccttttctgagtatgttgtgccctttcttttgtccttggtttgaggagattccttatgttttctttttgttagttactaagaaaatcttattacacagatgatgaaaaagaggttaaaggcttttcttgtaacgaaggattgatgaatcatgactgaaaatctgatgtattatgaacttatacgatcacaagaacaggctcttcgttactaacttgctattaacacattcttgcttgctatatatagatctttggctgctagagataggttccttgctaaccatggtcctaagaaagtatatataattgtaaagaatcttagtcaaaaaaaaaaaaggaaaaaaaaatgaagggccctaccgggttcgaaccggtgacctcttgatctgcagtcaaatgctctaccactgagctaaggaccctttattgtacatcatatctatattaagctatctaaatctacattaagatttctacatatagtagcttatttctttgttattgctttagaaatttggtaacaagatttatattagtagacctcttatatttgtctctaaacaataagaacaaaatgagaaaatctagttatacattatcaggccagaactccctgcggaaggctcgttcaaattcgttttccgccaatcgtttttcgtgctcgatcatcttcactaatttcttagaaagtttcttgctcttctttgatacttcttcaaaagctgtatcctgaggctgtgccggttttctcttggctggtttttcagctcctagtccttgtttgttatgttttggttctgcttgtagaggcaccaatataccttgttcagtgattcctagaccagttccttccttccagccatgcttctttaggagctgaaaaccaatgttagaagaactgatagcagtcgatggattgcttgattcagaagaatccccaataacattggacactttttcactgtagtgagaa

SEQ ID NO: 20673 - DNA, 552 bp, Arabidopsis thaliana landsberg
gtcctgttactttaaggtcctgaacagaaatagtatgatgtgtatgcattgtttcaacctgcaagttatgttctgggaaaatttcttctgcaatttgtctttttgagttaagaaaccgatgagcatgataaatattttgaaatcctgagaatcaacaatctgtgtctcagtatttcgtaaggtaagatacattggaaagtattcaacaaaaacgtataagcaattatgtgtttacatagagaggtcctagagttttcaattgggattctgacactgtttatatggaggagtgttagcttcagtttcctctaccaaaaaatggaatgtacaatctagtataataatatgtggttttaaacaccacaaagaatcagatcatatggttgatcttagtattaggtgaaaactttcctttttcgtgtcgtcacaggttctgcctcaggttcctctcgaggcgggacttttaagtgccagctttataatatcatacactgtgaatccgattgccacagacggtacaacctaaagaaaaccgaaagaaaaagtgtttgt

SEQ ID NO: 20674 - DNA, 608 bp, Arabidopsis thaliana landsberg
aaaaaactccttgaatatactcttggagacttttctggatatcttgtagaaagtacctttttggaattaagtgtatcacacgatacaacagacaaacctgataatagacaggacaccaaaattataaatctgagaaccaaccaattagattaacaaaaaattaaaattaaaattaatcgtatatattaccacttgaagcttgctgagcatttttctttaaaggagttttaaaggatgaaatccttggccttttgaaaggagaaacggagactgtctttcccagccttttcttttgggtactgtcttgtttattgtttgcataagctgtatctctgcgatttgttatatcaacaagtggctgatcagcaggccttccaagttgcctagctcttggaatgaaaccgtttcccttggaattattcactgccatatctgatgctaaaggcctgttatttgatagtccatgtgtagcaggtttactgatattcagagcacaattggtctcataacagccgtatcaaattcttgatcaattaccccctgagctagttctccagttactgatctaaatgtttgagataatgaagagagatcaaactattgacgat

SEQ ID NO: 20675 - DNA, 530 bp, Arabidopsis thaliana landsberg
  unsure (1)..(530): unsure at all n locations
caacaacttctcaagagtcggagcatctgcttaatctcaagagtttcatgaagatgatgttttcttcgtttgttctcctacaatccaaacgcgggttaaacttcttgagtactggagatagatagagaattacgttacaatcccggataagtcgaagcaggttgtgctaagccaaccnnnnnnnnnnnnnnnnnnnnnnnnnnnnacatgggggacaatttgttccaatacataccgcctcgcgtgaaggtaaagagactagattgattttttgtctctcttattttttggtctttttgaataccaggaggttctgggtcaaagcccgtaatcccttaggcccgaaaccacaacaagtaatattagtttcgccccaagcatcactcgaatcggcgatctttaagcttcacctagagtctttaccaattgagctaacgacacttggtgattgatctttgcattagattgcacatgtatatgatgcatgagttgttcgtaacttttgggtagattttgtaacgtctaacaac

SEQ ID NO: 20676 - DNA, 1073 bp, Arabidopsis thaliana landsberg
  unsure (1)..(1073): unsure at all n locations
ggaaaacctacgtctcgcccgaggacccccctccagcaacgggcacactatcggctcgcccgaggcccagtcttcaccaagaagcaaccttggccacatcaccacgccgaccgaccaaatcgcaagggcatttaatgcaaaggtggcctgacacctttatcctgacgcacgccctccagtcgatagggttgaagtgaccgcagtcacttcaccgccccactggccggtctgacaatttgtctgcgccgactgcagcgccccgactacagagacacctgaaaaaatgaggctgacagcagccaagtccggcctcagggccataggaaactccgcttcgcccgaccccagggctcggactcgggctcagccccggaagacgacgaactccgctccgcccaaccccagggctcggactcgggctcagcccggaagacgacgaactccgcttcgcccgaccccagggctcggactcggggtcagccccggaagacgacgaactccgctccgcccgaccccagggctcggactcgggctcagccccggaagacgatgaactccgcttcgcccgaccccagggctcggactcagccctggcctcagccgacggtctccgcctcgcccgacccaggggctcggactcgacctcggccttggaagacagactcgacctcgacctcggaggagcctccacatcgcccaacctagggctcggaccgaccacgtcaacaggaggcgccatcattaccctaccccaagctgactcaggctacggggaacaagaccaacgtctcatctggctcgctccgccagacaagtaatgatggcgccccacacgctctatgacgacggcgactctcagcccccttacggaagcaagaggacgtcagcaaggactcgacacgccccagggctcggactcggctcagccccggaagacgacgaactcccgttcgcccgaccccagggctcggactcggcctcagccccggaagacgacaaacntccgttcgcccgaccccagggctcggactctggctcagccccggaagacgacgaactccgttcgcccgacc

SEQ ID NO: 20677 - DNA, 811 bp, Arabidopsis thaliana landsberg
atctacactaaaatcagtgagctttctattctctgtggtgttgaagttgcgtttatcgggtattcttgctctggaaaaccatacacttttggcagtccatccttccaagccgtggcggacggtattctcaacggcgaggcctcgtcgtcttcttcatcatcattggtcatgaatgctcacaagcaagcgaagattcaagagctttgcaaagtatacaatagattggtggaggagataacggtggaagaagtcaaattaaagaaggcggctgcattggcggagatgatgcccatgaatgaggatgcgtggtggaaagtggatccaaatgacgtgaaggatcgcgaagaggtgaagaagatgatggagaagcatcaagagctctatgagaaactgtgcgaggaagctgcttcaaggatcaagagaggacatgatgagaataataacaaatgatccataatcaagattttaattagtagatcatttgtgatcatcactagttaattatgagtcttaagaattatgtttttttttttgtcttttgttttttatacattatgaattgttattattttctacaacatccagtcatgggttaatgaaaccgaaatattttgtttgaatagatgtcatctttgagtttaacaaaatcttatcaaaacagaaagaaaaaagtattatgtagtactataatactcttcaattttttatttttttttatcaggtgaatgacctgtatccccatgagaagtttcatatacgctcacaactccacagaattcggacctcgactccagtctacaccaaatgaaag

SEQ ID NO: 20678 - DNA, 538 bp, Arabidopsis thaliana landsberg
ggttgagaacttggaggagaggatttttcgagtgaggcccgaccaaatctctgctgtttttggacatgtaaagaacagatgattatgtgaggctagagggtcttgggaaagaacacaagtgcgatcagctccaacattccaactttgcattctgtcataggtatttagacgatttttttgagcgagccaagctagaaatgagtatttaggtgtggcgtgagaaaaccaaatacctttataccaagctaccttatgctttgattcctgagtaccttcctaagtttagttggtgctgaatcttgtcttgaatatgttcccttttcccatccaacgcactatatcctctgttacgatgagccttttagaacgagggccttctagggctttttctattaggtttaggatatcaactctgtgacgccttttcttgtgttgcattactgcttcagaaactgtggcatgaagtgatattcccatgtcgatgcaacctgtctgtcccgtgaccacaatcaagcggtcaagatgagaccaattatca

SEQ ID NO: 20679 - DNA, 494 bp, Arabidopsis thaliana landsberg
tttcgggccgtgtattgtctttgaaatattatgaataaaaaatttaaaaaaaaaaatgtatggtgcttcaaccgtggttaggtttcatctccgcttgtgattacatggtcatggtgtcttcaggcggatttgagacatttgtaaggctttcagactccatatttgttaagattagacacaaacctaggtttctcaaggtggcaattgatggaagcagctaccttatatccgcagcacaacacgtgtggtagttgttgtggcgaggcaacttgaaggtagaggatttacgctaaagagtaggtgtcgagatcggtgagatattagagactgtaagggacaatgtctctaactccctccactaactacagttctttgatttattggcaaaaactctttcaactatttggcgatcatattccttcaacgaagaaggcatccacgaggactagtgaaaccaatgtgacgaggtgtagtaagtttcttttctttcactc

SEQ ID NO: 20680 - DNA, 604 bp, Arabidopsis thaliana landsberg
atgaagagagtaaataatgttaccccggagatgccggcagcatagcaagagcggcacttagaattataggagtcaccgcggcactggtagagaatggttacagcattgggttttagaccactagtcatgtgcatggaacctgagcgaaaatttccggctgcgagaaaacggatgtaatcgttaaggatatactcgtacttgcttcctggtttatatttcccttcactaacgagacatttgtgatgcagatactcattggtgaggttcagggacgaaacattgcgtataaataggagttgtgtggccaccaaggctaagaaagggaaccaaacgagacgttgtaaaagagaacatgaagagtacatattgtattttgttttgattgttttttttcaagagttaggtgtgttttggttttcttttttattataaatgaagcgttgagttgtgatgtttatatatacaggagagtaggaaggatttagctgattggctttattggtaactagattaactaatttttttcaagacgggatacaattcctttatgggtaccttatacaaaactggatttgatcattttagttttgagaagttttttttc

SEQ ID NO: 20681 - DNA, 1224 bp, Arabidopsis thaliana landsberg
tattgcacttatcaagtttaaaaattacttttcggaatgaatatttagctattaataatttccataactggagctattagaatattacctactcattattagtgttgaagcagcccaatccatggctccagagtctcaattaaagattccataactgatacacaccatatatatattagccttaattaaaatcattgatataattccgcaattaagtaaagagtaacttagactatataacaatctcgcaaaaagaatgtatattgagccaaaaatgaattgagtagatagttttaacatataatggttaatacacatatgaactatgttttgtattttctttaagcatgtaagactcataagcgtttgagtttcaaatttctgttaaaaatattaaatttccagttatttaattttggttataacttagttcatatttatagagtattttcttatacaatctaagagtttttagtatctaaccttagatggaaatgatgagttccactctttagctcttcttctgtaaaaaaggaaaaatatgttaataaattagtaaatttaattcaagttctattacataaacattaaaattacaatacattgaaacctccaatagaagacaaaattcaaattacctatatagtatcaatatgtatatactctttccagaacaatatatgatatcttaactaaaatattcttagaatatactctctaatatattaagttcgtataaataacaaacttggcgattacacttaaaattagatatttaaaaatatttataatatttaatcaatatataacgtttcagtttctcgatttttagtggttctagaactgttttctccatgattgcaactctttctctaatataaactagacaattccgactttgtgtttacagtttacttttatttttctttttgagtcttcctctaatataaactatcacggcttatcaatctcaatggagatgatggacctcttatttgacataggagttcacagtactaaatggagagtctatgtgaagattcttgttctttggcattataatccatcccaagatggtgttgtaaccacgatgatgcttgtcgattcaaaggtaagtttataaattagcatagcttaccctgtgacttgattatatttgaaaccctatttttaaaatttttataatttttatgtagtataatcgaattgatgcaactattcaag

SEQ ID NO: 20682 - DNA, 102 bp, Arabidopsis thaliana landsberg
  unsure (1)..(102): unsure at all n locations
gcttgccactaccaagtgagcactgagtggcctctatgagttggaggcacggngaagattccaaaacagttgttggtaacggcggagccttgccatgccagt

SEQ ID NO: 20683 - DNA, 1015 bp, Arabidopsis thaliana landsberg
atatataaagaccttacccacttcacttcatcaaacacagagtcacttctcatcttcacccaaatatatcagtaatctctctataagttatctagttttcccattttcatctctaatctagcattttgaccaaacacacctatttttctcctttgcaagacggttttcaaataactatcacgttatattactaatggaaaatctacaaaagatgatctccgagaagtcggtagtgatctttagcaagaactcttgctgcatgtctcacacaatcaagactctcttcttagaccttggcgtgaacccgacgatctatgaactcgatgagattagcagaggaaaggagatagagcatgcattggctcagctcgggtgcagcccgacagtgccagtggtgttcataggagggcagcttgttggtggagccaatcaagtcatgagtctccatctcaatcgctcccttgttccaatgcttaagcgagctggagcattatggctttgacttcaaaataaatggaattgcaaatgacttaggttctgagaaacttattaatgtgaagaagaaaagtaagaaaacatatacaaggatgtatgtatgagtttatttctatgtatatctatctaagttttcaaaagatagattatgcggttatcataaaatcagcaaccgttggatatctcctttttcccaagtttatatttttatataattttgtatacatatatgcatctagatatgaacacatgtgcactgaaaatagattattttgtttggtgtaaaggaaaaaagaaagaatatataactatttatggggcagactccaagacataataattaatttaaaaaattgaataaggcattttataggctaagaatattgtatttgtatctgccacaaattaaaaaccgataaagagtctgaatcgtgtgtaatgtcaagccttaccttttcaagcggaattcttgcgatgatatgcaactgtcaaaatatgaaaagcgtgattgtcaattgaa

SEQ ID NO: 20684 - DNA, 1414 bp, Arabidopsis thaliana landsberg
aaatgttaccatacatatccctcctcgtatcaacaggacacttcaagatggaattgcgagtcgcctcgtgaataccagaagattcctttccgatcacagacggctggaaaagaacctcggggcacatgaatctctcggcttctatcgtgatctcttgaccatcgggaagcacgtaggttttatcgattgtccaaccctttgttgtcttctccatttcttgctcgtagtcgagagctacgtaacaaagcttctctttgatgtctcggactatttcccgctcggcggatgtggtgtatgtgtagccacgttcggtcatgatttctatgaggtagtcagttaggtcacggcctcctaggtctagacgcagtataccgtgtgggagtgcgtaaccttcgtatactggaactgtgtggctcaccctctctcctaaatccaacacaacacctaaacacgtagaaacttaacatagtaattaagtcatggattgtttcacacgcaaatacgcaattcatgcatttgcgtgtattagtgaccaaaaattcacattttagaatataacaccattctctgtttgcatttgatgttctactgagaacaagatccactgataaattatgagacctcaagcttataaactaacagaatattaatttttcttaattatgatattttggattttggttgcttacctgtggtacgaccactggaatagagataaagaacagattgcatggagacgtacatagcaggaacatcaaagctctcaaacatgatctgagtcattttctcacgattggctttagggttataaggagcttcagtgagaagtacagggtgttcttcaggatccacacgtagctcgttgtagaaagtatagtgccaaatcttctccatgtcatcccaattgttaacgataccatgctccattgggtctttaagtgtgagaatatctctgttggcatgaccttcttctcccacataagactcgttcggattcaatccatcttttggacgaccaacgacacatggaaacacaacccttggtgtatcgtctccagcaaatcccgccttcaaaatgtttcaccgattaattggcacttaacaaaacattttacgagaaatactccagagtataggtcaaaatgtggtttattttaatataaacgcataaatagtgtctagtaaaacaatcgaagccttaacgattaaccaaaaaaaaagtgtgtttctttttaacgtacctggaccattccatgtcccttgtcacacacgataggcttcatatcctctgatgccgaaataatctaaagtaaacatatataatgcttccacaaaaaattaagtcataaaaaagttcaaacgcagcattaacagcagaactgtgagaatcaaaatcaaatcacaaacactttgg

SEQ ID NO: 20685 - DNA, 1242 bp, Arabidopsis thaliana landsberg
tgtgttcattgtggctgtcggggcctgaacatctaggtatttgagtgtaataccgtgtttcttcctcatttcgagcactaggactcgcctgtttggctagctgagccgcttaaccgagtgtgagttgccctgtgcggaaggtgacgagtgaggtatccgtatcccggaggcgtaggagttcctcggctcggtcggccttgccacccaaggcttctcttgctcagttaaggaaccttcggccgctctgcaatgagccgaagccggacggaggggtgtcagcgtggacagaggcggagtcggctcgagaagaggcttcgtcggcccgggggcacgtggcttccctggccgaggagatgcagcagcggcagctggagcttggccaggtcaccagcgagcgggaccaatcccggagccaagctgccaaggcccttagggggtcagctggatgaggctacagagaggctagccgaggcgtccgctcgggccgggacccttatggagagcctggccgtggccgtcgggactgctcagtccgcccaagctgtggccgcacagcagcgtgcccaggtcgaaggtctgttttgtccgtgtcgtggctttgttttttgtcttcattcttctctttgtgtctgaagaacattgtccagctgtctgcagggttcgagacggctcttcacgagtccgtcaagaactacaaggcgcttgcccaggcggctgagcagaaggaggccgaccgcgtggccatgtccgaggccatctcggctttctactggacctttggccttgatgacgccccctcgggtagctcccgccagagtcgcctgcgggccttgggtggccatgtgcgcagcagactccgtggggcgctgcatcacggcgttaggcgggccttcgccgtgctcgcttcccactacgacgtggatctggagcgggtcagcgaggggtactgtctacccgacgaagatgaggctgccttagccgaggttcataggctcgacgcggctatcgtgggcccaagcgtggtgctggcgtcctccttcgaggtggagatccttcctatcgcgtcgccgtctagggtcgggccagatctcgccgagggtggagacgacactaagggtggagacgatgccgagggtgccgctcctcccccgggcgatgtctgattctgccggagcagtctgtttggagcatgcatgtgtttttcgcggccgccgaggcgtaaacacttattatcgggttata

SEQ ID NO: 20686 - DNA, 1933 bp, Arabidopsis thaliana landsberg
aaccatatatctaattatatttatacttatatatacgaaaagattaagattttttggatattttagttatttttgtatatttttaaatatattcaaaattactcatgttgttttggaaattttgaaattttcaaataatttaatagatttacatacaaaattttgatatttcaatatataaataaatccgaacccaaacccgaacccgaaccgatcccgacccgaaatcttaaattacccgaatgggttttaaatttctaaacccgaaaaacccgaacccgaaatacccgacccgaatacccgaacgcccatgcctattcaaagttatatagtgtagtctcgtgttttctaatacagcaatgtaaaaaggtttcatgaagaacattgcaaaattgtattgcttgcaaaatagttttgtcagccaaaacacaacacaacagttgataaatattgtagagcttcaaacgattagactgcaaaagaccttcaaagttcttcaccaaatttgacttatgcctaacggccctaatcatcatcagcttcagatcataaagacatttctttcttttctttatattcctccagagttatcagtgactccttgtttttggtccaatctgcaggtcttggcataattatcgcaatatacccttcgcggtcagcctgaaacaattagattttataagaatgggaggtgatcaaaatacagaacatcatcattagctttatcctactcatgtataaaagcaaggaaacgatgatcaagttatttgagttatccaactgattccataagcaaagttcttgacattaagagtataacataagagctcaaattgttattgaaggtacagcaacaatagagactcatagcaaaaaatgagattttcattggtttttgaggatttgttagagaagccaattttcctctcttattacttaccgttgaattaagaagctctggttgcttaatcaatctctcgttgacctccaagagagagcctttaacgcagcacctagcaaaaaccaattcagaacaaagacaacttcatttttttgcaaataagaacttaggacaaaggaaagtgaaaacagaaaaaagctttgcacacctaacaatgtaagtatcttttgcagtggaaactttgcacaatgctgtattcgattcagagcgcaacgcattctacacaagaagagcaagtaaaaaacagtagctaaagccagaatctagactcaatcaaagacaataaacacacaatttcgaactgcaaaacttcaagctataacaattactaaaagtctaagactcaagaatcaagagaaagccacctttttacgcttgccggagactttcaagacgctacgatcagacttaccaacattgaaatcgacactagtgattccaccttcatccttaaaagctatatgcgtaggagccaatccaattacacacaaactatcaaacaaacaaacacacaagtaagaagaaaaccaatttcatcatttcaacagcaaaaggaacaatctttgacatacccattagcgtgacggtaaatatattgatcatgacccgatttagtaaaatctgcaaaaacattgaaaagggtttaattcacttcacactatcaaaaggggttttgaaaaacactaaacagtaggtgaatctgagaacctgtgatgaagtaagaaacaaaattgacttgtgtagctgaaggaggagaaatcggaagttctccaatatctgaaagcagaagctttctcaattcgtcttcctcttcatcttcttgtgtagctagctgctgcttctgttggtcgtcgcaatcttctacttcgtcgtttctctttgggttagttaattcgattgtatcctcaatttctggaaacttcgctacatcaagcttcagaatctccattgtttcgactgtttaacctt

SEQ ID NO: 20687 - DNA, 794 bp, Arabidopsis thaliana landsberg
gtcccctttcgttcataagattttaggaactctagaatcaatctcagtgagctcagagcttgaagctcctctagactgcatcaacagaagcttgggaccaagtgaattttcagcatctgctacaagcaatgttggataatccgaaatgatgctgcagatctgagaatctgtgaactcatgacttctaagaagattcagatctgtatcaggattgcccttgttctcgaaactgactttcatcgagatcgattctgcgagctttgaagctaaacccaatgaatcaacgaggtaagagacagtaaagttgttaccttttcgactatctctaaagctcacatcagcagcagtagcaacagaagagaatgaattggaaagaacagagaatacattttgcaaaagcttcactgaaacactaaagtcacgccctgtctgaaactggaccaaccttttaccatgaggaactagagaagaacacatgactataccaatgcgattgacagacaaatgcttgaaacaggttcgagcaagctctttaaattcgagaaaactacaggatggtaaatctcaaaagttctccaagcttacaaatattcatcagtgattctatacaacgagtggcgggagagagatcgatgagtgttcgagaaacccaaaatggcaaaaatcaaaatgagaggggtaaaaggaagaaagaaaaacctagggtttaatggtttatgagccaacccctaattacaaattaccaaaccggttcatgttagatccaattgtattttggtaacgatagttaattt

SEQ ID NO: 20688 - DNA, 498 bp, Arabidopsis thaliana landsberg
  unsure (1)..(498): unsure at all n locations
tgtactggttaaaaagacatacattattggacgtgaaactgcattatgttctttttctttgcattatgcacttgatcatagaactttaaggagcttttttgtttttgcttttcacttgctaaattggaagaaaaatatatggtctgcagttggtttatatgtgaaagaataggactggttttctagggaagctagcattgagaacagatgatttacgaaaagtcattggggttttccgagaattgagctccgggcctctcgcaccctaagcaagaatcataccactagaccaaatgcccttcttttttgtattatgttttttagttagtactttctattagcattcttgcttttctttcagagatttgttgcttcgtttgcattttccgtagatacataatcaaaattcttttctgttgatgcagatcattcgttgttatctggatgctaacanaacatgaaggtcttccctatgtgaangatactgattaatatcta

SEQ ID NO: 20689 - DNA, 927 bp, Arabidopsis thaliana landsberg
  unsure (1)..(927): unsure at all n locations
atttatgtttttttctgttaacaccagatttggtccggttgaaatcggtttagctctcactgatagagtgataagagttaacatttcttaaagatanacaaaatccctcaaaaaaggaaattaaagaaatattcttccagctgttgaaaattcaaaaagattaacaatttacaaatatatcctcggacgccaaagaagtatcaaatccacgaaatatttttttgaatttcgaatttatcagaccgttgtgtttctttctatataaccccgaagatattttacggaggctccacctaaaattctcaatccctaaatttcgaaatctcactctctctcattttcgactttagaaatggcgaccaacgcagatccagctccgacgaagaaaccaaggaacagtagaaaggcgttgaagcagaagaatgagctcgtggagacgccaccatcgcctgtctccgtcaaggggaagtcagcgaagtctttcgagcaagatctgatggagatgcagacaatgttggagaagatgaagatcgagaaggataagacggaggagttacttaaggagaaggatgagattctgagaaagaaggaggaggagctagagaccagagacgctgagcaggagaagctcaaggtggagctgaagaagcttcagaagatgaaggaattcaaacctaacatggtataatctctagatctagcttttagttctcgatttggctgggttttgtgattatattggaatttattgattgatcatttcagattttggcttgatagtcagtttctagatctaggtgtttagattaggttggaatatatctggtttatgcttattccgaatgtgttattgatcatttgagattttgtgttgattgttgatcaaagtttcgtcatagattcatagggtagagattagaatctaag

SEQ ID NO: 20690 - DNA, 1162 bp, Arabidopsis thaliana landsberg
gtcaataactgagtacatccaagattctttatttttgaatcataatgtcctttcttcgattattattcgcttacaaacaacactcttataaaatattttcataaaggaattaagcacgatcattactcggaaagttttgtatactagtttcatcactaccgatatatagataattcaagataaataacattcatagggtttttgatatgttttaggggtgtcaaaacaggtcaagattttttgatcaactcaactcaacgcaactcatgaaccctaatgagtcgaaatttttgactcaaatgagttgatgggtcaaatgatttgatgagtcaattggtttgataaataaaatgagttgggttgtaatggttaatggtttcaatggtttacccaattaacccatcaaattttgtaaaattgaattaaaccaactaaaatctctaaaccaatgccaatttaagtttaactaacacatctaaaccaatttaataaaattaatatttttccaaatttcttaaacatacaagcgatgaaattgagaaaaagtaaactcgtaaattttccaccaaaaaacataaacccgtgattttccaccaaaaaatataaacttgtgatttttccgccaaaaacgtaaacccgtgattttcccgccaaaaacgtaaacccgtgattttcccgtcaaaaacgtaaacccgtgattttcccgccaaaaacataaacccgtgattttcccgccaaaaacgtaaatccgtaattttcccgccaaaaacgtaaactcataattttcccgccaaaaaaacgaaaaacccgtgattttccagtcaaaaacgtaaacccgtgattttcccgccaaaaacataaacccgtgattttctcgccaaaaacgtaaacccaagattttcccgccaaaaacgtaaacccgtgatttttccaccaaaaacgtaaacccgtaaaaagtggaatccgtaaatattgtaagtttgatgataatgaattaataatgatcattatttattattgttttataataataattaattaaattattatttaaatggattaacctatttaacaattcaacccattaaattaaatgagttatgagttgactcaacccatttaacaaaatgagttgggttaacccataactcatttaacctta

SEQ ID NO: 20691 - DNA, 694 bp, Arabidopsis thaliana landsberg
tttatcacttaaacataaaacatagacttaaaacagacttaaaacagacactaaacataaaaacagagttaaaaaagacacttagacaaacataaactagaaacagacactaaacctacaactgaaactcaagccaacaactcattgattaacttgttcttaagatcaatctctatgtcagatagaggttctgttttccctaacagacgctcaagcaacttagtcctatttttcttctctttaataatgattagcttctctttggcagcgtgatctttctcttttatctcccatatactttgtatttcgttcaaagcattggtttcttcaccttcaaccgagctttgcttggctttgcctttgcctttggctacggctttggccgccttaacaccaatgtgacgagcttccttgtcttcaacgccaacagagtcagagtcagcttcacattttcttctctttgctttcccatgagtagactgagcaatccacttttgatcatatctaagctccctccaagcatgctcacaagtaaacttgcagccataatcttttgagaagatctgatgtgccaaagacaccacatcatcatcattctgaccacttgtttgttgtttgcttgcagccaagtgactccttaccaacttgttcacgacgtcattcacttttgaccacctttatttacaacatatgt

SEQ ID NO: 20692 - DNA, 1430 bp, Arabidopsis thaliana landsberg
attttagtgactgaattgttatcaaaaaccgactgcttggttacatttttgatgactaaatttgcgactattgttgttattagaatacctatatgattgttctaaagatggaaaccttcctgagaaaataaaacattactagaagcataaacacaatacaagacgcatgacaacaaatttattgtcatttcaaaaaagtacaaaacccaaattacaaaaacatgttcgattcactacaacttagaactttgttcagcataagtacaagcaacacaagtacacatatataacaactttgaaccgtgatattgagtcttgaggaaggagttaagattcagacctatgaagcagatgaagagggagaggcagctggagagggtgagataggatctgtggttgtctccttagctggaggagattcgaggaaattgaggaaccgaggatcattttcgcgtaaaaacttctccactaaggacaagtgctcaagcttcttcttctgctcatctgcagctcgggaattctcagcttcacgcaaagcaatctcagattcacgcctctgattgtaagagacctgctcttctatcttgcgttgagcttcaagtaattgttcttgcaaagccacaaaagaagttgagtcacctgcttgcttctgcttgccattgacaagagactctttgaggcttcctactccataaggaacgcctctcgaatccctcccagtggactgcatagtatgataaaagctgagattagagaatgaaaaagacaactcaaaaacactaaattgggaaacataaaacgttacctgaagaaatatggttgtacattcctcagctgtaagctctcgtgcccgcgaagtgccatctgaaacagcagaagcttcagcctcgagctcagactgcctcaactgcaaattcttctgatataactctgcaaatcttctctgtctttcgatcaacatacgtcccatcaggttttgtatgtgttttgatgaaaacgtcaccaatactgacaattttgcccaattgctcttcctgtaatgaaaaaaaaaacaagtcatagaaaagtacattgaaacatcgagttaaagttgcaaaggagtaaacagagagaagacttaccaattcgtcccggatttgatgatatgacttagaccctgagaagtgtatgtgaggaactagaccgttacagtcagacatacgggcatttgaatagatttgacttctttcctgagcttctttagtgtcccagtacgcagtcatttccttccatagagttttctcgatccatttaggtttctttcgactagttcttacagtgctaaccatgcctttcattcgctttaaacagatctcgttgaagtaaaactgaacagtccctgtgatcaaaggatcccaatggtgtgttttctacaaatagaaaaggtaatg

SEQ ID NO: 20693 - DNA, 1702 bp, Arabidopsis thaliana landsberg
tcgaacgtactaaacacatgtcgagaaatatggtaaatcaataagcctagtacctgagtgaacctgcccacagattgccctcctcacgcgacctgagatgtagtctcccattccggttatggtgggtacaagtgcggtcactgcacgatggcagtcgaggtcagtgagtcattgtatgccaaggcggtgacccctttctgttggcggggaatcgatggggatgattgatgtgtgtggggacagagtgactcgccacgtcgtgtgtttaggtttaccttgcaaggttaaaactcgatttgaatcgtctgcttctcgcagctaatgagactgcttgatccattgtactgcattgagtaagaagtggaatgaggtgacagtcaaaagatattgattgaaataatgtttgacaccatgtatgaatagctaggtactcatctagtctaaattactaatctagaacttgaaaagataaacttgattttagagtcagctagtgcttttggcaaccaaaccccacagccaaacagctgcatgtctagaggtagaggagtagactcctcacaccgggtaagtctagctgagtattagtatactcagccttgcttgtggcataattttacaggttctctggaggacatggttgctggagtgacttggccgtccatcttgccaccgggttggactgtcgagtgggaccctacctcggctgaggaggagcatgaggagtgatgggacatgcttccccatctctctgtttatttaccgttagttttattccgctgcacttcgaacagtgatgactacttttggcaagactccgacgatgatgtaataatttaatactctttaatgcatggttttatgctttattgtatttgctctgtgactcaccatcgagtgagattgtggtacttgatcctgtcagtggcctcgtcggactagatccgagggattgacgggttattcccatttaagtgtggtctagcctctgaggcgggactcaggcacttaagttggaataattcgggcagttccgcacaccgggcgggtgacttgcacgagaagaaagtctcgatgtagtgtctccgtctgagtcgcttaaggaccataatgatgtgggcctgctgaccaaggactctttaactggtcacatgcctcgtcatgggtaagctttgtctcgggcagaccaatactagaaaggccaacacgtaatgggagtggagagatggcgagagtagcgttaagtgagtagcagtggcaagaggttggacagtggagtatctgtgctctcggttggcgtgaaccctgtctggtcttgagaaacccggtggcgagttgacatatgcaagggttaagtgctacatatgtcgtgtgattggagatcctcagttgagtattaattgattcggatcgccgttgcttctcagacatgaagacttggtcactgacctacacgtagcattccagtgaactgaaaggggtgataaaagacgactagtgtaggccaagtgcttaaactagggtagaaacaactctagctacaggtaatgacttaacttgaaaataaaactggattttaaggatccactgatagtaagcatttctgcaaatagagtctttgatttttgattagccttaccttgactccctcaagccagcatatccttgagagtctttttcctttgtcgggtaagccttgcga

SEQ ID NO: 20694 - DNA, 797 bp, Arabidopsis thaliana landsberg
  unsure (1)..(797): unsure at all n locations
ccgattttttcatattgtttggctccataagcttggccacaaagagtttcaagtgcacccactaatccacactgcacaaaaataattgaagtgttttcaatacttgagagagtcgaatatttgattcttgagttggttagagtcatagcataattaccataatgctaaaaccggtgacgtttgtgaaggagtttgcaagagcgacaccggagagctggagctcgccgttgtggccagcgaccatgaccgagatgacaggcaataagtactgagcaatggtcacagtggccataggagcggccaagcggctcactctctttagctcgacggttaatggatttgtatgccatgtgacttgagaagggactagaagctcgtctctcagaagaaatggctcctccattgtttaacgttgaaggcctttccctttgattttaagatgatatttatcctatctttatagaccgactaagtcaataaacaacaaaggcaacttgaactacaaacgtggtgacgaagtagatatgatgagtaaagaagcaaattcgttttgacttgtttgaaaatatagatactagtggcacacgaatatactatattatataaatagatatatagaatatacatattacgtcaagnatgtcattagtgttaatactttttaattattcacatagacatatgtgaagactgaagactaatatgaattattttgttttgtagagtttgaacattcaatcctggattaaccactcttgaggaatgctatatatctgatattagccctaatagttgtg

SEQ ID NO: 20695 - DNA, 1034 bp, Arabidopsis thaliana landsberg
acttgctatgctatagtcttcaacatgctgataagaattttgtgtttcttcccaaaaagaacttcactatatccaaggtttctgcttaatctttagttcttacctctttgctttcaaaacatgatcaatttgataggtggttagatgtttttagtttaagttttgtttggttcggttattgatccggataggaccatatatcgcagtgaaccggtttaaatttggtgaattaattattattatgttaatttgtgggggtgacataattaatttcaggtgggaggaggaggcctcacaaaatggatcagcttattagacataatatcaattgctctggttttattcatggcattggcgtcaatctggtttgttactcataatcccgtaagcggccaaaaattagctgatgagactcagcaaaaactgcttaaattcccaagtccatggttaaataacctcacacataaggcaaagccgatgcgtcgctttgggcctaagcggatcattaaaggtccaaaccttgcatgcgttcaacatcctaagtctgagtttgtgcctgaaagtgagccaagaagcattgatttgcatatagctcgacgattatggttcaacgaagagcaagtggccgtggccgaaccaagctttgattggcgaactactcgacgcttgtggtatgctgtgtgaaatgtatgtgagccaacatcgctaggtatatgctaaaataaagtttgatagagtttaaactcgcaatataaaacaaggtgcttcttaaaaaatctgttaggttaaatagtataaattgcatatatagtaataaataacatgatgaagattgttatatgtattcttactttgaaatatttcatattcggaaatctcttgctatttgtgtggacattcacagtgaaataacttaatctaatacacaaatgagtgaaaagaaaccaacatgtatctcaaagtacaagaaatatggcgtactgagcttaagcttttgttaaatgtaccacgaactataaatataatctctatgg

SEQ ID NO: 20696 - DNA, 1427 bp, Arabidopsis thaliana landsberg
aatacctcacaaaccgtccgatttatgtatttctgatttggtttaagttcaggttcaatttatagagaagttggattaaaaaataaccaaggcctatgtattaatgtttttttttgcaagattatgcgctaggttgcatggaaactcgctccgaggtgcgtttctcgtttccgaaacgtttcggaaacggaaactctccggaaacacgaaaaacgtcacggaaacgcgtttcctaaaaatctaggtttggaaacacgatggaaacttacgtttccaaaatagaaactcacgtttccgaaatagacatacgacaaatcttttttattgactttaaaaatttaataactaaaattgaaaatattaaaattattattacatataaataattttggaagactttgagttttaagatctttcttttgttaaactagatttgaaaagagctttatattatctttgataaaactaatgaaaatgttggtctaaattaactatttgaacttgaaccttttaatttttatcttttagaattttagttagcttatttaatattgatagtttagacttatattgtttaaatcattttttatttaatatagttttatgtatatatatatatatatatatttatatgtttttaaaacgtttctaatctctaattttaataaaaaattgattcccgtttctgaaacgtttcgcatccgcgtttctgtttccgtttccatgcaacttagttatagcataaattcacctacatgttttttttttttaattttcacctacatggtctgaccttgtaatatagttatttcttaatcactaataatcaagagattagattaaataaaaattgaagtagtactcaccaccacgataccattactgaagcggagaagaatccatagtaatcaagggattcattagattaaataaaattggaaaaattgatataaatgaagctacgtataccattaccaagatcgctatagtaaactcaccaagataccattactaaaacggaggagaacggtgaaggtgatagagtaagcggccaactcggtagagccaagatggccaatgaaagcttgacttatcaaagatagtccggacgtggagaacctcgtaaagatcgccggcccagccacaacccatagctttttagattccctccaaaccttctccttcatccctaacccatcccgatcttctccgcgattctccgtcgactttttcagaagggtctccgtcacttctccttcttttctcgccatagcttaagagagaatgaagagagagtacaaaaagcatggagcgaggagagatttttgtttggtgggttgtttatttacgtacggaggaaatgaaaaagccggctacacctctttttaagaatctttaatttgccaaaatggtattttatatgccaa

SEQ ID NO: 20697 - DNA, 936 bp, Arabidopsis thaliana landsberg
caggctacaaacaggagcctcaattaagaagaagaaaaaagcaacaagtattgatctgctattgatacgaaaatattaaaaatttatgggtccggagagaatcccgattgacattaccaggcacataaaaacacgagcttagatgtgattaatcactatgctaagaatccgaatcagccaaaatttaacatcaaaccatagaagcaaagccaattctccaactccatagaactgcggtgacaaatgagcttccgtgagaacatacatgccaagatctaataacatttcgtgaagatgttcatttagaaaaaaaaaaaaaaaaaacgaaattttccaaatcaaatctgataatctcgtacccaaagaaacctcaaacacagaaaaaaaataccattccactcaaaaaaaaaaaaaaaacagatccaaccatcgataaaaacaaagtagagaaaacgtcaagggctaaggtctaaagagaaagttgtaggcacctgttgctcagagagaggcttgcactgcatgagctgcgagatctgctcatcaagatcaatggttgcgtccgtcggaatagaattcgcgcccattttcgttaattcgtctctcgtccgatccggaaaacagatcaggaaacaggactaggtttccaaattaggggaagtcctaaccctaaattggatggaatctgcgtattcttcgccttttttcccccactttctctctctctctctcttctttgactcttcgctttgtgtgcagtgaaaaaagatcgaattttgagaaggcgcgtgaggagagaagcgagtggtttgtatctttcgagctctttcttttgctattaccataatacccctctactttaattggggcaataaccatcaccggtttaatactaacttctacggtttaactgaaccggtttcagcttatataatcgtc

SEQ ID NO: 20698 - DNA, 1709 bp, Arabidopsis thaliana landsberg
tgagcaatcctaaatgcaaacacccaatatacaatcctaaaatgatatgcaatctacatgacactctgtttttgtgaaatcattttctcaaaaaatttcaaatttttatggttttttctatgccttagatgatgcaaaatttgaaataagaaaagagaacacaatgttaaacatgtcttgaaccctcccccaaacttaaattacacagtcccttgtgtaataaaaatctgaaagagaattcaagaccaaaacacaaaacacacaaagaaaaataaaaatgctatggtatgtataatggttgaggtggtgttacctcagcggtcaagtgaagtagatggaaatgtaatcgtccatactctcttgagtataaacaagggctgatgttgaggcggggctgattctgtccggtcgagtagttggtcgagcgtgtggatgctcatctctgcttactcctttgctctctcaacttggagatcacttcccgaggctcaaatgataaagcttggggttgatcgatcctttcagccctccttgcagctgagctcgtggaaccatttcttcttacttcggggtgggagacggtgcccttggcttgctctggaagtctttgatttgagcagccatactcttcagcaactttttcattgttctcatcttcttcttgaaacccttcatcgttttggtgtgaaggttcccaagctcttcaagcacactgagcttcttgtgaacttcagttatctcatctcctccttgatcagcatcttcttcttggtgagcttgctcgaatttgttggtctcttgctccgtctgttcactatgttgctcgaattcgacttgttgctcataatcagcttgagtaaaatactcttgttgctcatagtcagcttgagtatattctggttcatcttctctagctcctccgatgtcgatgttcatggtagaaggagaaggcatgaagttgatgttatgccttgtcttcactgaagtttggttctcgcaaggtaggggtaacaaagaaggtccaagcttcggatggttgaacttgacgatgtagtaatccgccggagttgtcttgtcaagataatcctttcccctgaggtaatcgaggtcgaggaacttagggaacacatcaggggttcccaggtgtatccccgcagctcctaggattggtgttaagagaccacaaacacaaaggctttcgcgaatcccggagcgatggatggttgcatgatagtaggatttttactcaattaatcctaaaacactatcttgtcgttgtagtattttaggttgtcaatccaatccggtgtgatgcaaacagatgagatatgattagaaacctctaagtcaagccaagcagagagttggttggttctaacagtcctagtatgcgaaaacagaaatgaaatgaaacaaaaagcagaaatggcaataacaggcaggtgaataacaaaatagaaatgataacatgcagtcaaatggataaatgattcctaaggatggggtaatcgaatagtgtggtctccttaatctatccaggcggttgataaaacttcacagaagatatccctagacaacaagttcaacaacaaattaattcactcccgtgatagaaatcctcaagtaaagctagacactgacctaattgccattagcaatctctaactaagcaggcattatcgaatcaacttgttaaagccttggggtag

SEQ ID NO: 20699 - DNA, 3874 bp, Arabidopsis thaliana landsberg
  unsure (1)..(3874): unsure at all n locations
ctaaggaatgcttgaatagactaagtgaaagattaggttgtgttgtgaacaagatggctaaagtttttaagtagagatcattcaacctagcactctagaactagcaacatggacattgagactatctattttacatgcatattttggttctgaatccccaccttcaaacctcactcctagcctacttctattgttgcttgaggacaagcaaagagctaagtttgggggtgttgataacactagattttaacctttttaagcccttgtttttcatgcatttagcttagtttcaagtctctttttatgcattcttagtctcttttccttcttttgcacattttgcattgcattgcatagcatacttgcatttggagtgttttgcagatgaattaggtacttttggactcaacttggaggtttctagcacaagggatggacagactcgagttcgggggacctaaggaaggatttgaagtatactcggcctatgtactcggctggaggccgagtggagcacacgtgaagaacaaggagcctactcgaccaaggcactcggctggaggccgagttgtgcacttaaggatgaagagaagccactcgaccaagccactcggcctagggccgagctgtgtgaccaagaccaagccactcggcttttctactcggcctagggccgagcgcccctgcgccgacttatctattttgtcttattcccaattagggcaacctaggattgcctataaatagacctcttatgtttttgcccaagatatcttagctttgtctgctggatattagggttctttgattttcttttgcattttctggttgttgtgttgagaatttggatttgatttcttctgcaaaattgtttatctcattgagatctatcttttgctaagtttataatgatttctgggttttatgaattttctgggttttattctatgatgttcttcattgttcttgagtagtgttcttcagagttcttgaggatgggttaggtttaggtggattcctcttttctttagctagctaagtttataaatgcttgattcccttctgttttaggagttcttaatgctattttctttctgatcaattaaaaattgatttcagactttctccacccaaaaggtgtttgatgaaatgtctaaaccaactaatttcagagatttgtagattctagcccaagacattggatgtttagactgcttattgactttaatagattggtgtttaaactctgctttattatgtttcatcaatggaaattgagattaggaagttctatagttatgagaatcattcacacggaagtggcttgatttggttttgaatctattgtctagggatagcttgattgagtttgttagttagccaatggattgaggagtccactaagaccaattaccccattcttaagactgtttagtttattcgtgcaaaactcgtgtttttagtactctgttcgtttcgtgcaaaattggtgtttttagtattgtactcgacctgcttactcgtttgctcgaccgagtgctttacctagtgcttggtttactttttgttcttgttatttgagtcctttattttctgcttagtatagtgtcacttctgaatttgatttgcatgttaacctattgcttaggtttagtagaaacacaccaaacctattcacacttggcttaacttagtattctctgatcgcatcctgattgttagcaattccacccaattggattgacaccttaaatgctacaacgacataagatgcatttagggaattgacacaaaaaaaccttgtatcagaagttaaaaatttaaccgttctgtcgtagatttgttttgttgtagaaagaactattcattaagaatttgtatgtgtgatcatgatatcatataaacaagaacataaaacataaaatatatacaaaaattaggcaataatatgtaactaaaaatatcatgtataactcaaaaggttattttttcgattgaccattgagtcaatctagaaaatgttgaggaaccatcttaccacgtacagaaccgtcaacattctcgcacatggctgtggaatgacctttctcgagtccagtatgctttaggttaataacaattagttcaacattcttgcacggaaagctcttgctacattgtagattcactgccactatgttattcgacgtttcatatatgttttttaacttaatgtcttggatctgaacgtgagactcaccctgaacaaggaaacacaagtcgtcttttgttttatatttcattgtgattgaagaaaaaaataaccaagcttgttcatgcatataatgttaaccttttttcatgttcacaaggtgggtgagggcaatacttctgatcaatgttgatcggttttccaacgtcaatcatctgaatattctcgtatatgaagttagtaactacgattattgaagccgaagattcccaagtcttgattcgaataccatcgcttgtgccgttaaaaactgtgtctcttaccgttaagtgcttaacgtctttctcgtctttgttcttccctaagctttcaacactgatcccatgtacagaaccacacttgacgttagagatatcaaggttagtggtcccagagagaatgacaatacaatcatctctagtaccgatgtatgtgtttgagatgtgaatgttgctacaagaacccattttgatactgtcagtattttggctatcaccggagctgttatagtgacgccggtaatgttgaagggatggacagagaagaagttaaagtgtcccattttgctgttgagtgatgttatgtctttgattcttgagttgttcacgaatgcaaatcccatagtctgtaaacatttcaaattttatcataccactagaaataaagagtagatacttcaattcatttgtgtataataaatatatatggttcaaaaataaatgatcaaactatacttgttaccattgtataatacattttcaatgtaaacaatatataatcatattttctcaaagaagaaatatattataaaaagaaaagcgtaagaagaaatggtaccatagctaatttaggaaaattggtatttttgtggcagtcattgagtggccaaaagtattttccttggccttcaattgtaccggaaccggagatagagagattgttgatgtaccagaagttgatccatgtgtcctgcttaatgtccctagggtttgcacgagccaataaagtttcatcgatgacgaattcaataggatttttgcatgacccacaaactctacaccaccgaggtagaatgttcctttcggtatgtagattttactactttcacttatccttgtgcatgcacgtttctatacacttgtgaatgcctaattttgtatatgttaagaataagataggttaattattaaaaaaagaatctatagaagttgataaaagatttagttaaatttaattggttaatataataccaatccatatattgttatgtggaaagtcaagaagatttatatatactatcatatcaaaatgttttttcaacatatatgtttagattatttaaatgtattttgatattgagttgagcttatttcaatgtatttggaagccaatataaattgggaatcaacaaaactaaataaataactattaacattgattaggaaagttattgtgtacatacattggcattatcagtttttccgtctggtttagaacnnnnnnnnnnnnnnnnnnnnnnnnnnnnnctgatagtcggacgacttgcaacagcaatgaacaagaaagacaaacacaaaacatttaaacgtagaagcgatggagaccatcttattcttttgtttgggtataggagatatacgaaaa

SEQ ID NO: 20700 - DNA, 533 bp, Arabidopsis thaliana landsberg
ggctcaactctaaagaatacgagaaaggttcttaaaggaagtgtaaaagaccaaaattaaactttccaattttatatgcattaaaatgttccaatatcaaactctttgaatttgttggaaagttctcttatactagtcccaccggccaattcggtcaatgatctcgaagcatcgactaaaccacttgaaaggtattttccgatatgttcaaaagaaatttcaatgtaaattgtagtttgctaataattattttgtacactatctcattggtaactaaattgtaatatgccattttaaaaagtaattagtgtaataattgaagaatgaatttaagtaattacatataaatactttttcactagtgtacatacatggctcattatatctggcaatctaaatattgccaaaacaaaaaaatgtgtctcggattggccctaactacaacgtctgctcaaagacggaagatgacatcaaaatgtggttacaagccctatgcctacttcttctgcgagttcgttccatacaggcaggag

SEQ ID NO: 20701 - DNA, 1632 bp, Arabidopsis thaliana landsberg
gacaactttatgtgccttaaaaaaaaaaggaaaagatcatacaatatatgatttgaaagtctctttagcaatcataagagctctccatcgatctacaattaaaactattcgcaatgattctatgcagagagaaaagtgtcgttaggtcgtagatcgttgaaggtttacaaaatagaaaaaaagtcatatgttatgaatttaataaagataataatgtatcgtccgtgataaaatcgtacatgtaagagttatcataatttgaaatctacttagacatttttggtgaagcttttgtaaaaaatcttttatgtaaatactatttagtttataatctctacaaaaaatatctaaacaaaatattttaaagtacaaaacttacaactcatcaatcaacattaaatacttacataaatacttttctttattaacatccaatttgtgaataattacaattgagttattgcataaaatatcctccagcaaaatatttgtctaaaaataaatactatttaatttttagtccctataaaatctattctaaaaagatttatattaaattaatatccttcattaaattttatctttattgcactatattcaatcaattgctaatttcttaaactctctttacctacattaaatataaatatataaattcctctttcacttttaattttcttatttctaatttattttgattttatagaaaaatacatatagttaataaatgttagatttttctggatatgatgtaattcaaatttttaaaaactgacatacattactcaatcgatgaagaaaacaaaatatgtgtacaaggtcccacattgcttaaaaaattaggcagtagttcaaagtcatactataaaaaggatcaaaatgattcttaatacgaatgagtagaaattttgatttatcaggcatccaaaattaagaatgttaaccgatttactacggtaatttgtttttgtaaggattaagactttaaaaagtttcaaaatattataaatacttatttttttaaaagtttagctttataaaacgttttaaatatttataattttatattttttatgaagatataaacattataagtatttaaacgttataaaaagtttaaatattataaaatcaaacattatacatacttaaaaaagatattaatatgggacgatataccacatgcaaaattctaaatataacaatcaaatgaagtttggatcgaaataattttttttttgaagttctattattataaatatttgaagtttataaaactatgacaaaatgattttaaatttcataggacggggttatatggtaagacggatttagatcgatattaatacgggatgatattctacatgtgaaatcttagatataacaatcaaaatacaattataaagtttagatcaatattaattattatttttgaagtttcaaatattatatagatttgaactttataagaaaatgacaaaatgatgtttaatttcacagatctaggatatatggtgagacggtttggatcaatattaatacggaatgatttactatggtaaaattctaaaattaaacaaaataaacaatattaatgcaaaaaatgacttagaatttcagaaatttagttat

SEQ ID NO: 20702 - DNA, 480 bp, Arabidopsis thaliana landsberg
  unsure (1)..(480): unsure at all n locations
atatatggactaaggcccacttaattatcatataaagccccttttttaattagcgttgaaaattatagctattaagtgtgataaattcgttctcaattatgtgcgggtaacaaagctatctgcattatatacacaaacagacgatgtgaaaacttttttttatttgtttttctgcccctnttgaagatataacctattagaacaagcaaagtagtcattcatgtcccaatcatttttttatttcatgctatgatccgaaaattttgttcctttcttggattaccaatgatgaaacctagaagaactacatatttgacgtctctcagtgactacatagccgctcgttgtgatagcttgcttctggggaagtctcacagtaaacagatattaattacataatctgtataaccttaaatgccaaactaaaggttgtgttaaaaatattttgaaactgaagaattgatggaggtttattattta

SEQ ID NO: 20703 - DNA, 1644 bp, Arabidopsis thaliana landsberg
gatagaaatatatcgctcaattcacattggttcatgcattttatcaaacacttttgatgcatagaaaaacttaaaatctaaaacaggatgatcaatcctattcagtatttagaacataagaatcaaagaacttaagcataaaaaactgtggagaaccatcaacccattaattcattgaatctcttacttagaatcctaaaacttaattaaaagactaatacatattgaaaaaaataacacaaagatatgaaaaaaacataatagattaataaaatgtataaaaaagaattataattcttctccaaagtgtgaaagagattaatctctaaaatcaccaaatgctctctcgaacttcatgagctctatcttcaatccttttgtcatttgccctacatactctccggccaccacaaccagaacttacatacatatgcgtaagtgattgtcatattatctaaactgaaccaaaatccattaattagaccgctaaccgaattttattacactaaataagcttacgcgaacccaagtttgcggattcgaaccgaaccaaactctgaacacacaaccgcatccatggaaacaatgtcacgatcttgccctttagggtttatcctccaagaccaaaatgtctccaattgagaattcctcatcttggacactcgaatccgacctagaagatctagacctcgacctccaagtctacaaaccatccgtaccattaaagaaagtcccaaacggagacattttcgaagcctcacgcgccggtgacgtcgatagactccggtaccttgttgaaaccggagtcaacgtcaacgcacgtgaccgttgggactctgttgctctttactacgcttgtctcgctggtcacatagactctgctcgattgcttctagagaacggtgcgatttgctctgaacatacttttgatggtgatcgttgtcattatgcttctcttaatttaaggatacagaagcttcttaaggcttttgaagctcgtcctcctcctcttgctcctttgcaagcttctcttagagataccttttgggatgttgtcataatcgagattatcttcaacaagaagaagctaatcttgatgtctctggtatgttactatttcactcttaatccaatttttaataaagttgagttctttgtatctagttcttaagaaagttgagttccttgaatccaatttctgaaaaaagttcatccctttgaatcgagtttttgagaaagttgagttctttgaatccaatttctaagaaagttgagctctttgaatcgagtttttgagaaagttgagttcttgaaccgttccaatgtgtagagatgtttactgagataatttggcttcaccatttcactcacaatccagtttttagtaacgtctaaatcgttcttgagcttgttgctttgtatgttactcgagactagagagagaggcttagtgtttgcattttctggttttgtagatactctgagtgagtttggtagttcgaattactttccaccggatgtgatgttctatgtgcaaggtagacctattgaagcacacagggttatcttaagtgctcgatctccgtttttcaagcagaagtttgagaatgaatggaaagaccggagagaagttcggttttcgga

SEQ ID NO: 20704 - DNA, 476 bp, Arabidopsis thaliana landsberg
  unsure (1)..(476): unsure at all n locations
ggggctaagaacttcttcttcgaaaggatgatccgcttttaaccccttttctggaattacttcttcaaccgagataataggctctgcaaataagtcgctagcctttttttgggtactaatttgctttgaatttctcctgaatcatttttggattcagacgcgtttgaattccttgattttcgtttcttgataggtagcaattacacttcagattcaccccgggcaagcgccgccgcagaccttgtaacaaaaagggttttcccttatttgatgcttcgttccacgatgcattctaccgggaagattcttttcaattcagggtccgaggttgatnnnnnnnnnnnnnnnnnnnnnnnggttgtatgctctcctctaggtattcacaccaactcgaatttactcgaatttcttgaaattcttagataaagccttgacaactttaagatatgctttcatccttgaatctttgatttcat

SEQ ID NO: 20705 - DNA, 343 bp, Arabidopsis thaliana landsberg
  unsure (1)..(343): unsure at all n locations
gacaactgtgcacgactcgatttttggtctcatgtttgagatcttctctactgtcatatcgccatggagatagggagcctcttactggatctttcatcacctctctagtgacatgatctttcggatggcctatctaattgcttccttgatcggttacattgggcgctcatgaatagttctatcaccctcgagaaatggatgccactatttctgtccttacgtgtgtaaccttcgcgctaagannnnnnnnnnnnnnnnnnnnnnnnnncactcagctactgcattacttgatcgaggctgttattatctcaaatttctcacttcagactgcaatgtcttaata

SEQ ID NO: 20706 - DNA, 426 bp, Arabidopsis thaliana landsberg
cggagtagcgagtcttggttggttaggtgagcacgttttaaattatcccaacggtctggttggtaggtgtgcttcactcgcaaatttctagcaaaatcctagcaaatccctcgtaaatctcccgcaaatgccttgcaaatccctcgcaatagtttttgggacatctataaatagccaatgtaatgtctaagaaatcataactcaaatcacaactacaaacaaaaaaaaatattttcgaaataaaacttattacaaaaataagaatgtcttggggcggagagcatgagatttacacattacgaagttggatgtataatcatagagatcaagcgaccggggaggtgacgagagagtattacgacggactgcacggtttcatgtattaagcgacaaacgaaccatttgctcgtgagaccggtacaatat

SEQ ID NO: 20707 - DNA, 594 bp, Arabidopsis thaliana landsberg
gtcggttatacccctgcgccgtcttcggtaaggtgatcccttgtctccatatttgtttgtgctgtgtatggagagattatgtcatcttattgagaaagctattgcggggaagaagtggaaacctataagtttgtctcaaggagggactaagttgtcacatatatgttttgcggatgatctaatcctctttgctgaagcttcaggagcgcagattcgggttattcgtgatgtgtcggagacgttttgcacagcttcgggccagaaagtgagcttgtcaaaatcaaagatctacttctctaagaatgtttctcgcgaactagggaagatgataagtgatgtgagtggaattgcttctacttgtgatctggggaagtctcttgggatgcccgtacttcagaagaggatcaatagggagacctatggggagctgttagaaaagattgcttctaagcttctcggctggagggcgcctacattaagctttgctggaccgttaacgcttactgaagcagtgctaacagcgatgccggtgcactcaatgtcgaccattattctgcctaagtctatgctcacaagtctggattgagtctcgcg

SEQ ID NO: 20708 - DNA, 528 bp, Arabidopsis thaliana landsberg
  unsure (1)..(528): unsure at all n locations
cgaatggacagagaatcaaacactactgggctgaagccaagattccagttttaaagcctttggatcttcaggacccacctgttgattaagcaactgcagaatcaagttattgactataaacaaacgcctagtgggaggcaacccactggtaagtatttctccttttaatttatttcattcntngtattcttaacttaggatttttgattttataggactatacagattaaaataaaaataaaaaaaaataatgtcgaccaaaaacgagatggtatcgatcgacaccaccctggtgtcgatcgacaccctcattttccaggtaagttgttttaacataaaactttatcttcttcatttcatttctctctaaaaccgccgaattcactaaaaccactctagatccttcgattcttcaccgtttcttgtgatttgaggctttaaactcaatagaatctcatcctctatctttcccaagtgtcaattttatcgatctgcaagatgacagcacagaaaaagaaggcgaggaag

SEQ ID NO: 20709 - DNA, 768 bp, Arabidopsis thaliana landsberg
  unsure (1)..(768): unsure at all n locations
ctaatatatataagagtaatatgtcatatatacatttctcagttcgaattattttttgtatctaattcgatgtttcttcaatacgttatcctatcaaaaaactttttaaactaaatatgacatattactttaaatataattaagaaaatacatgctttgggattagtcaattgccaaaaaaggattgaccaaacactttggaatcatgtatgtcatttcatatgaaaaggatattgaagtgatcacaccactagttaataatgaaatcgtcaattctataatcttttgcacatgtttcatcatatatgaaaaacagctaaactaattcattaaccccaaaaatctgttaaattaattctatgcatgatatatcaccagattaaactctagtagttaaactctagtagttaacttgtaaagtatagctctccgcttactctcttaaacaccatgatgcactcgttgtacaaccgacattttttcttttgagtataatttaacattttattaaaaaaaaaaaaaaaaagatatatcgccagattgccaaaaaatataaagtattcattgtcagaatttttgtaatatatgcatgtttactttggcctattaatgatttaatcaagtttcttattacggtattatattaatctcgggattcttagtgcccctttggactttcaaggaggtatatgccggggaaggtctanaatgtngagaggcatggcaactcataattgaatagtaggttttgccatttttggtacaact

SEQ ID NO: 20710 - DNA, 484 bp, Arabidopsis thaliana landsberg
ttttcttcatggatagggcacccccgacaagatatgctccggacaatgtttaaagggctgagagtgaagaagtggaggagatggattgggagaactacaatgtaagtaggttccattttgaggaacacaaaccactaccaagagtgagtaagagtctgagtgaagcgcacaagaatattggttcgatgagtgcttggagtaagtttcaagacaaaatgttggaaaaatgtggtaacgccatcgccgcaattcatgctgtactgagctgtttttcttcagacgccaccatgataagagaaaactgaccagaagaagtggttacaagaaggcacaaagtttcaccgtcaaggcagtctgcatatgagcaacgagaggtaagtcgccctcaatctcctgcaagacattcatctcatgagcactgagagcagaaaagaagaagaaaaacaagagtggtttgaccaaggagcaaagacctttttatgac

SEQ ID NO: 20711 - DNA, 640 bp, Arabidopsis thaliana landsberg
acccgacccgcttgatcgatccgggtcatcaaaccaaagccccaacgagcttgctgcggaggagaaagcaatgaaagagagaggcttttatttgcatccatctccggcaacaactccgatggatccagagcctcgacttcttcctctattcccggtgacttctcctagagtctcaggttcttcatcagcttctacttcttgaaaaaaagacctaatttttcttttttactcaaatttttattatccttttgtgatcttaattatatattataattggggaattgagatgaatcatgttgagaattatacgagaaaatttgtaatgttgagatgtttgctaaatccaattcgcgatttcaattgtattaatggtttaatattgatgaatttattctgcagaatttgataaattagattagtactgatgaataattcagtgagttttgtacaattttagtgaaatgagcagattgttttttggttctattctattttatttccataaacacacaattagttgcattctacatttgttttttttcaggaaacaaaagatgaagagattggtctttagagggaaccaaattggtccaaccttttttttgctaagattgatgaaaggggtaacaaaaagaaaaag

SEQ ID NO: 20712 - DNA, 1503 bp, Arabidopsis thaliana landsberg
ttagcaaacagattctaaagatcatctccaaataaccattggcttgcatcaacgataccatcaatataatttgatcatcgtctaaaatttcaagtgcctaacatgcttctttaaatgtttcgtaaacaatccatttgaatgttttgatatcatcaaaacatgtaggatctcgtactatgttaagtaatatacgcataagatattcagcttccattttttgtgggacgtaatttatcctacctaaagagaatcctcttatacatatattccattgcttgttcttcccatcccaagtataatgtactcgtatctcagaataagtgagggtctttgcaaaattgtcatgattcaaatacaaccaagcagtaaactgagaatcttcatttttttttttccaaaacatcttaaatatcttcatcctcatcgaaacaacacgggtaatttccttctttgtggaaagaaagcttatgcaccagtgtagttctaaattgaattgggaatttaaaaatcctctatattgcttctgaaacagatacatatccgcaaatgattacaaaaacaaagaaattttaatataaaatatccttattataaattatataacaaattgtttcttgctaacatgatttgaagtttgatcaaagtaatccttgatttcattcttctttgcttatcttatttaggaatgttctcagaaactgtatttgaagtttgactcttgtttataggctcaacaaccacaacaacacgatcaggtcttttattaatatacgtgaataagtatttgatagaacctgtttgattacaccattccacattgatatgagctcgatatcgcaacgataacttcccattgtaaggtacaacatacctgttgtcacacttaaatccacacttttcaacaaaatcttatgtctcccgcctcctataagtatttgatggaacctgtttgattataccactccacattgatatgagctcgatatcctactttagatcaagttagcatgaggcttaggatacatctttgaacacttaccatctaccatacatggaaatttgtaaacgctgcaccgcaagggccgtgtatcatcgactctttgatgacctcataaacttctaggttcttttgtttgtcttgtatttcagcacaaattatcctgttaatatcctcagaagatggtagcttactcctagatgccatgaataacagtatatgagcatgtggcagacctctttttgaaattcaactgtatatatagctgcatgagaaaaatataatcattacttttcaaaactatttaagatatatatgtatatatattaagcaataaataaatatatagataacttacctgcgacagttttccaagaagatgtttttcagtcaaatcaaacataagtgaatcaaggttaatcttgaaaacacgacatataatatatggtctatcatagtatcatcaggattcaaaccacgttctttacaatacctaataatttctg

SEQ ID NO: 20713 - DNA, 2424 bp, Arabidopsis thaliana landsberg
tttttaaggggttttttaggcttaaacaccaagctttaaacgggggtggcctttgggcactacaaggggtattgggcgttttttggtacgttaaaagaaaaccttttggtaaggtcattaaagataaacatttgggtaagcccaaagaaacagagttccgtgcattgcaaatatgcaatgcactgcaattattagttgtttggatttgatatagagactgagtctcgaaaccatagtatgtaaaaatataatcacgttcaaaagctgttaatttgttataatcttataacaattgtgttttaagatacaaacctactttgtgttatgatatttgttcactattggttttggtatatatccaaatcatttttcagggaattaaatactgactttattctctaaaagaaagaaggaaggccacaagatgtcaagattagtccacacaaatgccaacaaacttgtattgatgttcaagaaaattaatgtctcctccaatgtgtaatacagaccgcaaaaacatttcagccgacgaaattgttgtgcaacattgtccacaagattttacggctacactgtatacagactcacgaaaaagaaaacattaatagtcttttcagtttccataagatcgctttacaataatatcaaaataaaagtgaaaaagacagagaagaagagaaacaacgagagccgcagaagttgaagaaatgaggacctacaaggcattgatgtaagaagcaaggatgcggttccttttgattcccaaaatcctcttaaaatctcataaagcccttcttatcttcttctcttctcctcaacttgaatacacagaaacaaaactgcttttgtctctcaagtcatttgtcttataaaaaggttctgttcttgaacaagggaaagaaacaaaaggctgataactcctgttttgtagaatcctctgatattcagattcttacttctcaggaaaaccctaaagaaaatttctgtttttttttgagaaatatgaagatacaatgtgatgtgtgtgagaaagctccggccacgcttatatgttgtgctgatgaagctgctctctgcgctaaatgtgacgttgaggttcatgctgctaataaactcgctagcaaacaccaacgcctttttcttgactctctctcaactaaattccctccctgcgacatctgccttgtaagaatacctcctcttctctcttttgtctctattcgtatctgcagagatctttatttgttttgagggtatcttttgattgagctgttcttggtagattctttaagtataattatcgagaagttcttagctttataacatagattaaggttttagatttaagtttagtaaaggttttagtgggatctcaggaaatttgtttgtttttggatgtttttagtttgctaaggttggatatgtagatccaactttggtagatattcttaatgggatctcaagaaaaacatgctcaaagttgcttatgtagtaaatctctttcttgtgttcatctttgttgacttgcaggagaaggcagctttcatattctgtgtagaggatagggctctgctctgcagagattgcgatgaggcgacccatgcgccaaatactcgctctgctaatcaccagaggttcttagccactggaatccgagttgctcttagttccactagttgcaatcaagaagtggaaaagaatcactttgacccatctaatcagcagagtctctctaaaccgccaactcagcaacccgctgctccatctcctttgtgggctaccgatgaattcttcagctactctgatcttgactgcagtaataaggtgagaactggtttaccaaactgatgaatactcaaatatcctggtttgtaacttgttttgacaactatataaatcacttgttgtacattaggagaaagagcaactcgatctcggggagctggattggcttgcagagatgggtctgtttggtgaccagcctgatcaagaggctctaccggtagccgaagttcccgagctttccttttcacatttggctcatgctcattcctacaacagacctatgaagtccaatgtacccaacaagaagcagaggcttgagtaccggtatgatgatgaagaagagcacttcctagtccccgacctaggctaaactacggatgaatctactaagctttataatatatagcacttgattcgcatagtcttcggctcttcgccttgctttctccatgatctgatatgtgtatcactgtaagtagcaggctaaaacttggaaaaaccttatcattttattagcaagtgatgccttaaattgcaacatacgtcttttctaaatcattacatttgaagaagagaaacaaaaacagagcggaatgccgaatttgtttctcttctcgatttcaaccatcggaaaacaag

SEQ ID NO: 20714 - DNA, 1173 bp, Arabidopsis thaliana landsberg
  unsure (1)..(1173): unsure at all n locations
tctttcgaggccgaggcgggggcgagccctggggtcgggcgaggtggagacctcctcctgaggtcgaggcccaaggtcgggcgaggcggagtttcttgttgcgcctgaggctgagcttagctgttgttagcctcaccctggcgggtggcacagcagtcggagaggggcgagcgacgctgttttcctgtcaggtcggtcagtggaaggacgaagtgattgcggtcacttcgaccttgccgactgaggcacgtgtgtcaggataaggtgtcaggcgatcctcgcattgaatgtgcctgtgatacggtcggttggtgaggcgatctggccaaggttgcttcactgcgaacctgcccgagctgggcttcgggcgagtcgagggtgtgccgttgcttgaggaggcctcggcgaggcgagaagtcatctgcgactactgttccgcccgaggctgggctcggcgaggcgagatcgcgtcccttgagtagactaagccttgaccttaatcgcacccatcaggcctttgcagctttgtgctgatgggggttacagccgtgtttaggagtcttgggggtacccctaattacggtacccgacagtagcccctgagcctcaaagggagtgttggaggcttttgtcgcacttctttgcgaggggaccgacctttctcggttatactttgttctggtgggtgcgcgcgacgtgccgggtgtagcccccgaggcctcggaggagtggtttgatgtagagcccaaaatttgtatcaaagaaaataataataataataataataaaagggtgggccccgatgggtgggtgttattgtgtagggtcttaggattatggaaccgttggagagtacttgatttttcttttatttgtgcatattcaattaatggagttatatgggttaaacaacaaataaataaatatatggaaatgcacatcatgctggaattcttgtatgtttacaattgtactcaaatttttgagacaagtttatgtttgaaaaaaatagaacttgaaaatataaagagggatcaggaaaagaaatggaaaagaatataggaataaatgtatatatatatatatacgcacgtatagttntgtatactagaaccttatgtgggaatcaacctgtgtatgactcacgactagtttgaatcggcactagagttt

SEQ ID NO: 20715 - DNA, 1062 bp, Arabidopsis thaliana landsberg
gtggttaatttggatgaatcatttggatgatacatctgaatgagtttctaaatttaggcaaatttatgaaactcatttagatgaatttgattgaaccatttggatgcagatggtttattcaaaaataacaaaagacaaatatactctcatttataatcataatttaaataatattattttctatagatttcttatttaatattttaaaaattacatattgaaacaaaaaaactctaaaaatcatgaaatcacggattattattttatgtcaaaatcgtaaaatcgtgaaattgcgtttttttgccaaaaaccgcaaaatcataattttgatataaaattatagaaagcgctattccacctaaaatcataaaattatattttcccgccaaaaccgcaaaatcatgttttcgccaaagccgcaaaaatcttatttttatgccaaaaccgcaaaatcatgttttcccgccaaaaccataaaatcatgttttcgcaaatccgtaaattttttttttcccgccaaaaccgcaaactcatgttttcccgccaaaatcgcaaaatcgtattttactgccaaaaccgtaaaatcgtgtattctcagcaaactgtaaaatcatatttttccgccaaaaccgtaaaatcgtattttcccgccaaaaccgtaaaatcatattttcccgccaatatgtttggtattgataatgggtaataatgttgaatatttgtcatttgttaaaatgaaaacatgggtattttagtcatttttatctaaatgaaaatgtgaatgaactacaaaatgaaaatgtgaatgaactacaaaatgatcaaacaaataaagatccatttaaatgcatcatttagattaaattacaaataacgaaacaaacatcattcaaatgtatcgttcaaatgaatcatgtaagtggatcatttgaatggaaatgataaatgatgaaacaaacagggccttaatcatataattcatgattgttaccatcttcttaatgcatgacatccattgctccaggcacatttttctcaattggcacttccaatcagtgatta

SEQ ID NO: 20716 - DNA, 903 bp, Arabidopsis thaliana landsberg
tgttgttgtctaacgacatcaagttaaacgtaaaatattaaaaataatctcgaaattctcaaaatgatgttggtatcaaggatatataatctaaatatgcatctataatatgtatatattcaaaatttaaacttctcaagtaatctttgaccatcttagactacaaaagtaaataatgaaagcttaccccattgaaaactcaaatcacattaaccatcgattagataaatcaactaaataaaatgcagaagatgagaaaatatcagtctacattggcgaattggaaatctacaaatgatcgataggatataatctcccttatataccattactaaacccccaaaaacttacttcacttcattcatttctttcaatcaaaaacccggacccatgagtttctttgactcaaattcaataagcccatccagtatcaattcagatcatgtgagcttcgctataaatagaaaaattaagcttaccccacaatcttaatcttatttatcgtaatttttatttttctccacctctattctattgatataattcatattcaaattcatgagacaagttgctaaagatagttctaaacaatgttctaaaaatcgtcctagtcgccacctagtcggacgcctaagtgcttacttatggtcagccgccgtgatttctaaagttttggtaaaacaaataggacatccactccaggctgtgcaattcggtacaaatcagccaattcggtcaattctttcggtttagtctagtttagtttggtttcaaaaaattacaatttttcttactctatgtcgattaagttttgcaaaccaaaaagttataatagtagaaaacagttatgaaaagataataaccgagagtctaaaaatgtggactgcggttaactgacaattt

SEQ ID NO: 20717 - DNA, 485 bp, Arabidopsis thaliana landsberg
aaacgtgttctaccaattaatcatgttctcctgaatcttcctactttagatgtggtgatgaagttgattgggtaagagggttgccagaatctttgctctttcatgttctcctgaatcttccgacaaaagatatggttaagactagtgtcgtatcccccgaatgaagacatctctggaggtatgttcctggattagatttggactgtcgtgatttcacagaattcaatgatgtttgttgatgcgagaatccgcaattacagatttgtggttgtaattcgaggttctaagccttgctaaacaaacaaaaatcaaatcgaaaaagtgtgtataatattgagtattctttcggtatttttttgtctcctcattaccattacaatcgatccatatttatacaagaagaacgaatatcgacgaagtaaatgagagctcccgtcacgccgcagatcaagcctcatttaagacatacgtttcgaatcatcact

SEQ ID NO: 20718 - DNA, 1713 bp, Arabidopsis thaliana landsberg
aaaaacgaaatgtgttttaaatttctatactttaaattttttgtaacgtgtattataataatttagtaaaacaaattatcaatcaccaaaattttaaaatatttgtcattattattattgccacaaagtaattttacattcttgccaaaaactaatttaacaactttcttaaaaaataatttagatgcaaactatatgttaaatcttgtcttctttacatttattaacaaaaaattttattttactttacaaataaatttttttatcaaacattttaaaataatgaagtatgtttttaatccaaaaacagacatttcttgttattgcaaacgatttatttctctctcgtttttcaattccaaaatccttaaaaactaatttgatatgtatatccaattcacggctctttttgctagtgaccggagaagctatacacgactcggtggtaagccttgtatctgataaagatggtcgcttcacaagctggcggtcgtttttctcttgtgaagggatgatgtagatctgacacgatggcgatctcttctctcgtgtgggatcgaaaggagggggaagtgctggcggattgaggtacaccacataaatgtgataagtctctgatacagtacaagaacttagtcttggtaaatcgcacacacaagacaaagaacaagcttattctctcaagaacacttaaatagaagaagtaagaaaatttggttctttattgataatcaagtgtgaaaaatcgtacaactgctgccgggggactttataagagtccttcagctagccctaggaccgaaattaaatgtaaaaatgcaacaaggaagcaaatataatcaaaacacaaaaaccattgttttttgaaagaaaataagctaaaataaggaaactaattaagttctcttgaggagcacgattgagggtgactctagccattgtctgggctttttggacctgcaaagataatataaactgaataaaccttacctagatgcgttttaggcccaatagatgacgcctgagtcacttcctgtagtacttcttgaggtacttctggaatcaagtcttgtgcttgtttgctggctggttacttgaagtaggggtctttctggagttcctcttgagtagcttgataaatgtcttcgtgcttttccatgtccttgatgtcttgctctcgatcttgactctctcgatcactttcagatgtgacacttgaatcgtctatctcttgaagctccaaagtcttctcttggtttctagaggtccttgaacctgtcaaacgatatttcatacctgggcagtagttcgttcaagactcatttgggtaaatgcttcagcaagctcttcttcggctattagatcatatccggtatgaggtgctacggaccagtttactcctagctctagggagctcaaaatatcttgcacagctaagttgaaccttttcctcagttgtttagcctttgaacgtgtcatgataccctccgggacttctggtacaggatgtagtacaggatgtggtacaggttgtagtttagcggtttgtgaagtaaggttgatgtccgcatcattccctccctcttcaaaaggttttgtcctcaaaactgatctcctggatcataagcagacaagtcagcaacattaaaagtgtgagaaatttttacctcacttggtagctctaaacgataggcatttcgttgatcttttcga

SEQ ID NO: 20719 - DNA, 907 bp, Arabidopsis thaliana landsberg
tgcgatttaaacggaaaagccgggactgagtcagcggaacacctatgccctgacaattccatgagatgatcctcatattggatcccttgggggtacagggccccccgcgcctccgtctaaaccattgtgaatggaacaggaacccgcagattcagcctttctttccttcttacagagttggctcaggaccgccatctcatctgctgcctccacctttcgatacatgtcctcaaattgaactcgctttcgcttcagtaggacaaactggttttgtgcattgtcagaagaatcctcaaggagatcattggaaattggtgtctgagtccttactctcgctagtttggcgtgcaggtatcgaagcctttccacagtgaggtctgtgtcttcaaagacacttggaacagagaagaccgtagtgttttgtgtgttcggacccttatttccagttgagaacggttgagtaagaccagggatgagagttgcagggtcaactgtttgaagggtatcggtgtcactcatgtccttatccttgttatccccttgattatcatcatcatcattgtcatcatcgctaatttccgctgggtcttcatcatcaaaggcaagaacacattccttcacatcatgtttcagagaaccgcatttggaacagaagttcctaagtctctcaaaccggtacttaatcacagtgttttcatcaacagcaaattgaaaattcctttgaaatcgaagcggatcatctagattccaatcaatttttacccttacaaatccaacatgattcgaattctcatcaaagtcaacagttgacacaattcctagcctatttccaacacatcgtgccatcgcattagtaaggaagagaagtgggatcccgtaatttgcacccaaaacggtatgatcttta

SEQ ID NO: 20720 - DNA, 582 bp, Arabidopsis thaliana landsberg
tgtcctttgattaccggatttcttgttgaaactaattagagaaaaatcaattttggtaagatttgatgtcatttttatttagcatttaaaactaaaatcgttttaaaaccaaataattctagatatggttagttaggattgattttcgaattttgctaattaggaaataatcattcattaattctgtagagttttagggattgatttgtgcaatttattagggtagtagttaacaatatctatgtttaggcaagtaattagtgcaatatcttaattgttaataaaaaatttggtcattgtcctaaagaaaatatcttgtctgattgattttgtagggactaaacatacaatatcaaaattgaaaaaggattctttgacacaaatcgtctccaaaaatgtatatgtagatagatttataagtgtcatcaaccgtttgagttagttatgcaatcctatttagtttgaatttttttttttgatatactttaagataaaaaaaattaaatacgattacatttttcagtggatttaataaacaaatggtttgaacttaaacatgaaatatgagatctaaacaagaaa

SEQ ID NO: 20721 - DNA, 399 bp, Arabidopsis thaliana landsberg
gtgttttgtgcgtttggcactcaattctttttcgagaaggatcaatttcaagaattctgtttaggaatggagctaatgggtctaccgtttttaatatcggatatgccgccaaaaggctcaccaacggttcaagaagcgttaccaaaaggatttgaagaacgagttaaagggcgtggaatcgtttgggaaggttggttggaacaacctttgatattgtctcatccatcagtaggttgctttgggaaccattgtgggtttgggtcaatgtgggagtctttggttagtgattgtcagattgtgtttattccacaatcggctgatcaagttctcatcacaagattgttgactgaagaactcacagtctctgtgaaagtgcatagagaagatttccgatggttc

SEQ ID NO: 20722 - DNA, 1092 bp, Arabidopsis thaliana landsberg
catcataccattgcctctcaaaatattatttatatttacatttgtaataatttaatagtcaaaatatgcagattttcagatatttttaagtaattttaggtatttaatctacttttaagtaaatttgagtaaaaaatgttccaaagtttttagatattttgtgtattttcgagtagtttggatatatttgattataaaaatttgatttttggaaactttgggtaatccgaatctcatctgaaatatccgactagaatccgatctaaacccaaaatcttaaaatacccgaacgggttctatacttgtaaattcgaaaatcggaaaacccaaaaaacctgatccgaacccaaacgggtatccgaacaccgaggcctatttgtggccacaatgacaacatcaagatcaactctatcttaggtatgtttttttttttttttttttttgttaaagctattggtggtttttggtttttgtttcaaggaagatgcaaatagagattaatatcatggaattcgaccatactaagctgaggaaggccgatgttaagcaaggagagagatcattcggttagtcaccacaaccaaggtgacattgttcttaacctatctttctcacaaattcatccatatgcttatttccccaccgagggtggtgtgatttgagattgggggtggggtggggggtggtggggagtaatgaatctgttactactaatgatactctctatttcgttgacttgaaacctttttccactttttacaccaatacgttctaacaaagcaaaaagtttttattttgtttcttttcaaagtatcactgggcaaggacgatgtagggaacgatgaacctactatatgttgaataagaccattaaaatgtgctaactcatttcctaagtgacaagttttgcaggattcacaaggacggacaatacctagaaaccaactaccggatctttcccgtgaagtctcactacggagactctgtttgacctgacaactctattttatttgaacgatttaacctgaccttaattctttctcatgaaggggtgttagatcggggaaaccagcatatacattcaggacttgt

SEQ ID NO: 20723 - DNA, 467 bp, Arabidopsis thaliana landsberg
caagctgcgcatatatcgcaaagctcttggcaactcttttgttgatattacaggtatgcatagaatcgagtgggaggatgagactaagtcttcaattgagcattagagaagactaaatctgaatttgaaagatgttgttaagaaagagatcatgaagctgttcgaagcacagatcatctatcctatttcaaattgcagtttcggtcagtccaatcgatgtagttcctaagaaaggaggtgttacagcggtcaagaacgacaaggatgaattgattcctacaaggacgattaaaggccatcgtatgtgtatcgattaccggaagctgaatgcttctaccaggaaagatcattttccttctaccatttattgatcagatgctgggaaggatagcgaatcacaaggactactgtttccttgatggatattcgggtttttttctaaatccccattcatcccgattaccaaa

SEQ ID NO: 20724 - DNA, 560 bp, Arabidopsis thaliana landsberg
gacggttcttacgtgatgggacactttgggtagttgtagttagaaatttattagaacccgatgcgatgtttgtttcgttctctaattgcagttttccttttgcagaacgcactatcaagttccttgagccgattccagacgactttctttcggcttttcacgcgttatcggctcgaaagtgcgattggctgaagcatttctctcgggagcgagttgaacgtgcgcttcgtcttcttcacggcgtttcttgtcctactagctcggagtcttccgaccattgtactcaatttttcgtagacatgcaatcgacgaagcttactctgcgagaggtctacgccaagaagaaagaggataaggagaggcgattggcggaggagaggtgtcttgttaacgcgggattgatctcgctgcgggccgatcctgaggggacccaagatgggaatgttattcccgatgctgccgcgacggttgatgcggggttgatctcgccgcgggctgctcctgaggcgtcccgagataggaatgttattcctgatggtgccgcgccgattgatgcggca

SEQ ID NO: 20725 - DNA, 1875 bp, Arabidopsis thaliana landsberg
aagacccctaatttcgggtttatttatgataatttaatatgattaaaaagtaaattttggttacaaaaagagtaattgtgagcgtgaatggaaagttctgttattcttttggtttttaaagatttattttcaaaattttagaaaataccaaaagaaaaacttgttatttggttcagccgcttacgcccttcctggcgatgatgttgtctcccactttgacgagcttgcagctctgtaatatcccaagtttggtggagcttccttcctcatttcagaatctcaatcaactgaagtttttggacatcacaaattgtagaaatctaaagactctgcccaccggaatcaacctcaaatctcttgaccacctttgttgcaatggatgctcacagttgaggagctttcctgaaatctcaaccaacatctcaagactcgaattagaagaaacagggattgaagaggttccttggtggatagaaaaattctctaacctcattgagctaagtatgagccattgcagcaggctaaaatgtgtatccctacacatttctcaactgaaacatcttaagcaagctttgtttccagattgtgggtcattgaccagagttgaattgagtggatatccaagtgggatggaggtgatgaaagcagaaaatattgacacagcctgcccttggatcagaaaatattcaacttttcttcctaaagtcaaacttgatttcagggactgcttcaacttggatccagaaactgtacttcaccaagaatcgattatattcaagtacatgttgtttccagggaaagaagaagtgccatcatatttcacttaccgtactactggaagctcctctctgactattcctctatttcacgtccctctctcccaaccattcttcagatttagggttggcgcattgttaactaataatgcgcaggcagtagatctcgaggtaaaatgtgagttcaaagacagatttgggaacagctttgattatgacatttaattccaagctcgttatcataactgtattacggaggatgactatattctagctatattggactgtcgcatccctctaaacgaagaaaatgcccctctagctcaacggaactactacgatcatgtggagataaatgttcatataagtagtagaagttggagatcctttgaaataaaagaatggggtatacgactcttagaggactcttcatcagtaaagaaccgacttggtaatccaaacagtactcttccacatgtttctgaagccgaagaaggcaatatggggtataatacacctgttcaaggacttgttaatgagattgaacacagtggagagtctggagataacaatgtagagactgagagaagcacgaagcgcatacgggtaacattaattgaacatattactattcatctctcaattctttttgtatcaatgacaactgaattcttttgcagtaagtaatattatagctatattggactgtcgcatccttctaaacgaagataatgctcatctagtattcataaaagaggtcacaccacattattcttcctccaatattactttcacgcttaaaaaatgagatcaaatcaaaagaggattgctacaaattactattttttgcaagaaaataaacaaataaaattaagaacatatataattactcaaaactaaaacatgcatagaaaaagtactagaaaacaataaacatgaaatttgcccaagcatatgtggtcgagtggtaggagaagatttgaggaagggtgaaacttctagacctgggttcgattctccctcgaaacgaaaattatatttgtttgggaagtctgtcagttaggttttggtccaattggtttacctggtagtcagaaat

SEQ ID NO: 20726 - DNA, 783 bp, Arabidopsis thaliana landsberg
aaaccaaaactgcaaaaagaaactagaaatgaaaaatttggcctaatatcatttacgtccattataagtaaccttaagcaaagagtctgtttacctagtgatgagcaccaatggaaacttagatggttctttcatggaagagtaaatgttcgggaaaatggcgtgaccaccaaacccaaacccgaaaatcccaatagcgacaggtaagttagcaagatcaagagcttgtccacccgggtgaaacccgactccattaaccgacccaacccagaagagacaaagagccagcagaatcgaagagaagactcctccggctaagtgaatggaacacacatatatattaaagaatgaacgaatctcgaagctattttgtaaggatttatatagaaaatggaacctgagagataggagagtaagctaaggtctcttagccaaactgtaggaagaacaataagagtagctgatatagcaaagatctgagaagaatctagagatactccaacaatgtttagtgaaatgttggggaaaattctcgacaagttatcgctcatcatgattatatactccacacaacatgcatataattccatgtacaaaagtatctggaactctcaaaagagatcaaataaatcttagtttggagatgttagctagaaaataacttttaagtatatatgtaaatcatttccatataactcacggagatgatgagacggccagggaatccaaaggctgcttgaccaatgtcggggtaggtatggagatcaagagagctctcaagac

SEQ ID NO: 20727 - DNA, 1380 bp, Arabidopsis thaliana landsberg
  unsure (1)..(1380): unsure at all n locations
tagagccaaggtatcggatttcgggccctcgagatccataagcgtagatcaagctcacttgcctactctagtcgcaggcacttttggatatttggatccagagtcnnnnnnnnnnnnnnnnnnnnnnnnnnnaagtgatgtttatagttttggggtcgtcttggttgagctcacaactggagaaaagccgttttctgtaatgcggcccgaagaaaacagaggacttgtgtctcatttcaatgaggctatgaaacagaacagagttcttgatattgttgattctcggatcaaagaaggttgctcgttggaacaagtgttggctgtggcgaaactggccagaaggtgtttaagtctaaaagggaaggagcgaccaaatatgagagaggtttcagttgagcttgagaggatccgttcatcacccgaagatttggagttacatattgaagaggaggacgaagaagaatgcgccatggaaatcaacatggatgattcttggagcgtcgacatgactgctccagcttccctctttgatttatcgcccaagttagacgttgaaccgctggttcctcaacgaacatggtgatgatggaacctaaaacactgcaaatgtacaaagtgctgtgataacaaattctctcaatgttccattctttattaataaaaaatttgatgatgtcaaagaaaaaaacttgtattctccaaaacttttagcatatatattcgattacagaagattcatatttgtacaataactgtgaatcttgggacataatcaaagtagaataaggtacgtgtagattctgatgggtttacaagccattctttaggcgattacacacacatttcaacagagagacaaatgtttatataatgcaatcagcttaggctgacactctagaagaatttcagttttccgttggagaaactggcttggatgtgttccatttgacacattgccttgtcttttccagtcatccctgagcacaacaagtgcctagcgcctagtgtgacggcaaagtagatataaatggtgcagaggaatgccaaaagaagcatagcagtcaaaaggaaacgatgcctctggacaacagtagagcagctacccaagtcatcccattgcttcttaagagcatgtggcctccgtaatggtgatgatacaatcccatcaagaaccatatcttctaaaagaccaacctttccagcttaacaccaacctgaaaaatgacacacaagttttgagttcataaaccaaaagcttcttcaaaaaataaaattgcagatacgagataaacaaatgggatgtaaaataatgtacattgccaaattcaaaacaaacgacttgcgacgaatttaagacaagataatcttcatgtggatata

SEQ ID NO: 20728 - DNA, 1274 bp, Arabidopsis thaliana landsberg
tccagctaatgcggtttcacaatccccagtgttaaggcatttccagacagagcaatcgcatggaacttttcatttctctgtctctttagcgactctgcagctctcagtgccctaagagttttcacggtcgctagaaccatgtccatttcagtttccaccttctcgtttgtccacatctctatggaagatgggtagtcacatatcatgatagacgcctttcgttcagagtcttgcgatgaaggcaaccgctgccacagctcttctgtaatataaggcataaatggatgcagcaatctcaaaccagtctcgagacacacccatagagcatcttgtgcatgaatcctgctttggttgtcagcagcaaaagaaggcttaattgcctcgataaatacatcacagaactggtattgccaccaagcatacactgtgttggcagcatccgataattcaaaagcattcaaggaatccactgtattcgatattgtcttatttagtacagaaagaatccattggcagctgaaggtcatggtttcagggcgtagagtttgcacaggaggagtatacccatcgccaagcttcatcatcgcaaatctgacagcgttccatagtttgttacaccactggcggtagccaacaaccatgggatttgaatttctgtatttttaactaaagaaatcctctcaaatcctccaaaatcattaaaattcaattccacaaattgttttcaataacagtggattttaaggtggattttgaaattattagttcaataacactaaatttcatgagactttttaaaattcatgtttgaataacattggatttataaattctacacaaatctcttaaaagttgaaactatttgcttctaaaagcgttcacgtgggatttaaaacaacgaatcgtgagttgtcacatcaataattaacatatttaacatctaattaattaacattttttgaaatagtaattagtttctatttttaaaataacaaatgttaaatttaaacttataaaaaaggaagctaagaagttataattatgtaatattacccttataggattttacacaactaatccaaaacagacacatcataagttaatatatttaaatctaattaattaacatattaatatatatttaaccaaattcatttcaaaaataaaatttaatgcaatttaatataattaattaaattaccaaaatttaaaattgctttatatattaaaaaatctatactatagaaaaaaattgaagctatttgcttttgaga

SEQ ID NO: 20729 - DNA, 951 bp, Arabidopsis thaliana landsberg
cttggatgtggcggtcttggaccctgtacttcttaatcatcttccttgtcttgatcattgtcatctcccccttgatcattgtcctcctcttgaggtggctcatcttcttgatcttcttcttcattgtcttgagcttgatcctcatcttgggttggtggagatgcttgcatggaagatgacggttgatcttgagcttgagtggactctttgggttccttaggacatacatccccaatggacatgttccttagcgcgatgcacagagcctcttcatcatctagctcatcaagatcaacttgctccacttgggagccattagtctcatcaaacacaatgtcacaagaaatctcaactaatctagtggatttgttgaagactctatatgcccttgtgtttgagtcataactaagtaaaaagccttatacagccttaggagcaaatttagattttctactcttttacaagaataaagcatttgctaccaaagactctaaaatatgaaatattgggctttttaccggtgaggagttcatatgatgtcttcttgaggattcggtgtagatacaaccggttgatggcgtagcaagcggtgttgaccgcctcggcccaaaaccgatccgaagtcttgtactcatcaagcatggttcttgccatgtccaatagagttctgttcttcctctccactacaccattttgttgtggtgtatagggagaagagaactcatgcttgatgccctcctcctcaaggaagccttcaatttgagagttcttgaactccgtcccgttgtcgcttctaattttcttaatccttaagccgaactcattttgagcccgtctcaagaatccctttaatgtctcttgggtatgagatttttcctgcaaaaagaacacccaagtgaagcgagaataatcatccacaataactagacagtacttactcccaccgatgct

SEQ ID NO: 20730 - DNA, 774 bp, Arabidopsis thaliana landsberg
  unsure (1)..(774): unsure at all n locations
tctgaaattcataataacagtttctaaaatcattaatcaaagtaatctcggttttatttgagattttgttcattaattagaggatgggagattttgttcatttcttcttcttcttcttcttcttcttcttcttcttcttcttcttcttcttcttcttcttcttcttcttcttctttgtttagactgattatatagtgtgaaggctactgggatatgtgtatcacgacaaatccctatgattcttcattatgttgtaataggatcatatcaagtaggcatgatcttgtaatataaaggggtaagttctttcttgtaaaaggtaaattttctggtcaaagttagaataaagaacataattctcctatacaaacagatgttgaccacaaatatatattttcttcttttttacccaaaattaataagatataatttaataagtcatcaccatctctgctaagatgcatttcgaaattttcacctaattattccattatatatagtcaaatatgtgatatcccatatgtagttagatttttatttcaaatatactaaactcactccacaaaaactgttatgttgtttaaaactttaaaattatgtctgttttgaaacgagtggtcgagtgtgttaaactttgttaatgtgacttttagaaatcagacttttagtttatgttatactggtcatctgttgctacntttgctaatgcttctcgatttataagtatcttctttaatggggctcttactcacgaaatatatatatatatatata

SEQ ID NO: 20731 - DNA, 446 bp, Arabidopsis thaliana landsberg
gcatatgcaagatgatcctagatgcctaagtatgctttttttctaaaatggtgcaaaatgatatgatacagcgagcatatgcacaactaagtgataataaacatacacctaaaatgagtaaaatacagtgttatgatacctgaatcatgatgatcccatctgtatgatgtgtgtcacgtgtaactcaattctgctatggcatacgaatgctcatggatggttcgctaccgaccgggcgctacatgacgatgtagtataaggaatggaaatcttttttagactttgtgtctaggagtatgcaggccattgcctcgggagatcatgtattcatagtgagaagcatccataggcatagtagttctgctacatatagttgcttgttgcattgcatttgattgcatgtttgtttgttgtttgcgggttgggtattgcgtttattattagag

SEQ ID NO: 20732 - DNA, 383 bp, Arabidopsis thaliana landsberg
gtctctagaagatatgctaagggcatgtgttttttattgtggtggaaactgggagaagcattggacggtttatagtttgcatacaataacagttaccaaagaagtattcgtatgtcgccttatgaggcattgtatggaagggcatgccggacgcccttatgttggacgcccgtgcgcgaaggaatgctattcggtccagggattgtggacgagacgaatgaaaagatgaagatttttaaggtcaagttaaaggaagcttcatgatcgacagaaaagttatgcagataaacatcgaaaagagttagaattcgaagtgggggatcttagtgtatctaaaggcggtaacttacaaagggaacggacgcttttccaagaggaaaaag

SEQ ID NO: 20733 - DNA, 671 bp, Arabidopsis thaliana landsberg
ataaatcatttcattgttgatctttgttttgtgacaatgtctaaagagaaatataaaatcctgaaagttacatgaacgacaattccgatcctctaaacaaagatcatatgaaatcatgaatccgataatggctaatcttcttctccttctcatggcaattctctggggaaaaggtaaatcactgaagaatctaagagattctaaaatctgttcaattttcaattgaagtgtttatttttctctcttcacgggaaatggaagagggaaggtattgaagctgatggactcaaatcgattgatagaatatgataataggtttttagtcaattatgctaaaacaccaatcatgtcgttgtagtattttaggttgtcaatccaaatgggtgtgatgctagcaatcaagatgcaataagagttcacagaatcaagccaagaaataacaggttttgggatttcttagaccatcattattgatggttgcttagtgtagttttaggttagttcttaagaatatatatataattgattttgaaaattttgatgttaagagtttagttaagagattgaaattttagtaatatgcaatggtgggatcttagcttgaagttcttaagaagaaaaaaatttatttaaaaataaaaacattttaattttaaaaaacttaataatta

SEQ ID NO: 20734 - DNA, 504 bp, Arabidopsis thaliana landsberg
agaaactcccaatctctctagtttattaccttgatcatacaaactaaatccatgcactaaacacttctaatcaaatcctgaccaccatgtaattctccgttagcccacgcaacattctagattccataccaaagctctcaactatatccactaggctatcatcgctgggtctcatcaatcacgtaaatgcttaagaaccttttagactcattcctgtactataccatgataaatcgaccattctttatatatatttttttatttggtgttctttctctcccccagacttattctttttagagagtaaacaaaggagaactcgcatactggatcgacaccctcggcatttttccaacctttgtaattgattgttccaaataatgtataataatggggtcataggaaacattcctacccctatacactatttgaaagtcttatcaatctctcataatttattattgaaataattttttttttctttatttggggagaggaacactt

SEQ ID NO: 20735 - DNA, 2170 bp, Arabidopsis thaliana landsberg
tcatggaattcaggcatactaagccgagtatgagcgatgttaagcaaggagagagaccatccggttagtcatcacaaccaaggtgacattgttcttaacctatctttctcacaaattcatccctatgctcattctcacactggggacggtgtgacgtaagtatggggggttaatgaatccgttactactaatgctactcattattttgttgacttgagacctttatccactttttacactgatacgctctaacaaagcaaaaagcttttattttcagtttttatttcttttcaaggtaccattgggcaaggacaatgtagggaacaatgaacctactatatgattaataagaccattacaatgtgctaactcataccctaagtgacaagttttgcaggactcacaaggacggacaatacctagaaacccactaccgtatctatcccctgaattctcactacagagactctgtttgacctaacgttaactctattttatttggacgaattaacctaaccttaattctttctcatgaaggggtgttagagcggggaaacgagcatatacattcatgacttcttatccctttttactactctctgctgatcttgaatggccactcatttttagtggttcctacccttaaaccctatccttttttcaagcctcatgcattctcttttcctttttcatttagcagatatgtgcaaaaacgttggagagaaaggaacaacacagtttcccgccacaaaaacaaaaatgaagcaaaaataagagattgcaacaaacggcctaagagtttattcttccttggaaccaattcaaaaggtaagctcattagactcggtgtttcgaagttttgtttccccttccataaaaataaaaaaaaaataaaaaaaataaaaaagaaaaggaaggaaaggaaacattacaaccaagagagtctagtggcatagttcgaagaaaagacatggaaacttaaaggagagatgagccaattgcagtagagggccccctcagaaaaacctaagtctaggggaaccgaaagtaagaaagaagtaaaggagaaagaggtgtttaatagaagacgtggttggaaactgtggacctcaaccaatctgttagctcttgcgattttgcaacatatcctgcattcgagactatacgataactctaaacactttaactccaccacttaaacaccaaaatcccctttcataccaagcgccgtctaccccgaatgacaccttctaatgagaaagtccatgccaaatcatttaaagaatgtaaagagttgactgacgtgaattaagagttctgtaggatcaaagcggatgcacaaggacaaaaaaggggtaggactattgagcggccattctaacgcaacttttgtttatgtggtctgtaagatataattgagacacggtcactgataacaggagagttcccacgatattcaaacctctccaccagatttgttcttttattggcttgaggacaagcaaagtctacgtttgcgggagttgataacacgacttttagcccgttctagctattgatttcttatgtttcagagagaatttggtgccattctagagccaaataagaggataaacacgtattttaggtgcaaagaaggttttaagagttttgaagcaaaaggtatcgaaaggcaatcattccagtacttcagaagtttagcatccggccgacgtcttccccatcacggcaaggagatatttctgtatgtaagagtcaagagtcaagttgaagtcgaattaaagcaatccataaagccgtttagaagatatgaaccaaagagtgaagacatgccaaaaaccggttgtttggaaataataagtccaaaacacatccggccgaggagacttgaacccgggcagctccgagtagttcaccaccgacaattaagtcatgcccaagtctttccttctttgcaccgctgtcattaggctcctgcccactactcggcccgatcacttacttatccggcggcatgacgttcttgcccctaaacctactttttggcgctcaagtataaatacttgttctaagccctaaccctaggtgtgccttcaacactagaaaaccctagccgtcgccgaaagcagcccactctctgtcgcacctcttccggcttgaccaacaacat

SEQ ID NO: 20736 - DNA, 432 bp, Arabidopsis thaliana landsberg
tctaataataaaattagcttctacaaataaattttacaaatttttcacccataatacgtttactatacataatcccaactaatgaaccaaactcaacaaaaaaaaatccgataattcttcaaaacaaaacctcaaagaaaatgaataaataaaatattttaatgaaaacaaaaccaaagtttattttgggttaagaaaaactatttctattacaatcatctttaataaagtaaaaataaaaataaaacaaagaaaaggtacttcaatttgattttaaatatcataaatagatagaatgtaaaaatataagcaattcaaactaattttatatttatacgtagctaattctaaaaaatgagaactaaaaaaataagaaacaaaaataaaaatttaatatcccagtatttactctagttttttaaaacattttgt

SEQ ID NO: 20737 - DNA, 912 bp, Arabidopsis thaliana landsberg
taaatctccaactaaaagccaaggagtattacaaagaggagacgtagaagacaaccttctaatatcatcccataggagcctcttcccaacctccgtgtttctcccataaacaaaagtgacagcaaaggattgcagtatattagggatttttatagagcataacatcaactgatccgtcctgctgaaaaccaaaacagacatagaaggatcccacacaatccagatgtgacccaggtctgagctacagtaatttgaatccattctccattctggtagggtagcagctaaaacagaactatcatttttctaagccacatgagtttccaaaaagcaacctactaggagattattcgaaataattcagtttctaactacccgttggcgagagcggctattaaggcctctaacattccaaaaaaagatcgccatatatataaccaaaaagtgttgtgaaagccttgctttcaatggaggttgagaaaagatgaggtctcattcgggtcttcctcaaacgaaatctcttgtaaggatcgcaccttattgtgccaaatctttaagtgtttctttttctcctttttggacattgctccccatccagaaggttccacaaaaaggggagcaaccacaacactgatgctttttcctttattcaccggtgtgacctgcctcccaatcaatccagttggagccagagaagaattactctaaagctcgcaagaagcatcaatgatagtaggtgaagacagagttggctgagaagccgtccctggcctcttcacatcagccttgacaatccatttcggcttggccacaacagctaatctgtcacttttaccttcttttacccctttttggatcccaacggtccgatggaagcaggaggcaaactagcagaccgctttcttagatcga

SEQ ID NO: 20738 - DNA, 219 bp, Arabidopsis thaliana landsberg
ccaattctctgattccaaaaacaaaactcttgcaagactttacgaaaacttcccattggttcgatttgtcatcagtcagatagacaccattcttaggtttgatatatgtttctaacacatatagcataacacaatgcaaccttcctaccacgggatcggtgaaatatgcgcactctgcattttccaatacccaaagacagaccagtaacatataacgtc

SEQ ID NO: 20739 - DNA, 775 bp, Arabidopsis thaliana landsberg
  unsure (1)..(775): unsure at all n locations
gtagtcatgatgaatgtcataataactttcaatgagaatttgctggatctctcgtaatatacctaaataagtagatcttagttttagagagaactaaaatttagtttaaagcagtgcgagtactatttaagtatataaagatttaagagtctaggcaatagacttcctttggagagatacgagactttacataatccatgaaacttttcacatacttggcatctccaactccttcaatctcaactcttctgccgatgtcttctttgcgatcgtaactgataataaagaaggagccatccagatatattggtgtgaatatgaattcgctggtggaatatgaagagaaaacacggacgagtcaaagatcgtttcaagtacagatcaatgaaatatttgctgcggattatagaagaccagagtttcgagatgacgatgagcttgactacgggttttgacggcaacttcgcgaaaatctctatgatcagatcttgtagaagataaaatgatgagtcatcttctcgtatatgtggattgttctcctcttaaccttttttatggagattcctattgaaaatatcttagggagcagtacgtgaaacccaaaaaatattctagatctcactattacctcttgtacaagttatttccttatatgtttagaaaagtttacattatatagatgttcaccatatgttaagttatcactatatgtatagattntgtattctcatacgaaacacaactcgataaaatattntattgagtaatatttgac

SEQ ID NO: 20740 - DNA, 631 bp, Arabidopsis thaliana landsberg
  unsure (1)..(631): unsure at all n locations
atagcattagaagccataacagcatcaataagcccatcagcacaattcgaaagcgaattatgatcaatccaaatatgactcgacccgaaaatcgaaatcccatctccatcagccatagttctccaaccataatgcgaaggagagcttctaaccatagcgttaccagttggtctacaatcatgaatatgtatcccatggatgataatgttagtcacgaactgaatcgtgatgcatgcaccattagctatgtgaacgttgacgccacgaccatcgattgttttgaaactgttcatgattagttcttcttttaatgttatgaccatgtcacgtttaaagacgatccataatggttcttcttgaattactgcgtgacgtaatgttcccggtttagggttaaccgggttatcgtcgtttgggtcactcactannnnnnnnnnnnnnnnnnnnnnnnnnnntgcattgcgaccgaacccgattgcgcaattggctagatgttttcgccgggattgccatctccggtcacaacgccaacaatcatcgattggatttccggttgagcatgagaagtatcctaatcttcttctcgctgtgctgtttcgaatgctcctgaaccatcaaaaccggtttagtc

SEQ ID NO: 20741 - DNA, 541 bp, Arabidopsis thaliana landsberg
  unsure (1)..(541): unsure at all n locations
ttttgggatcgtgtggcagaatctttcgaaaatagaaaaaatccaacttggagtaaacgttcaaaaaaatctctccagtgtcgattacaaactattgagaaagctagcaaaaaattacatgcntgcntcaaacaatgtaaaaatctacgttcaagtggtgcgtcaagtgatgatatagggagtattctctctattaatatgtttttttgaatatttatttatttatattttttctaaattgtatgtagttcaatcaaggaaaagaaatgctaatgcaagataaacattttaaatctgattggaaatttgatcatgtatggaacattattaaaaactttgaaaaggttaaagatagtgctactcgagctaaaaaagtcttaaatctatgtggatcgaaaaatcctacccctgattctgtttcacaaacgtatctaggttcgtcttcattttttcttaacttagatgatgaaaatgacattattggaggatcttcatatcaacgaccaattggagggaaaaagttcaaatttgaaaagaaaaa

SEQ ID NO: 20742 - DNA, 1067 bp, Arabidopsis thaliana landsberg
  unsure (1)..(1067): unsure at all n locations
aactctgcaggcacttctcttcctggtaagagagccttcccgataaattctgatcgtcgtcggataattgctctccgtgcttggccacccaatttgaagcagttggtgaaattgaggtgcgctcttggcgtgtgtaaagggctaaatacggtctccagtgattcacaatcttctgcctctagatcaaggagcgaaccagggagctctggcaatgatgcaagtcttctgcagccagttagatcaagtgaaaacagctgatgaagagctttgatgcaatcaggaatcctttcaatatcggaatatcttaggatgagttgtgttaaagacatggggaggtgcgttaatcccatgaaattttcattgtagctcatattgagatagtggagacgacaccacaaagcaattgatgcatgcacaacttcgaactccgtgttgtgtgctatatccagataattgatgtgcgttgaaattactggaatttttctgaatcttgagcatccagtcatagtgacgagttctagggatacaagttcatgtgagctggaatgacttgtaagtttatgcagnccaccacctccaaccccaatagtttatgaagatgcgaaaaagaggaaggaatctctatcaaactctcgcaataattcatattcaaatccttcagatttgtagcatttgaaagatccgggagttccttcaaacggtaggacgcactaagattcaacttcttgagatttttaagcggctgaatatgtagagaaccacacaacggaagataaagagcatcacataacatgaaaaaagagaatagatattcacatatttaaagtcccaccaccaacctgggttccttcccatagcttcttgagctggctttgttgcatattaagttctacaagatattcaggattaaatgtaggaggaagacacttgcttgggtatgcctcccaatgaagtagccttagacgacgcggaaactccatttcccccggaatatgcattctatcattcccatcacctttacctttgtaaactctaaggaatcgaagattagccatccttttaaaagc

SEQ ID NO: 20743 - DNA, 469 bp, Arabidopsis thaliana landsberg
ctgtttaagtaatggagaaggagaagaagagagaacctgctcgggtgccaatagcaccagctcgcttaagacctttcttcttaagaatgaagctggaaccaatgaaaacacttgacgctgcaggtaggatcaaccccttcccattgtccgtctccattcccctatatcaacgtcaacggcaagctaaccctaaatcttatctatcgaatcaggaagacaattgaagtcaaccgaggtctgtccttgaataaccctatctatatagatcagaatcaatctgcgattataaatccggcggaaatgaagaaatttgaaacaagggttgttggtgctgatgatataagagaggatgacgaaagagaatcgaacaaggggttcgatgcaacgcggacacacaacgacttctgcgattttggtttgcagaagaaaattcaaaaaaatcgaattttgagagaagaaagagaaagag

SEQ ID NO: 20744 - DNA, 1862 bp, Arabidopsis thaliana landsberg
tattttcaatagatagaaaaattaataagtaataatattcaatgtaaatcgccaataaccttattaattttcttataataatggactaatggtagacgcgtagagatagttatgagaagcacttgtatctatataaactttcattttggagaacgtttttcatatgcactaaataaaagatgagtaatttcttctgccacctcaccgaacgtgagagtaaacaaatgtgacgatatccaaaattccccgtatatgttttatttatatgcaaaaatcactagttaaatcgaatgtatatgattgatagtatatagaaaaatagttttttaatcttgaggcagagtttttaaggtgacaacaaaaaatgaaacaaggtgtatttaatcaaatatttaagtgtttttgtgttaaaataatagatctaatgtaattaattaaagataaaaacaagtattatgaaatctaatgttattaaatttgtgattttaaaatctacattaaaattataattattaaaaatattttaagaattagatttaataattataagagacttacatgaattttagtgactttccttagttaacaaaatacaggattttaaatctcatagttttaggtgacttttgagaagattttaccaagattataacaacttccttaaattcccccaaatttttcaaaatcatataaaaactcaaaataactcaaatcactcaaaatataagattggatacaccctccttagaatttgggttggtttaatgaattaagttttggattttattatgatttaatcctttaccagttaatctaaactgatgtagaccgggatcatttttgaaccatattgctgatgttgttattcctaagagcatccctagtggtagagtccctcattaggaattttcaatatattaatcatactttttgcataattcaaagttaaggacttcataaggagattcttattttttcctcctccaatggtagaatcatctcattagggattttcagagaaaccttaaaagatcaacactttttctcagagaaaataaaaaccaacaaaatcaagtccaagcaactatcttctagactctgcgtttccaattcatcctcagccatgtctttggtgatcttgttctccatttgaagatcaacaagaatctaaccagccttagttcgaccaatcccatcatttcttctacccctaacccacacaagattgaagcatacatacatttcgacgtcgccgtgggttctatttacaaaactttgattccctgttaggtggtccttcttcaaagctaagagaatgtgtaaacacacaacacacacaagtttcttttggcaaatcaagtctaattccttctcataacttggaagcctttaagtacacaaaggaaagcaaaggggatcgataactaatcctaaaaccaaagaacataattaacaaagtgggaatatggaaacgtggagcttgatctcctaaatctaaataacgcacttatcaattcttcttttctctttcaccatgtcttatgtggttcaatcatggttaagcacttatcattccccaaaaacatatgcttcatatatccacgttacctacaatgatcaaatgagtttgattccttgacaactccaaaaagatgcaaagaagataatgattgtgaatttctgatacactattggtacaaagcaacttcaattgagataagagggactattaatgtatatagcatagattttgtatatagtttagcttcttcttattatagtgtctgtgcagattggtattctataaaccaatcttaatttggtttagtggcttatggtttaggccaagtctaattgtatat

SEQ ID NO: 20745 - DNA, 679 bp, Arabidopsis thaliana landsberg
aggtgcagtctcgggtcgcatgaagaaactgttccaagcatttgtgtttccacaagcttcagacgccttcctttgttcctccctctctttcttgaatgactttggcagattagaggagttatctctgttggggaaatccatgatcaacatctgatgaagatcctagctagtccacaaaaacaacatattacaggttagagacagaagtggtcactgacacttgtttagcagacattgcacggggcttagctggtaaaatatgcaacgtccggccctggaaaggtaacttatctaatttatccattgccctgcaacaccatccaaatttttaacgatttaaaatctgaactaaaacagctggagatgaacataagtgctacttattgaaaagcatgcacttagaacttcttaattggtatgaattaagatacatttttgcagattccggtatcaggtaaaggacgaaggccattcccctgcaacttctggtatccttgtcaagaacaagatggacctctgatatatcaccgaatttgctgaaatgttccataagctcttcttctctatttcatgagagaacaaatgaagatgtataagacacacccccccatcaggaaagaagaagaagaaaaaagaaccaatacgtggtagagtaaggcaggccatggacgaaaaggcg

SEQ ID NO: 20746 - DNA, 2366 bp, Arabidopsis thaliana landsberg
tctctcgcttatgttgggcatttctatttttatagatttttattcttataagtttctttacttatgacctttgacattataattgtggttgaagttctattaaaacgttgttttctattatcgaaatttcttatcttatgatatctaaaatattcgtgttatacctcagacctataagaaacatcaaatagacactcgatatttaataaattgtcgagctcttaaacaatgtgttctatctcatacgaataagatgtttgtgttcatgcgaaataatgttgtttcgtgtgcttagacgataatttggcttctacaagagtttgggttgaccgtgtatatgctatcaaataatttgactttataccaagttattgaaaacgctatcatcttaaggacccttgcatattaacttggaacagttattcactatctattaaaaaaaaccgcataacgtatttaatatggtttaggccacaatattataatcggtttaatcaaatttgtatgatcgacatataaaatataatatttgtcaatttgtaatctaattacacgttatttattttaaaaattaatgcaagacatacatattattattatgcttaatgtgtctgactaattgaaagtattcgtattatatatatttaagactaaaatgttaattattaaacttattgataatgattatagatatttacctttatcactgataccgaaaatctatattaaagttaattttacatcttcggtaactcttcaaatataaactatatatatagagaaagacgttcgcttatttctcatatttttttaaaagaagatcatccttggcatctctcatgcgatggcttatctactttaccatgctcttaaaaagaaaattggtccagtccgggtgttgctcccacagcgtgtccagtccgggtgtcgcccatcgagcgtggcttggtggcgacgaccatgacaagtgtccccaagcacctcagctaaccaactcgcccgaaaacctataaatagccctcattctcgacccttagaacttacatctcgaatagaaaaccactataattaccttcagccactagtaaacccaaggagaacccgcggaaagacccgattcggaagtcggtaagttttcccgaccttagctgcttttagtaaccgccgattagtccttaatagagttagattgtggatttctagataaccgagtaagagaaggaaccaatggattcgaggggtaggtacgacagttttccgaggatgtgtggatcaccagtaagtctcggacatgtgaagtagcacatgtttaggtgtttaatttgatttacttataattgcctaggaggttagtaaatcatacttagtgataattattgtgttcttcattgtcttttgatgtgattgcataatgttaaagtgtagtataaacttgtgctgtccaagttttgacatcatagccgttatgctgtccgcattgcggtaacattgccgttgtgttgtctgtttgggatttggttgttgttagttagaggtggtaagataactagcatagtcgaatgaggtcttcccatctgtctgttgtgcgttgcgtgaaacttcgtaatgttatggctttcaaaggctcggggcgggcttgcaaccgaccgggcgctacatgacgatgttgtagtgaggaatgcgatctcttttagactgttgtatctaggagtgtggggggcattgccttgggggatatcatgaattcgtagaggcctgttaggatgtctagactggggattggtagtgattgtttattttattgttaatgaatcttttgttattgattctctgtcattgggggttgggttaggttaatataactgttaggatccggtctccctgagtaatcttagattattcatgacgttatttgttttgcaggtaaccaatagtgggttaaactttaggggaggcttggacgctaggaataccagtgtaggtttactagccttgatgtaaaataactctgtagtaataaggttgtatgttttggagtctgagctcccagccggcaaaacttatatatttcggtaacctttttatgtaataaaacatatatgtgttaaaaagacgttttatattcgttgcttgtccttaaatgattatggtctagtctagactgcccaaacgctcttttacggcaaggggtggcaagcctaagtcgtaactgagtgggatgggcttgtggtacggataacttaggttcgaatttattcgttaatctttgttaactgtccgcaagtttcatcaaagtagcattcttgtccgtcctatttatataacggttcaggggtgttacaaccacctttcaaaatgcagatctt

SEQ ID NO: 20747 - DNA, 2417 bp, Arabidopsis thaliana landsberg
  unsure (1)..(2417): unsure at all n locations
cgatgaagtgcaaaatgtagaacacaaatttcaactactacaatttatagtgaaagagaaaattggtctatggtagttgtttaaacaaaccagaaactttcatatcaataatacaagaaaaaagaaacagagggatttgattattggtccatggtagatgtttaaagtaaaaagacagaagaaacataaaatcaagtttaagcttgaggtttgtcccacttgagtggcttcacgacctcccaggtgaagtcagggtcgtctcttccgaaatgtccatacgctgccgttttctgaaaccttccatttcctcctctcttcaagtccaagttgattgtcatcattcctggtctgaaatcgaatgtctctttcacgatcttcaggatctccttgtctggaatcaaccctgttccgtaagtgtcaacgaagacagacaatggctcgggtactccaatggcgtatgagacctggacaagagctctacgagccattccattagccaccacactctttgctgcttgcctcacgatgtaagctccacttctgtcgactttggttgggtctttgcctgagaaagcaccacctccgtgagctccccatcctccgtatgtgtcaatgatgatcttacgtccagttaaaccagcatcaccgtgtggtcccccgatcacaaaccggcctgatgggttgaggtggaagatggttttgtcgtcaaggtatttctctgggatgattggtttgatcacatgctccttgaggtcacgcgcgatctcgtcgttggtaacagtttcatcgtgctgggttgagatcaggacggtgtggacacggactggaaccatagcgccattgtcattgtagtactcaacagtgacctgggtcttgccatctggtcttaaccaacggcaagttccattcttcctgactttagtgagacgagcaccaatcttggttgcaaggacatgactcaaaggcatgagctcaggggtttcatcagtggcataaccaaacatgtgtccttggtcaccagctccaatgtcttctggacgtttggtgaagtgaccgtgaacaccttgagcaatgtctgggctctgttgttcaatgttaacaaggactttgcatttgtcagcatcaagaccaacatcatcagaaatgaatccaatggagcggcaagtgtcacggacaatcttctcgtagtcaatcgtagccttggtggtgatctcaccgaaaaccatgaccatgttggtcttggtacatgtctcacaagcaactttgctgtcagggtcttgctcaaggcaggcatcaaggactgcatcagagatctggtcgcaaagcttgtctgggtgtccttcgttcacagactcagatgtgaataggaaagtctccatttcttaaagctataacaacaaaaagaaaaactaaatcagctaccacataaaccatacatataaaaaaaaagattccacactcaagtgacataaaaagctaacaaagattccaaatcattgtggaannnnnnnnnnnnnnnnnnnnnnnnnnnnnnnnnnnnnnnnnnttctgatattcatagtgaaacagtcattgataaggatctaattaaacgtttaaggaactttcaagcttaactaacaattcatggacaataagtaacgaggaaggctcatttatggctcagacttcatgcaaaagcatttaaagccaattcaaatcatatactactactactactacatagagtacgcgatcgatgcgaaaatcaaaatcatttgcaaaaatgataaacctatcaagcagatgtgccataccgcactcgaaaattaacggatccacatacgttttaaatctggatacttaaaatctgtataaatcacaaacgatataacctaagaacttgatatatcttatttcaatagtcacacactatcgcagatctaattataataacaggcgtagaaggttcgaatattatcaaatctgaatcgaaacccatagaaaaatctcatttcgtttcagatttaacaacaaaacccgtaaaagcatcgcctaaaaactcgaaatcaataagacggagaagaagagcgaaacctgcggcgattagagatctggggagcctaaagcctcaaagcaaaatctgaacagcgagcgaagaaggaaacgagacggggacgatttgtggatgacaagggagtgagctatttatagggattaaatgacactgttgactgtccaccggatctataggtttttgcttttggacttcattcttacttccatcggcttattcggctacatttatttatttgctttttagtgtttttaatgcgttaattataaacccaattggaaagtgaatcaaatcaatttattatctcacgtcacatgaacttaatatattgtatttggtcatggctctgttttttttgata

SEQ ID NO: 20748 - DNA, 565 bp, Arabidopsis thaliana landsberg
ccaaactaaccatcagtgtttaaaaacaccttctgctgaaattcgatgtaaacaattgacagaagacgagttagattcataccagtttttagttctccttcgttttgacttccctctccgccatcttcactacctccctcgtcttcttcctcctcgtcttcttctactactacttcttcatcctcatcctcttcattctcagaatcttctgaatcatcgctctcgctttcttctgcttttatcggctttggaggaggtacaaaacttgcgctggatcttctccttgaactcgacacaatgttgcttgtatcaataccctcaagctcctttgttctttcttttcttttcttgacttccttgatctctgtcaccaggtaaaaccatcaacaattttatcatccgcatatttttcgctctagaatatcttgaaggcgtctacgctttcctgcaggtagaggagacttcttaaatgtaaagcattacctttctctgaaggatttgcagacaacccttctttggcgagtaactccttaagttctttaatcagaatttcctcgcgtttctc

SEQ ID NO: 20749 - DNA, 1551 bp, Arabidopsis thaliana landsberg
aatgtaagtgttctaaaaagcggtcacctaggccccaactaggcgctaggttcttatgcgacgcctaaacaactgtctatcctgcctaaaatcgcatataccttgttttaatgtatttttttagttttcaactaagtatatatttatgtaaaccagtataaatgttcatgtaatgtttgatatagttacatgaatattttttctgtttttgtttaccattcaacatatttattaggttttagatattttctataatatatatgtttaaaatcatatttataatgtttagattataaatgcctaaaatagcttaggccccatactaagcgctaggcattgggtcactacttgcttagcgcctaatactttcttaaacactggtaaacactaataattatgtaaataaacaccaacaattattagcaaaaataaaacaaatttagcaattatagaagaaacgaaaccggccatcgtcactagcaaatcggtcgatgtcgggcatgagctattcaccgtcgttggagaaaccaaagagagccgaccatcaccgttatgaacaacacaagatgctggacatttagccggataaatacctgacggcgagaagaagatcacataaagagagagcatttttcgtcttcaatagactcaatatgacaatgtaaagttaatggactgttatgtataaaattaaattcctttaattttagatcgtaaaatgttaaaaaaatctttctcaatggttgtttttttcacaatcgaacatttattcaatccctaggaagagaaacacaagtattatacatatctggaggacacatgtaagtgtccagatatttaaccagcggaaacaagaattccctgaagctaaaacacaaaccaaaagtacaataacataaacaaattacaggcacacaaataaaatctaatatttaatatttagataattcttttgagaagcatctgaaagacaattacttctttttcaagaactaaattttgctcttgatgacgaaaaatgccacaaccaccaaaaaactctgaactacttgacttattttgataattactagatttaagaaatcaaaacatctacttacaaccccaacttgatgaggcttcgatgatgaagctttggaatcatcaaatacatgttgacaccggtaaattcgagattcatttgatggaagaccgataagccgaagtagacttttcaggtcttgacccaaatttgactgtgaaatcttgttggaggaaactgaaggaaccgtctaaccgcaacatcactcatctcagagatgagagaggtggataaatcggttgaaggcctagggaagagaagctaaatctgaaggatttgaggaagcatgagaactagggatcaaaattgatttcgagaatctatggcttgggcacctagttgaccatcacaacataaactttattcggtcatgaacaaccgagagcaaagcagcaagaaacgccgacagccaacttgatcatctcgactgtaaaagtcaattgatgtaggataaaagccaaccaaacacc

SEQ ID NO: 20750 - DNA, 972 bp, Arabidopsis thaliana landsberg
caacaaactctcaaattaatctatttctaaaacttttttgtgtttacataatagatctcaatattaacattaatttgttataatgataaaacttcataaaaaaaactaatatgtacatttcaaaaataattatataaaaaaatattagaaaaacaaaaatttacatgttactaaaaattatatataaactagaaaagaaacataaaataaaacttgtgtgttcatgtatttcatgtatatattattgtaatgttaattttaatgtttgttaaattgtttaatgtaatattattgtttttaaacgttatatttttttatatttcaataacttcaattttaattttaatatatttaaattcatatcaatatatttgaaataattgaattaaatataattatttgtaagatatttacaccataaagattaaaattcaatataaaaaaaaaattgaagatgtgaatagtgcactctcgaattatagtcatttctcaagtatatgatgttatctacaacgtttctcgtcattgttcgacttggtattaagacatttgcagttttcaaatgtaattcttactaactttattcgtgatttaaaatgagaaaaatgtcatttaaatcaccacttcgccatttgtggtgatttaaatcatgaactttgttgcttgtgattaaaatcactaaatatgtgttgacttcaaataaaagctataactttagttgacaaagccaaattagtcacatcgttaactaactaaacggagcaattaaacgcagtgatttgtccgttaataagtccgcttaagatgcaaacgacgtcgtcctgcttttgaaacagaaactcccaaattgaatcgaaccctagaattcaaaattgaaatcagatatcgcaaacccccaaattctctcttgtctaattctttctgtttcttctcgaatttcgatctcaaatctcgatttcattttaatttttt

SEQ ID NO: 20751 - DNA, 202 bp, Arabidopsis thaliana landsberg
agatgctccttcacaagtcccattgtgcatgaactcattcactttcatgttttttccctcttcttggcagtaaccattataactgcacaaggttcctataatatgaccttgagagtaatgaaacctgtacaaatcataatcacttgtgttacttcctaagcaaaataaataaaactagttacttaatgcacatgggtttaga

SEQ ID NO: 20752 - DNA, 471 bp, Arabidopsis thaliana landsberg
gttatagttggaagagtgaatttcggttgggtagcgttgaatccttcttagcgtttcagggtgatactagactgattcattgtatttggttaaaatatattgtggtcgaatgactcgtaactttgaattggttaatgaaaagttgatgttgagccaaaaaaaaaaaaaaaaaaaagttatgattgaggaagtatgggaacttggacgctatacctacccaatgcatgatttggctcaagtgtgacgaaagaacaacaatcaaatttctttatagtttctttgatcatgtttattctcagtttgatcacgctaaacctacccaatgcattatttggctcatcttataacacattagaaatattttgtcaaccacaatttaaagatgtttttcaaaattttccattggttttctaaaattttcatcatcctagaaacttttgtagaaaaatactagaatgttaagaatgcata

SEQ ID NO: 20753 - DNA, 586 bp, Arabidopsis thaliana landsberg
ttaagtttgaataacaatgatcaatgaactaattgagctcatgtaaacctaagaacttattcgctagaaaaaaaaaatttgataactacttttggcaataaataagttaaaatcttttattggtcaaaacgcttaagtttggatcttttattagccaaaatttgtaagttcggatatttttcacttttcccatttaactatagataatatcgttagtttttactaggttagtttcatttggcaaaaggaaatcatcaagacagattaatctggcattatactccttcaggcgattatacggtgaagtcgggatactggttcctatctcatgacccaacggatattcgcaccaaaccattgataccacacggctctgtaaatttaaagaacaaggtatggaaactccctatcattcccaaaatcaaatatatgttatggagggccatatcgaaagctttacctacatgttcgagactggttacaagaggcatgaacatcagtccatattgttcacgatgcttaactgaagaggagtcaatatgtcacgttcttttcacctgtccttacgcaatgaggatatggagac

SEQ ID NO: 20754 - DNA, 1871 bp, Arabidopsis thaliana landsberg
  unsure (1)..(1871): unsure at all n locations
ggaacaaagttctgtcgttgcaaagatgcaatcgaacgaagaattcgtcaaattaatagagataacccaacaaatcaactcagataactttcgattgaataacttgtaatcgacacgatgttcataaaacaccaaatgatctcatgctagctctcgagatgagagaaactagctacaaagtttcagagaaaaaccttagaagattacaaaatgattcgatgatcgaaaacgatgactctcctcagcgtcatatacacgcctaacggccaattctgatctgcaaaccaacacatgccacgcgtcacttccagatccttctttattcttcacttacttcacacgtgccaactcccacgtgcgggttctgcatcaaatctccctccttttgcagaaccttgtcctcaaggtttcaatcaacaaaagctgagaatttcttctgaagatcaaagagaaactcccaggttgcctcctctactggttcattaacccacttgaccaaaaccttagtagctgcacgaccctgtctgttcaccatcttgcgttccagaatagtttcaggtgccttctcaaacacgtccggaagaacagaaggtaagtggtgtgtggtatggacattgcccaccaagaccttcagttgggaaacatgaaacacgggatggatttgagagtactcaggtagcttcagcttgtatgcaacctctccacacttgtcaattatctgataagggccaaagtacttgggggaaagtttctgattagaacgcagaaccacagactgctgcctatagggctgaagcttcacatagacatactcaccaatgtcgaattcatgctcagttctgtgttgatcagcaaaaactttcatctgatgctgtgcacgcatcaagtgaaatttcaggtataacagcatattctctctctcctgcaatgaacgagccactactgccaccttagattcaccgggtagatatggtaaatgagttggaggtgcctgaccatatacaacctcaaaaggagtcatatggcttgaagtgtggtagttagtgttgtaccaaaactctgctaaaggtaaccagaaactccagagatgaggtctagcatgacacatacacctgagatagttctccaaacaacgattgactacctcagtctgaccatcactctgtggatgatatgcactagaaagcttcagagcgaccccttggagagaaaagaattccttccaaaattcgcttgtgaacactttgtctctatcactcacaatagaattaggatttccatggagcttaaagacattatccagataggcttgagctacagttgcagcactatatggatgagccaaagcaataaaatgagcagctttgctaaggcgatcaactacaaccattatcacagacttacccgctgaaactggtaatccatcaatgaaatccattgaaacatcactccagatcgtttcaggaattggtaatggttgaagcaaccctggatatgctgcgttatccggcttacactgttgacacacattacaactcctaatgtaagcctaatctcttttaccatacccttccagtaaaacagacccttcaccnnnnnnnnnnnnnnnnnacgacctgaatgaccaccaacgcctgagccgtgtaaccattgcaaaatattatcctttattttcacatcagcagggacaactatcttgcttttcctgcgcaacacaccttgagtccaagaaaaatgtctcttagcagtaggatctttcttcagagcctcaatgatatcgtgaagacctgaatcagtgatgtacccgcctgaatttctttgagaaggtcacattccaccacggtcatcgccatatgtaaaacctctgaacc

SEQ ID NO: 20755 - DNA, 615 bp, Arabidopsis thaliana landsberg
accgattctattacattttcagtcatagtagtactaattccgaaatattacatgagtgagtaatactattacttatatgaaatactacatgtctaagtaatatgggtgctattaaaacatattatctatataaattacggtactactatagctagttcgaccagtattatttttgcgacaagaacaaatattcgatttgagttcaatttagtatgaatcagcatgtgaaatcaattgctaacccattaaatgaccaaatcaagcctaaatctatacttaaacttctaatgtaggtggtaaaacacaataactcaaatctaattggattgaatctcaaaatcctcaaaatcctaattcaaagcttttgaagctctctccaactcgatgcacatacctggacttagtagattgatgcagcttgcaggaggagaaaaacggcaaccaatgcggctcgccggaggaagaagcccaaagaagaaatcgaagctcgaggttgagcttttttttttctttttccgttattttttttttcaaaatgtttagaaatattaattattcattcaaaagaaattacaggggtaaattcgtcttagcacatttcattaattcaaaaaa

SEQ ID NO: 20756 - DNA, 752 bp, Arabidopsis thaliana landsberg
acggacaataccttaccggagaattcaagatctcgtagtagaagacagaaaagttgagagccaagccgagtcttattggatgtgttgtagacaattccgtgctagcagaactcgttgcagcctatatttaaacagaaatatcagctttctttcctagctattcagctaattgatcaagagaaaatatgacaaacatacttcatacgccttgagtgataggtccgcagcttcctcgcgatcagcaccggacttaaattcagccaagtatctgaaataatctcctttcctaacaacaacaaacaaaataatcaaaaaccaattcaagtgtgtgtcatatactttcttgttttgattttaagtttttaattcaagaatgagactaacattttgtagtagaagacggtggattctcccgaagttgcgaatgggacaagatgcttatcgatgacagccaaaatatcgtaacaaatcttggagagttcttcttcaacttttgtcctgtaatccttaatcctcttggcattttgttcgtttcctttcgattcttctttctgctcgatcgaagaaaggatccttcacgatgctctcctagcaccaatcacatttttgtaaccaacagataaaagattcctctcttcaatggtgagctctacattaagagctgcaactttcttcattgcttcaaccatctctatttacaagaacaacacaatagagcatattactcatcaaaataacttcaaataaaacaa

SEQ ID NO: 20757 - DNA, 1666 bp, Arabidopsis thaliana landsberg
aagcctacacatcctcttttgtttgttcttttctcctatatatatacatataattaaagtaaacaattaaagctttaaatttgtcgacgatgtcttagaataatgaggagaaatgtgtcgtctatataaaatctatagtctatttttgtttatgcgttggttaccaaataagtgatgtaaaacaacaataataactatcacttatttgaacgcatgacggtcgtacaataagtaatgtcatattttctacggttagcgtcatttatcttatatcaacttttattcaaagtgatatgagacgctgttttttttttttggggtcagcttttaagctatgttaaagcattgatgcaaaatacttatcttctagtagtccgatcgacgtaacttaaggggatagattcctacataagataggtaggtgcgagttatatcaggaaccatatgcctaatgcctcgacatatatcttcaaaaaccactctaaatcacaaaaatttaattcccatattatcgagaatctaacagcaatatatagcggactataaaaaaagagatatgcttaacagttaataataaatatgcaatgcatatgtgaatcatagttttcttggtcaccctctaaacttgtattaaaatgtagggttggaaaattataaaccgaaattacaaaacctacaaaaatgaaactacaaatgtggacaacatgccaaagagtcggccttagaaatgtgtgaatgatatatatcttaaataaataaaaactatgagaaataatgtttataaagatgcaaacatatatatatgttttataatctctttcatatgttatattttttaagagtcggaataaaatatttaacacacacatagatatatcgttgttattacaaacaagaaaggtagtacttatagacaagcatgcattcttctccataagagaatttgcagcaacggattctgttgaacgttattgtaacattcaatacaatcaaccgattcgatccgtcgcttattttattattttgtataaacatgcatgtttgtatcattcactgatatctaaacacacatcacaatatggcagaatatataactggtagataggttcaacatgagctattcattcttctggtcttgatcgaatccattaatgcgcatcagagatactcagtagtggatacaattgagatctcaacaccgatatatatctgatcgttcactagaaatcccctcgaagatttgtggagttcctccagcggcaaaaacttgggacgtccccataaggaatccatttgattaacagggttataaggaaaccaatatctacactctttatcaaacatgtaactatttatcagcagaaggcttatatgtatatgcatatagaaaatgtaaagcttagaaaaaagtataaattagtgaattaagtgtatatatatatatatatatatatacacataccagtttcacagtgattgcgattgagttggtccaacactctcaatttatagatggccaatgttccacccttaggaccattggtgacgtaatcggatgcaaacaaatacaaagccaacgaatttccttttccatctccgtttccttttgggtacattactagtaacctggttcatattggaaacatgcatattttataaaagaaca

SEQ ID NO: 20758 - DNA, 685 bp, Arabidopsis thaliana landsberg
acccacaaaataatgaaaaattgaaaacaataaaaacttagtaagaaagaaaaagcttcaaaataattacttctactaccatcgttcactcatcaccgtccctcctctgcagctgcatagcttctactttctcttactgaagaaccagcaattacgtcctcctcctgtgcattgcttcttgctccccagtttccatgcctggcttctgatcgaattgttggcgctctctcattagacccgattctcatttggtcaatatcgatcttgtgatgcgctgtatcgctgccctcttcgtcatttaaacgctgctgcagtttcataacatcttcatcgatgtctagatcgtcttccaccttctggcgccgttcctccctgttttcttcatctgcttcttctggtcgttcccatgtggtagccaatgtaatattccttggaggttcttctttgatgaacgctctgaagtcattccttgagggtttaacttttgagcaaaatgtctcaaaaaaattgtttgaacacccacggttataaacgttgattctattgtctgatctgtaccggaaattctcataggtcgtctgaaaaattgaaatgttgggtatcagataggacacaatttacacaacgcacaccctgagcagaacaaaactaacctggtttgtgctaatgaggtacaagtgaaacc

SEQ ID NO: 20759 - DNA, 1579 bp, Arabidopsis thaliana landsberg
agaacctctcattttgatttaaaactacgactagtctaccagagaccaaattgatgttgaagaaaagtaataaagttgagacaaaggacgggtcaaataggaaagctaaatctggaaaagatcattaccgggatcctaagacattcagctcatatgtgatatgagcgacaggataacttccaagaggaacttttgctgaaacttttgcgggattataagatcggctctttctcaactttgcggctcccgttgaaggcagcagatttccatcaaagacagtgaatttcgttcctaggaagttcgatcttcgacaagtttagaaagagcaatatatcaacaagagtttcaatagaaagaacaacttataaataagcaaaggacctttactggaactgcatgaagtttactagatcatgttaagtccttctaatccatcaatgccaagctcaaaatgctaataataagactcttaatcaatactagagatcggtaacctttttgtgtagcttgtttgatcatatatacgcacctcactttgccaacataagcttggcttcttctcgacatatcatcagaacgtaaagagataatgtaatccgtacaagttgtgtgcttcaacttacacgcagcaagcagaaacttcccatcatccgttaaagctacaagaacatacacacaaagaagatgtcaatgtaaataattgcagaaccaagaaacacgtgaaaagaaaacagactccactagatactgtttgtttctctaagaacatgttaaacagagagattgatgctcacagttggttaatccgagatagagatgatatgattgcgtaattcgattacgtttgataaagcattgaaccagtgaatcccttggaccaggctgcagaagatacacaccaacaaaatcaacatttaagtaagactacacaataattaaactgaaactgatacaatcagtaaaaatgatcatatatctcttgtttcatgatcaatatcatagtttacgagccagccactctgagtttgagaacaaatacaaacgcaaacgcagcgtcttcaaaactcatagtcttcaagattttgaaagtgatcaacaaaaaaaatcgtaactttatgtcttaatccgatcgaaatggacaaggaaagatataaagagagagtgattgagaattcgaacctgcttgagagagatggggaaagtcaacttagaagagatctcagggacaacgacggtttcgttcataagtagccgccagccacgacaaacgccggcacaagccaccacgctgcgtcgtgacggccatccgccaccgtccgccgcttcaacacgaatcagaatctccctaagaagctcttcaggaatctctgaccagcgataatcttgcgatgacacagaagtggaatcggcagctgcggcggcggcaaggtcgtggaccacacgatgcggtctcgaacgcatctcaaggattaagctacgtaaggtcatacgacttctggggatacttaaaggctgagtctttagatgattataatcgagttttaggtggaagaaggacaagtggtggtggtggtgttgt

SEQ ID NO: 20760 - DNA, 538 bp, Arabidopsis thaliana landsberg
tctgaaaactttgtttcagttatgtcctgtccccaacaaactactactcttgttcatatttgttgatccaaaatagagtttacctccaaaaaatgttttattgattcttcttattgaagagtgttcttaatgcagataacaagaaaaggaacaaatgaacgtttctaacatttggaacgcactttgttagaaagcaaccccaaagaattcaattagtgtggtacgaggcttttaaagctcgaagtaaaaggatctgtttgtctcaaatttatgagttccaatggacaaaattaacgaatcaattccaaaaattctctctttcatttcaaccaaaaacaaaaagtctcttaatttgcactcatgtgcagagtgacaagagaagcataagcaccacctgaaatcttcatcagtgtctcatgccttcctttctcagcaataactccgtttttcacaaccgcgatcacgtctgcgttcttaatcgtcgtaagccgatgagccacaactacagtggttcgattaccataactcgatcaagtgc

SEQ ID NO: 20761 - DNA, 1706 bp, Arabidopsis thaliana landsberg
acgaaaacagagtaagatttcgggttttccgttgttaacgatgagaggcgacccgcgagagggtaaaaatggactagtgtgacggccagagaatcttttagcttctcaagaagagtgtcaatggagtcaagtggtggcttatgaaagagaagacctttttggatgtactgaacagagagcattgcgtagtcccatggagataaatagtacggttgctttgattcttctggtatggttttgggtttcacaaagcatttcgaaacgatttttactgaagatgaagaatccattgtggaagaatgaggtcttgtagccttgcatggatgaatatatatggacaggagaggagacaaacgtctaggttggtgaacctggaaattttcgtttatcctttactactttggagtttttaaaaagtccaaataaccttttgaccaagtaaagagttggtggttcacgttatgacaaaaaaaaaaaagagttggtggaattttttttttcttatggtcttggtcaatgaatttgtcgaatgaatgacatatctcatccgattggcaaatttctactacacctatcttgtaattactaattaagtaaggttggttcgatatccaaatttgattaggattgaaacactgggatttgactacatatggaataataaaaggattgagtagatagaacactatcgctgaatacgtttccacaaataatcacacaatatatactaagagattaaacttagtaaatttctgatttttttacgattttcttgtaattcaatttttaatacattcgttgcgtctataatcacttttgagaaataaacattttataatgtctaaaaggtaaaaatttaaaatactttcacaattcaacacgttaaaacatgccaaaataatatatttcaccactatcataatcggcattagtattactgtattaggtattaaaaaaacaggtataaaaattttaaatcaaatgaacaactaggatgattttaaaatttgaactatacataatcaacgtagatgctcaatagttaggatataatatgtttttccgaatctggttgttgtaatgagatcagaatttgtagctttgaaaaagttgaaaaaggataaattattcatgtgctctttgaatgtctcttagcacttcgaattaggacattatctctgaattctttgaacttgaattagtttcctacacgatcaatttgtaaaaaaatggattttctctttaagcaaagtcaaaaatcaaaacttttttcggatctattagcaaacaggtaggcgttgccaacttcttgtggggatcaataagacgacgaccaccacgcaccttttgttttgcttggattagcaaaatgtctaatgagacatttagagattccacttctgagcaaggtaacttcacgaacgcaacaaactcctctttcactattctattctcacaaaccatcacattcattactcccttttaaaaaaagcttatatattttggcccgcgataaatttccaagaaaaaaagaatgggatttactgagataattatttctaagatatcacgatataagattaatttaagctaaacccacttacatttttagcaagtgtagtatactctgcacaaaataagtgtagttttgccgctaaaagaaaaaattttagaaatatcaatgcctgaagaaaagtcagacgttc

SEQ ID NO: 20762 - DNA, 438 bp, Arabidopsis thaliana landsberg
aatttgaaccatatcaaagtgctttaatcgtttccgttgtttattcgctattgagtatgggatcactagggaacatttgtaagaaaaaaaaaatgggatgggttgtttcaatttggtaacagtgcaatcacggttttaggatgtgtaggaaaattaattgatgaattattttcctgatgattgatgtcggagaaactagggtgggatcacggttttaggatgtgtagaaaaattaattgatgaattatttcctaatgattgatgtgggataaactagggtgttaggattatgaggattgattatggagtgtttaatcaattgtgtgttggtggagtcctagtatcatcctctcctagctttaaaagagaatccacggtaaattatttggaatatatttatttgttataggttcttaatttttttgtcttgagtagcgt

SEQ ID NO: 20763 - DNA, 1015 bp, Arabidopsis thaliana landsberg
aaattcccatataccacaagttaaatctaataaatatatacattttggagtatattataaaaccattcctggactttaaaactatgtacaatatcatatcactgatatttaatatttcgttataagtaacaaattaattacttagcattcaacaaactttcctctaatctcttttttaattatattgataatatcgattttcttaatacatatgaatagagattcggatcttccatatatgattatcattttcttaggaagttaaacaattattttctgaagctaaacaaaaatttaggaaactaaataaataaataaaatcattttaattatttctaagctaaactatattacattctgatctttagttttaaatcattcatttttagttaataaaaaaaataatatcatattttcagttagcaaaatgtacatgtacaagatattgacctgcggtacaccgctgcttgattattttcgttttgaattaatttaatgtttcaattcaatatcatctatatttaaataatgatcttagatattcaatttatcaaaactcattgtttatatctatttacacttagtgattatattagtatgtttctatatggttttgtatagttccggaagcatatatattatacgcatatatattatacgcatctatatacaaagtgtgtatctcctaattttatacgtatctagaatgtgacccgtggtacaccaagggttaaatttttgtttattttaaatttttacaaaatgaagaatttgttgtgtacaatgtctattgttgtttgtgttgattaataatttttgataaagttgtgtacgatttttattacgtcataagtttatgatattagtaagtctaatattattttatcttctagtatatgacccgtataccctatgttttattcacaaatttttgtattttaaattatataatttaaaatttctatattttttaattttacccttagaacataggtaatttaataattttttattt

SEQ ID NO: 20764 - DNA, 1448 bp, Arabidopsis thaliana landsberg
cactaacaaagattttttacaggaaatgatcgttgcaagtttccgagcgttgctctgtgaggagggcttcaggaagaagacacatgattaaagctggattattggtataactcaatattgttccttatctttttttaattataccttttctgcttcaagtttagctatgttgagaaaaaaaatcaaataattaataaatagtaattttttccccttacaaagctgattattattacattctctaatcatcaacaaaattatgtatcacacactgtaacagctgcaaaaacgtaaatgggtgggagatttactttgctctaaagctgcaaaaaaataagagctttaataatttttagatctatatatacatttttgcaaccatgttgtgaaataaatcatggtcttagaacttatttacaatggatgccactagcttttaaagattgagttttttttgcaataaattaattaacaaataaaaaacattccaaatatatttcagttccatatatcacgcagatttctccaaaatttgaactagatttcggaaattatttaaaacaaaaaatatttgacaaaccaaaatacaattgcaatcccttaaaataagcaaaactcacctaaatacatttcttatcagtttactaaatcttatttctccaacatttgaattagatttcgacaactatttaaaacaaaaatttgtttgacaaactaaaatataattgcaatcccgtaaaatatttttttaaattagcggtgtaccgcagatttttttaacaggacgggtttggtagaacgggtttggaaggatgttacttaataacaattgtaaactataaaatataaatattttataaaataaatataatttagataaatataatttacagacttttatatatactaatttaaaaaaaaaaattgtctacgcagtgtaccgcgggttataatctagtatgtcttatgcttgttagaagaaagtcggatgttttgttcttaaattttgaatacatgccactaccatgtgtttctaaaacaaaaacgaaaccatctttaccatctctagttttattaaatcgggttagttggttaaaattcgttattaaattaatttataacttattaaatagagataaactgttatcataaagcaaggaaaaaaaaaaactaaatcgagcaaatacttgaaaatatgtgacgcacaaaacatagtatatattataatgttaataggtttgctattctggcatcaattatggttttacgtaaagttcagacgttttatttttttatttaaggattcttacatatgtttatgtttgtttggttttttttgttttttttttgagcaactacttatatatgtttgctggttttgtccgaaggccaattagttttcctttaaacacttgaagatatatatttttctctgacataaaattcta

SEQ ID NO: 20765 - DNA, 836 bp, Arabidopsis thaliana landsberg
tgagtatcaataacctaaaaatcatattttaatagattaaatcatgtatttgggcttaatccatatcagtggactcataccttttatactcagtatcatgtgatctggcagcacacggttggttagcgtttttgctcaaatcagagaaaaaaaaattcttttatattcctatgttttaatatattaattttgattttgcaaaaaaaatgttttaatatttaaactggtctcaccaatacaaatatatttagtaagagtatcataaaaaatctaagataataaataaacattataaataatactaaaatttctatatgagtatcatccctgtacatgctctagttttgtcaattatattgatttttcttaatgcctcaaaagttgttacaaaccaatgctaattttggacatgtctcttgagtcttgagtcttgactaatcaaatttagaaagaaaaaaaaacagtaaactaattataggttgttgtgtcctgacaactctcagccttaataacttaagattcgcatcatcaaattaataagaattactcgaagactggaattttagctgttttcaatttcaatatttgaaggatgattcaaatcgatacaagggagacctacatttatgtaacgtggtccacatttatgacaaataaatcatataagaattaacctgttgaaaatttgtaaaagtttaaataacatgaattgataattcgtgattcacatcaaattagtagaatatgattcgaagtctaatctcttagctgtttgcatgagaccatttagaaaatatattaaaaaatttagaaattatccaaatggaggcaaatgc

SEQ ID NO: 20766 - DNA, 1002 bp, Arabidopsis thaliana landsberg
atccacgcaagtcgtgtgttctcccacccacatgcagctcttctttgcctactaatcctcgaaacccgcatatgatgatcctgcgcaataaaaaaactctccatggtaagtgttactccacgacagaagaccttctgacgcaccccactcgttgccgtgtcactagacaatcgactccttctggccatctgttccatcttcaaatcacccaaaccctggaagccatattcctcttctcacatgtattactacctctctcacagctcctgaccagaagaaagtttccaatttagaggccctgctcgcaaaaggaaaatctaggttactttccccactacatcattgctttcctaatatggtcttctgctctcaacatattatgtccatcttaataaacaatgttgcttttgtttccagtgaatacttgatttttagacaaccagtatgtacgtctttttcactgagattttacaaccccaacaatggctttctactccggtaagtttctctctacaattctttctccccaccatattcttgcttttttcagaaaacattgaacgcttccaaattttatgaactgtagcatattgatgtcttgttagcgttcatatggggaaaacatgagacctttttccggcagcagcggatagtgattatggattcccttttcacctctataattgccagcagttgtgacaacttcaatagatgttctaatcctttggacttcgtgtggcaccggctgcttattttgtctgtcacaggtacaatcccgggtaggaataaaccgcagtgttggcttgaagatgtcgacacagtttacattcctatgaattggggcaagaagcattggtttactctttccgttgatcttcgggttggtcacatttctatacttgacccattccgtgattgcaattcaaataggaaagttctttcctacatgcgtactgttgtgcagactttgcctcacttagtgtgtgcttgttttgggaaagt

SEQ ID NO: 20767 - DNA, 577 bp, Arabidopsis thaliana landsberg
gatatgatacactaaacaaatgcacagataaatgatgctaaacatatacctaaaatgagtaaaatacattgttatcagcagcttttactctttgcggcctcatggtttcctcctcattttcatcagatttaggcagcatgctgcctcctcatctttatcttcaactacccactggtcagtaatatcaagaatagaatcatcatcatctaccctctcaccgtcagctttttccttggcttcctcaggtgattttggcatttttattgtcacctttggaggcacctttgtaggagcctttgtagtagcctttcttcctcttttatttttggcggctggctcttttacgattagctcatttaaggttttctccttgtagctttcttctttggtgatgtcttcgttttggaaattctcctcgctgtcgtcgtaaagcgtaaacggcgggaaccaggagacttctcaatgaaatcaatatcagcattgtttacatcagtggtcttagcaaattctccatcaagatttctactaaccccaacctcaagcatatcaccatccttctctaccaccgaaactaaac

SEQ ID NO: 20768 - DNA, 2572 bp, Arabidopsis thaliana landsberg
tagagaaacgaaggagatagcaaaagaaaaaagacgagatttttctatctttacattacgaaacacagtaaataataaaggaggagagaagttaccttgagagtcgtgtgagttgacgtgacgtcaagtggagagatgggaagttatttaaagccgtcatcaccacgattttcgagattgcagagatctcttctccgcgcctaatctagaccgtcagatgcggtgcgctgaagagacgctccatctcagccgtccacatcagcaacgacttatctcgcgtatctcctcgaaatctttcggttaaggaatctgaaatcaaatcgttttgttgagtttatcctcaaaaccgactgatcttatcacatctatcatctcatcaagaatattttcgcaatcttacctgacctatatgtccgctcatcgagttcgcctactcactcaatgggctgggggcaaatgttggagctggatttccctccaggaatccacctgcgaaaatactaagcaagcccacaaaagcccaccaagcccaccaagtagaggacctacgcagctaatgagctcacatacgcgaatgggtacttgggccagataagcccagtcacctgatgaagggagataagcgaataacaacctaggaactgatgaggagatattcgcggagcggacctgatatctcggaactgacctgccgaatatccaggaggatctccgcagatcccggacggagctaccacgtgcgtagacctatataagggagcaaggacgacttggaagacacattcaattcagcttacattcacacacatacttttacacttgtaatctcctttcacattgtaaaagctttgtcattatcaatacaaaaagtccattcgttcttagcaatataactctcaaggtttcagtgaagatctagccctcctttctcataatctcaattacaaatctctagtgtggatttcagaacccacatttggcgccgtctgtggggacggaaatagatcattccaacaccaacactaacacatcacttgtgaccaacgatcatggatcccaattcatccaattcatcgagatctggcttaccagttcagatcccaaacgatgacgttacggacgggggacctcccaacggatctccctcccggagcccaggttgctgctatccataacactgacacggagaacatctcccaaaactcgaattcttctggatctgaccaaatcactccccctccgcaaacaaggggcggagaacgaaacgtcacgatacagcctccaaacggagataacccggccaacccatctaatcaggtccctccgcgacctgccagcgaattggccgagctccacgcaatgatcatgaacttgatcaacttaaccaaaaaccaagaaatcgcgcatcgcaacctcgccgcaattgtgggtcagcagagatgcgattccactcgcatggcacattaggtagagcgcgatccgcgggtaaggaggttccccctcgcgaaactgggatttctgcccaggtccccatagatctgacaggtaccgtctccccggccgatcctactccgagaactcgtctggatttcgcctcgatagacgtctcacctcatatcaaccggcaggtcgcctttttacaggcacctgtgaacgctctcatcgaaaacctgacaacaggaaacgaaacaagcacaacgcctgccttcccaaggctaccggtcccacctttactaccaatggggtgttcgccccctaggtacacgtggactagaaaccaaacaaccgcgtccagctcctgcgttcccgggaactcaacgcatcaatcgaacctccattgctaatctaccatccgttccctggataccaggaagtgacctctttaacggtccaaccgatcctggagcaccaatcgattcgcgtaacgtcttggatatggaaacattccgcaattacgcagctcaatccaaatgccaaaacggatcaaatgcattcacgagtgcatctagcagtgagcgatcctcccgacatagatcgagtgatcgaagaaaccaggcgtaccccattcacggataggattacccattatcgcatcagagacgtcgagagattccgtttcccaggatacgacggaacgagcgacccaaaggctcatctgagagccttccgtctggctataacctgagcgtacctgaaggacgaagaaaacgaagcaggtcattgctgtttcttcgcagagaacctcgtaggtcacaccctcgaatggtttgctagtctatagataccttcgaccagcttgccgccgctttcttaaaaaagtactcggtactcatcgtaaacaggacgtctgaagccgttctctggtgtcacccaactttcaaaacgaatccctgcgatcttacgtcgaaaaattcaaagcagtcaaatcaaagattgcgaacctaaacgaggaggtagccatagccgcccttcacaacggcttgtggttttcctctaagtttcgtgaggaactcaccattaggcaactggtctcttaagacgatgcccttcacaaagctgtctacttcgccaa

SEQ ID NO: 20769 - DNA, 1535 bp, Arabidopsis thaliana landsberg
agttcactctcagtattctcatcaattcgattattttcattggggttgtttcaccgatctaacgcatgtacgcatataaaataatattatgttttaaaagaaaataataatctggttatcaaaacgactttttcaaatatataatttattcacatatataagttcatatcataatagttatggtacaagtttcctaaaactaaaaaataaaaacaaattttggcttcacagtcattggaacaaggtgaatccagcggtctccttctcggagaaaatggccacgcggacggacgatacaccacagaaaagtccaacgtgagttaactctaaagaaaacattttatttgccaaatataacgaataattatttattattttcagaaaatattattatagttgtgattctctgtttcgcaagagttgggagtagggaatgtgaagtagtagtggtggcccaagttatgtttccaaacgccagtaacgaccaaatctaggcatgtagatttcattgggtcacgtggatgcatcaaatttaacgcgccgcatttacttttcaacgaatggcacagtttcaactacctcgagaaaaatccaaaaccaaaaaagctatttggaatctttaaaatctttttacaaatttcttctattatagtattgctttgctgtactatatttcacgacctttcatgaatattttaaaatataaataaaagttgcaggcgcatatcttaatattcaaaagattcatttccaatataacaacattaattcagcaaattataacaacataattcattttatttgggcaaaacaagaaaattccttaattctatatacaatatatctaacgaatgaggtaagttgatatatagtaaaaagaaaaacttgcaagttgaacaccgaaacagaggatttaatttagaaacagagtgaaagtaatgtagaaaaagattaaaaaaacaaaataaaaaaatgatatatgataatgtaaacaaatgatcttataaagaggaagaagaataaaagttagcattagtctaatgtgttctagacttagccatcaacatgacaacatgcacgtgtacatgtatgatgtagacttattagtccaaacagagactcttgacatcttgatttgaaatttaatcttgttttcttttgttgaacggaatttttttagtggggttaggtaacgtactcgaggttaattgctaagtcaaagaaaattagaccatttggttagctgtgtgaattgaaattatacaactttgtcttcacaatggacacacaagatgagaaagttacaaaacaagatagacattgttaagtcaactgatacaaatttgtcttctctaaccactttcttatcacagattcaccatctttatatattaagacacacatatagttatggaaaagttacaaaacaagatagacagcatatacttgtacagattttggaaagtacccatggtgtttttgatctcatttactactattaagttcttgagatagaagaacataagtgaaatttc

SEQ ID NO: 20770 - DNA, 521 bp, Arabidopsis thaliana landsberg
ctatctcatgtcaaactcttggcgcaataagatccatcttaacagcctaggtttggtatccttcttcgcatatatatgcctcagagcagcatggtcagtgtagactgtcaccttagaacccgctaggtagcttctaaatttctcgaatgcaaataccacagctagtagttccttctctgtagtggcataccttacttgtgtatcatccatcgttctgctcgctggcccaaaactgctcctattgcataatctgaagcatcacaaatgatctcggatgggaagtcctagtttggagcttggactattggggcagtgaccaaagcttccttgattaacttaaagggtgtcaaagattcttcatcaaatgcaaactcggtttccttgcacagcagtctggtgagcggtcttgccaacttggagaaatccttgatgaatcttctgtaaaatcctgcatgtccaagaaaacccctgatgtccttgacagtctatggtggctgtaactgcatcatcacgtcaacctt

SEQ ID NO: 20771 - DNA, 1407 bp, Arabidopsis thaliana landsberg
tctgatgacttgtatgaccgagtttgggttccattcagccagaatgaaacagtgtcgttaagtaccaatctaccggttgatacaagtagcaattcctacaatgtgcctcaaaatgtggcgaattccgcaattattccggcggaagctactcatcctctcaacatatggtgggatctccaaaacatcaatgcaccgtcatatgtatacatgcattttgcagaaatccaaaatcttaaagctaatgacatcagagaattcaacattacatacaatggtggtcaggtttgggaaagttccattagacctcacaatctcagcatcactacaatctctagtccaacagctttaaattcttcagatgggtttttcaatttcacttttacaatgaccacaacctctactcttcctccacttatcaatgccctcgaggtttatacacttgtagaaaatttactgctcgagacatatcaagatgaaggtaaaattcatttaacctcattcttttaaccactttgttttctttcaattttttcaagaagttaggaagttgtactagtttgtgaaaaataatttcaaatccacatgaatttatttgacttaagagtacattcaaataatcagatttttctaagttgacaaaaaaatagcatgtttaaaaatgatttctaaaatttgttactgttatctaataaaccatatgctttgctgttttttttgtttgtttgagtattatagtttctgctatgatgaacatcaagaaaacatatggattgagtaaaaagataagttggcaaggagatccatgttctcctcaaatatatagatgggaaggtctgaattgcctttatttggactctgatcaacctctgatcacatcattgtatgttatcttttcatttcatttatatacatttcatcactcctttttattctattttcggggtttcgaaaagattctaaactctttaaaacattaggaacttgagaacgagtggattgaccggtatcataacacatgatatatctaatctaatacaattgagggaactgtaagtatctaacagtatacaacataaatacacttgtaagtattttataaaatcgttttctttatttctacaatggacagtgatttatcagataatgacttatccggagagattccagattttcttgctgatatgaagatgttgacactagtgtgagttctagttatatataaccgtttgctcattctgctctggttttcttggttttgttcttgaaagattctgtcgatcttctttcacagaaacttaaaaggaaacccgaagctgaacctcacagttccagattctattaagcataggataaacaacaaatctttaaaactaatgtaagatattttttcaactctttttttttctg

SEQ ID NO: 20772 - DNA, 2072 bp, Arabidopsis thaliana landsberg
atttagctaatcaaggtcatctttaactaaacagattgatttactattgattcctttaccaaattcttctaccggtgcttttagtgtaacccccagaccaaatatcatcatctccaatagaatctactctttcccatttgttactctcaactctcaagattcatcttaaagatgtaaaacaaatgtttctcttcaactagcttttctaataaactcaagatgatcaaaacctcttctgttttctgaatcactattctcctcttccaaatgtactcccactcttttgaaacgtactcaaacggatgatcccaatatggggtttcttcgacttcttctttgggaaaatctccagagaaatcgacaatcttgatgtgatcatcagaagtatacagataaagcttgctgttcttataagccagatcccaaaaacccaaatttgcgcctcttgtataccaattcaaccaacaatcatctcctttcttgtgtgtgaacaactcaagcttattgaaaattcaagcaacgacataatctcctgttctttcgtttatacacagaacagctgctctttcgcttccgaagatatctttcgacacacgttccttatgataagactcaacgaaataacctcactcatcaccaccgtttcgtttgaatctcacttgtccaccgcgtattgacgtctccattgatggaagattgattctttcgcccggtaacatgttaaagatagaaaagtcgagataagaatctaccatcaatagacagtttccgaagctagccatatatataatagctcttgtcagagattccaaagagtttcgcgttgtaaatcttgtcttctccgggatcgaacaacatcgaagattcattatggtaatatgaattgccatggatacagaggccgcttcacgcatgttttccaaacggagaaccactctaagcaaacgttttttatacggtgaaaatctatagtgctcaagctttcgattatcggacgtaaaagattggaccaatcttgattttcagacattttattcactcatcaaatgtctgcgcttacatcacactaatgggagctatagggttagggttttagggtttacaaccaaccctgtacatttccctttttgatgttctgcttttcactttgataattaactgtattttatattttactttcttcctaaatacaataaatttcttaacacattcaaaatcccatgaattagaaaattggttttcacatgtttcagattgatgaatgaaaattctcatacacctgattacgtagtttcttatgagatacatttataatcatatttatataagatttaggcaaaggttctaatcttgatttttatgagtagttgtggaatatagaagataagaagagacagttatgtaacaaaaattaaaatcccagaaattcctctcaacctttgtcttaaatccctaaatgttgtttttactttaaataccaaaattacagacacgttttggtcctaaactttctccctatcaacaaaccctataatcctttgaaccgaataccaacgaagaaaaaaaaacattctattcatagccattcacaaccaaaacacctaacgttttcttgctaaagaagaaacaaaaaccagaggaagaaaagcaaaaaaagtaagagaagaaaaacacaaaaaaaaataaaacctttctatttctcttcctcctttgagctttgacctctcctccatctcccccacccttttatgcaacaatgggaaattgttgctctcacggacgggactcagccgataacggagacgcattggaaaacggagcttccgcttcaaatgctgccaattcgactggtccaaccgcggaagcttctgtaccacaatcaaaacatgcacctccttctcctcctcctgcaaccaaacaaggccctataggccctgtcttaggtcgacccatggaagatgtaaaagcttcatattctttagggaaagagctcgggcgagccattttggtgtcacacacctctgcacacagaagcaacaggtcatcaatttgcttgcagacgattgcaaaag

SEQ ID NO: 20773 - DNA, 836 bp, Arabidopsis thaliana landsberg
tgcatttgagacaaacgatcatcgatccccctttgattagccctctaaacccaaggagagtattactttatcacggccaagcaactcatcaaaggttgctttgattataccataagaaagagatgaataagacttaaatagagtttagagattacttctttgaatgtaaaatataaaaggtaagacttcaccttagtagattttagacaaaacaagagaaaaatagagatttggtgtctttcaaggcttggagaggtgtggcggcagctgggaggctcacggcagcagctaggttcgcttgtgatgaagacaagaagaaagcacaccaaggagtcaatttaggggtaaaaacgtcaatttcgttgattgggtaagtgattggccgagttctggacttgtggcaaggtcaagtgacatgtgggaagtgtgagggactgcccgggtacgggccttcataaccgagctgaccttgaggctccagaacagttgcttcgcactacagccagtctcggatatgtcttcattcttcggatcgtattattccgaacatctttatggatttattcgattccaagtagaagtaaatcttgactctactaaattttcataaacaccgatatgtaaatttgatgcacgtggaggtctccaacaaatgacaaaattatgaagtacataaattgtcttgaaacaagaattgttcgtcttttcgtcttttttgctctaaaactcttaaaactttcttgactcccaaaatacttgtttatcatctccttagctctaaaatggcaccaaattctccctaaaatatataaaaaaaaacaataggtaaaactagg

SEQ ID NO: 20774 - DNA, 1786 bp, Arabidopsis thaliana landsberg
gagctaataaaaagaaggtttaaacttaaaaaacaactggattctctttaacacaaaaaacttgagatgcattttgttgacgctaatgtttgataacattgctccttaggcgtgctatactaggggtgtgacccaaagcacaattagccttacctaaatgaattattgtgttgcttaggcatgttaaactgagagtatgagtgtaaacaaatatcagcaagttcgtcccaaaaatgataaattaagcgatgaggtaaagagattcctctaatttaaaaaccacgtagcgctaaacaattaatctaagttttgaattatgatgcagatattgctggtcgagaattttacaactaggcaaccaaagttaagaaatagattgagatttttgattaggttgaggcacaatagggtgtggttatggtacattgttttgtataaggatcatgtatgcgtgggtggtatgggactatgagagaataatacgcgaacatgatcaataaatattgacaaggtggttgaagaaaaaaaaagatgaaactcgggttcatatagaaaaaaatccaaagctgtgaatgatgcatgcaaaattcagattaacccatttatttcttatgtataaaatgattagtgcgtgagataaaaaaatactcatgatagatagactagataaaaaatactcatgatagatagactaagatttttattaggattttgtaaaaaaaaaccttcaaacttgttcatttttgcaattttatttccatttccaacaaatgtaaattaatcctatgaagtataaaataatacgcattataacatttttgcctatttttgctactatcaattttataaaatattgatatatagttttttaaaccgaactcgaaaaaaagagtttaaccttaccttcaaaattttaaaaatataatctaatgtgtgtgaccttataaacgtttataatatacgtataaggatcatattgcgtttcattttagacttcaaatgatgaacctgcatttgttggagatgaaggataaaattccaaaaatagattagttaaagaatttttttgcacaaagcctatttttttctttgatgtatgtaagcttatcaactgaggttggtcaaaaatggattgaataagaacatgtcgaccataaaccaaataatttaggttttagatgttttaacactttgctagaagccgagtatatataaaaggatatatgactcaagttttaggaccgaattttgtatagttggtttggatctccataatctcagagcttggtggtcaagattgtgcctcgtaacctcgttatccaaaaatgaagtagaatgtgagtcgaatatcgtgaattcggtaccctctcgttagctcatagtgcgttgaaccctttatctcgaatttgtcaaaacaaattgatattttgtcgtgaaaaaaaaaagttcagacgaaaaatagtggtcacaagtcttgttcgaattgatacccgaaaaaacatcttaaccaacttaaagtaaaaatttaaaatcggaaatttaaatattaccctaaagttttaaaaggcggacttttcaacgaaggtttatgctaaggttaaaaaaaatacagaaacgctttctcacatttccatttcaataaatatatatcagtcgccacccaaatttcagaattgcttctcttagtatttgctttcaccaacccactcgacggagctccaacgccttcctcctcattctccactctcacaccaccaacttctgattccagatctcaacgatgcaa

SEQ ID NO: 20775 - DNA, 904 bp, Arabidopsis thaliana landsberg
aatttgtgtataaatatcacatgtacgttttgtaatcaactttaaatgtaaataagtgaaaaagtttaagatatgttaccatagctagtttaggacaattgggatttttgtggcagtcattgagtgaccaagattgttttccttggccgtcaagtgtaccggaaccggagatagaaagattgttgatgtacctaaagttgatccatgtgtcttgcttaatatcactaggatttgcaggagccaataaagttccatcaatgacgaattcaataggatttttgcatggacccacaaactctacaccaccgaggtaaaatgttccttttggtacatagattttactacttccattttttcttttggatgcacgactccatatacttgtgaatacctgattttgtatgtgttaagaatgatatatatatatatgttaaaataaaataaaataaaaacatatatttatctttttggtttgtatatttgtcatatatgtttatagttgtgctaatgtgcatagattttcatctcataactaattagtggtaaaaacaaaattagaaaaattctcgtatacatacattagcgttatcagtttttccgtccgatttagaaccatgacgttggacattaaacatttttggtcggatggtgggacgacttgcaacaaatatgaacaagaaagatacacatagaaccttaaacacaaaagcaatgcttgccatcttattattgagtttaaggtgtatggaaatttttttttgttgtttatcaatacttgttctaagagatgatgagaagtgttggcctacattatcagcttatataccgttagcatttctcaatgaaccggaaaaagaaaaggattatggttactatattaacaactaaaattgtgctgggtttt

SEQ ID NO: 20776 - DNA, 1306 bp, Arabidopsis thaliana landsberg
atttgtgttattatctatatataactagtgtaattataggcaaaatcaaaaagataaagttcagagaatatcataaaatgactactactatgaaaacttttgtcgcatttgttttgactgtcttttttattatgtcttctgctcattgtcgtactacaactggtggtagtccgggtaattggttattgttatatttatattatttaactatggacatgtttttgttttttgttaatgattattgattattgttaataaaacagggtatggaataggggggcgtacaaaaacatgctttacaccagctttatgtatttatcgtggagtccatgggtgcgatagttattgtaaaactaaaaattttgattacggctattgtagacaagaacattgttgttgtgttaattactaagatgaaataatttactaagtttattggtatctgtttaagaaaataaatcgatagttcacattttgtttttaatacttttagacagcggaataaataaactttaccgaatcgaagtaagtttgatttttaagcaataacattttgcaatttaaccataatttataattaaatttaaatgtaacagaaaaaatggaaatgtaaaataaatggaaattcgatccaatacataccattaagaggatgctgacccacaagagtgaagtaagcggatttcggctcaaagtcatgtttattcaataaagtcatatcactgatcgttttgcatagaataggccatgcatgttgtagtcaccaagagtcacggcacgagcattcgcaactattagacgtggaacattgttaccatgtgggccaacgactctgtttaccttgtatgccaccaatgttgtgttgtgggtgtcgtttgccaccaatgttgtgttgatagacaccaacggtgtgttgttcgacaacgagatttccagtttatctgtcttgtggttgctggtcaaccaccaaaattgtctcaaggataacaacccgttgttatcaagttgttgtcctgctttatcgtagacactaccatcatcatccctcaaaaatcctttatcctatatatcaaacaaaaccctatatatcgccacctaaacgatcgatcataactcccccacccttttaattagctctttaaacccaactagaaacctactctagcatggttaaggaactcatccaagtaaggtttaataaactcataagaacatgatgaataagaactgaataggtgatataaccctatatttactgattttagctagctatgttttaggtatatgattttgagtctttatgttt

SEQ ID NO: 20777 - DNA, 1505 bp, Arabidopsis thaliana landsberg
tagtgatctgacctttatcagtggcgacatgaaatcatgcatctttaattatattcaattttcatcaacttagggggttactaccaaaatggacttattaattttcattgttcagttagattctactatatatgggcttttatttctagagtgagcttttggtaaaattatttggtcattttgttgttccttcaaattatgagcatcaatatattattgagagaaataactttcctcagatattcccaaggaaaaaggacattaagatttttttttgtttcttaagattatgcaattttataaataactccaatgtgttatccggatttaggtctactagggcgtaacccgcgggtttttttttggtaatgttattttttgaagttgtatgttgttagtgaatttgtgattgttcatgttatatgtagaagaagaagtttattagaaagtagatggaaatacaatgcatttgttgttttcatatgatttgcaagttgaataaaaaaaataaaatgagtaatggaataactattaaaaatataatcatatgttaacatgtgatagttgggccgggtattggaactataaaccggcccgataaacttttcaagacggagacaatcctggaaaatgcggaggtggctaaaggagactctctctactggcaggtaaacgaaactcgtgggaaatggacaacgagaggattcgagagctatagagacttcagatcaagcagattcgtgagcttggtttcgaggaattacaagtcgaagaagtcgatgaccttcacgattccgattccgatgataataatgatgatctctcttcatttcctttctcttcccacgctcaagcttcgtgagccaatctctcctcttaacacttgccttttggtttccctctacgatcctttgttacttattcgttctacactctcttcgtgcctatttctagtgactacgcgtggctcaatgtgttgctagaatcagtttcaagtgtttaaaccagtttgattttcgagttcttgcttagttagggtttcgtgatgtttgatagttgtaaatctgtaatcctttagataacggatccaacaaatcagtaatctctgaattggcatttggtggtgcttgacagtggtaacctcggtgatgatgaacttatgttcaacccagctttggcttctttacatatgtatcttggcggtacggatcgattctcccgtcttgtttctttccgaggtagtttcttatgtgtttaccacatttgagcttatatggttttgtaatgtttaacagaggttgaagacactcaaaacagagtttcttttgtggatggaggaacggtattgagattccgctttctattctgagggtattataatatatggtgtggtgacttctgaactttagtttagaatctaatagcttgtcactgacatgggatgtaacttgaattcaagagccacctgatctttcttcgatttgcagagtactgttctttaacca

SEQ ID NO: 20778 - DNA, 704 bp, Arabidopsis thaliana landsberg
taacctctcttctctgtttttagcacacgcttgtaaagacaaaaaaattacaaacactcaccttctaagattttgttagactttgaaggctatacacgtataacaatatgctagagtgtttaagcgactcaatgcataatccaaaaatatttatactattctccagaatcctaatctctaggtcctccgaaaatcaatgagcggaatcttttttggtcttcaagcctattctttcctttgtttgggatcttccttgacatttaagtatatctcttttcttatctggtagcttccttgatattcaagtctatctttttccttatttgttgagaataacttattcagcttcctgatatccaatagctccttgcattagttcgttgttgtgagaatatgcatcttcacaaattgaaacatacatcaaatatagctaaaaatagtttatccgtctattttaggtattgttttgaactgcttctatatgtgactctcataacttcttgtttatgggcttcacaattgaagtccggtaatcatttcactaatttataaaacttgtaggtatgccaactaaaaccactctgataatctttcatattttacctattttatgaggagtacgttataatatatattacctattttagaactacgtacttttggttccccataatatttttgagaagtaacttttgaaaaaaagc

SEQ ID NO: 20779 - DNA, 2475 bp, Arabidopsis thaliana landsberg
ctgtctactttttgtggccatgagaccgtcaaagctcgactgtagaataaagtcctggattatataggagtgtcaaatctaattgaggtaggtggttctacaatatattctatgtctttgtagtttttcctatttgatgattactcttagcacagttttctaaatgttaatgttcattaaaaaatctgctcaggttaatgaggatgacgttgacccaaagcagcaaactttctttttttcgtaagttatctggcctatatgttgccttttattatctttccagcatctgtgtgagaccataaaaattcttcaatatgtgacagttccaaaaaattcagacggaggaggcaaaagagtcaggtacggagctcaaggcaagggcctcatcttggattaggttgcgaggtgctagataagactgatggtatgtgtttgactgaaatgacagttcattggatttgtagtattggcttcttttgtgatgagagcctgtcttagttgtatattttacgagtattttactttgttatgtgcaattttgcatgcaacaacgttggatcatttggcacagctttttattcttactttcagatgctcattctgttagaagtgagaagagccgaataccacctggaaagcattacgaaagaattgggggtgctgagtctggtcaaagagttcctcctggcacgagtcctgcagacgtgcaatcatgtggggatccagattatgtgcagtcgatagctggaagtacaatgttgcagtttgcaaaaacgaggaaaatatctatagaacggtcggacttgaggaagtatgtttgacttccttttgtcgatctatcctcttcttcaatttatatttaactacatatggttcatgcatgaaaaattgtgtcctagttttataacaagtagcttgttaatcccaaatgatgtgagtgagttttttcaaaatttttcctcctccagccgaagcctccttcagaagagacagttcttccactctcatcgagctcaggtgatcttttttctttagctctcttgcttttgaagattgcaattgattttgactttgctatgtgtactatcgcagcccatggctctagaacaagtactttcggaccgggatagtgaagatgaagttgatgatgatgtggcagattttgaagatagaagggtatgtttttgaatttaatattttcaccgcatcagtagttgggtagaataaagctcagtagttgggtagatatatgtttcatgtgaaagggaaaggaatattgaagactgggcatgggcaaacgttaggagcaatattgtaatggttcagagatcaatagaaaatatgtgagcaagcctcacggtttgatatggagcagtagaaccagatcattagtgcttatataacactcattaaaagacgaagtgtgtccgtttgtactcgattctaacatagttgattctagcatagtttgtctgattctccatatagtgaataacgttatttcctattactattctttcagatgctcgatgatttcgttgatgtgactaaagatgagaaacagatgatgcacatgtggaactcgtttgtgaggaagcagcggtatgtcttatctcttttcagtacatgtcacgtggagttttccagtataaacatttagagtcgcgcatgtaaaggttgtggataattcctgcatgagttcttctggttaaaaaaaaaaaactgaacaattagataacatacgcatccatgttctctgactcattataagcattaccttgacagtggttttggaccctttgcagagtattagcagatggtcacattccatgggcatgcgaggcattctcaagattgcacggacccatcatggttcgaacaccgcacttgatttggtaattcaactctcatttcttccattgttttttccagtgtatcggagaagaaagcggttttgttgataaaagtgagctttttttgtgtaggtgctggagagtgtttatggtgaaactgtggaaccacggtcttcttgatgcccgaaccatgaacaactgtaatacctttctcgaacagctccaaatttgaaaacccaagaaatcattaatttaagtagaaaaacaaagaaagacaagagaagaagagttttggggtctcatttaactacttttggtgttttaagagaaagaggagcatatttatgcatgaatttgtcctcatcttttttttttttttttttattataaatgtgtacattggcttatctttgacgcttgttcttcgagtaatgctttatacatgttccttactcattaaggatatcataatggttgaaaacttgaaatactaattgactttgtacactggaaaccagacatggatgttactttggaaacatgcatcaacatatgtccatgaaaaaatattagttttggtagaagaaacaagcttacctttttagattgcaaaatcaaaaac

SEQ ID NO: 20780 - DNA, 2084 bp, Arabidopsis thaliana landsberg
  unsure (1)..(2084): unsure at all n locations
taggaaccgcaatccaattattttaatcaaatcattgactaccgaaatatttttccaccttcaaacaatctaaaaagaaaagtaatttttttgatcaattcaccaaagttatttagtttataaaacatgataaaagatcctccaaaaatataaaacctagactttccttaaattttaagaagtgtacttttgttcactcaatttattatttctctgccaaattctctatattcttcacacgtaattactatctagttctcgtccatttcctttatcattttctcattgtcttgtaaattgaccactctaatgatctctattatttcctctagaatagagtatgatttatctccaatctatcactctatatatagagtaatcctacaattttctctattttaaagtaacatatagaatgaggatggagagaatgtactatatcatagagttttagaggaaaaaattaaagtgggattggagatgctaagtatggaaatttggttcggttagctatcataagggaccgagtgctatatgacaatgtattataggtaaaaatagtgatattgtctcctgtagatttagtgtccttaaccgttcatcaaatctatgtgaatctcagtagtaggtagttgggtgaagaacgtgtgaagtctatacaactcatattactcctcaaacattttctgataatatattgcatacattgaacctctttttaaattcaaaacatcaaaaggtattgatcttacatagaaaaaaacatagactcttatgctcatgtccctattgatcttagtcatacctcataattgtctaacaaagaaaatcaaaggtatcataattatcatcatatgtaatgtagggaacaaatctgtatttactggtatatatatataacacaaaaaaaattaccaaagaaaaaaaaagagctaagggaacgataccattagtcccaataccaatccttgcaaaattcaaactcaaacaaaccgtttatctcacgcgccgccgtactcgccacgatccgtctttggagaccaatttatggagccgccgaagggagataccgtagtgaagactgaggttacggtgaaggatccatcgctaagcgtcgtcgattcgaaaacgaagggagtcgaggatgcgaacactgagatagccttgtccgatgaggttgaaatcgagacgaagggaagcgattcgacaccggtgaaagctccgagtcgaacatcgtctggatcgaagaaatctgtacattggagccccgaattggtgtctggatctcaggaaccggatcagaaagctgcatcgtcttcttcggctggatctaatccgtatattgctcgttctccagctgagacttcagatgcttcgttgaaaggtaagagtgttgtgatcgtagcggtgagaattgagattgtgtattgtagccttatttacctttttgtggatctctctctgtgtgtctgtgaattggattcagatacgatggagactgtgaaaggagtgcttggtagatggggaaagagggttgcagaagcagcaaagaagacggagagccttgccgggaacacatggcaacaccgtaagttttcgtttttttttaatatcaatttgtaatcaaattcaatgcttagagttctgtggaatcaagaattgttcatagggtattgttaaaagtagcttgttctactcaaagtctacatttttttagagaaacataaaagattttttttgctgtattatggttttcttcctttgttgtatgttggtgtttaggttagtactggttttaggattgagtaactatcatcatattcgatagtgctcaagtgtatttttatgatcttcaattctttgatctcttttcaacatgttgttgctataaaatgggacgttcttactggcttgtgttgataaattttcttaattacaaacagaacactcccctgaatttcagtctttaggcagtacattaaaagacaatgacctttgatcttgttgagttcttgctaagaatagtaaacggactattttagttatggaatcatattgtgttggaagaaatatctncgtttttc

SEQ ID NO: 20781 - DNA, 422 bp, Arabidopsis thaliana landsberg
ttttatgtctaccagattcttcattcacattttcaacttatgaaagcctattttctaatacagattcatgaattagttagaaagcacaaacgcacaatgattgtttcttatatatttatatttatttaataatattttagctattatttcataatttaatgtattaattattttaacacgtcaaaacatgaattaattatgtaaaatgtaaatgacagcttcgtaggcgatgtccgagaaacaaaggtgggatgatatggttcgatcagtgttttgttgagattacttcaatcagtgtcatcgacttcaacatctcgaagatcaattacgagaacaatttccccttacacaacccgaacagggtaagtggcgatataaagtcattcaacaatgagacaatggctctccctaaagagttggcg

SEQ ID NO: 20782 - DNA, 3394 bp, Arabidopsis thaliana landsberg
  unsure (1)..(3394): unsure at all n locations
acaaaaacatagcacttatagaagcacaaatttaaaagtcataaaaagcataacatttcaatatccataataacacgtacatccaaaagtttaaagtcaacaaaaagcataacatttcaatatccataaaaacaggtacatccaaactttaaagtcaacaaaacatgaaaacaccagtaatgtctcgattaacgtttttaaagaaggtaaacaaaagaactttagattcatctgcaaatccagtcaagcttttgtagcttcaacactcttaatgaactcagcgtatgcatccagtgcgtatcctttccttaactcattgaccacctcctccgtaatctcacccatatcatctatgtcaagcccaaacgagtgcatctcaaggtattttgttgcaaggggtccactatcacctcctctctggttctggtatactcttataaccctctccaatgttagtgggtttgttgagaagttctttgtatacttcctacctacagcctctttaaccaaccatggaatcaaacctaacacaggcgccatcaaaccttgtactaaaacaaacgatgttgcttcaattaaagggtcaaagacctgaactgtatgcaacctcaagttaattaccagacctacccaatgtcaggtgtaccatttcatagggatgtacaccaggtgagcatgttgcagaanagttgttggtgcccgtccttttgccctgtctacaacaaacgctctgatgttcactccccaattgaacttactcttattcttgcaggctttgaaatctgtgtacttctcatttagaagggtcagaaaccatgtatcaacgaaaacagctcttaccgtgttgtacaaaccatgccttctgcgccacagcatagccattattacctacacatgttgtttaccaattgcaccatgtgagatactatcatgtatggtgttcatactaagtattcaagaggtttgtacaccaattactaaaataagtaatatagtacaccaaacaataactctacaccacaaaccaaaaaatacagttttttacctggaaataattgtcttttgcagtatcttggttaggtggcagatcaacattatcaactctctcaatgatgtcttccacacctttgtaagcctcgtcccatctgtttctctcatagagagcaaagtcctctccttcctcttcagtccttttcctcttcttcttgcccctcgacgttgtacccgtctctaaactaatgacctcatcattagacttgtcgtcttcctgattctgctccattgtggtgttagcttttccatcttcattcggttccattgtggggttgtcttccccgtcttcctgctacttttccattgtgctatcttttgtagatcgcagtccaccacagtcacatttgatcagaccctcgaataactgaactatctctctcttcaacgtgcttgatgtttctttgtgttgctctacaatgaatttcttcaacatctctatagtgtctccgtcatctttaattacagcaacatcttcttggttcttctccgcatgtcctcctcgcctagctggctctttcttgactccccctctcctagttggttctttttttactccacctcgccttgtaggcgctttcttaacacaccatggggtaagaggcatcagtccactagtctatgtgtctccacctggccattctgactcagtaaactcatgtccttcaattagcagtttctccatataatccaccttctcatctacaacatcgtcatcccacccaaaatccatgcattccacgccctcatcaccctcaagcgtgtaagcaaccttcaactgaaaaatacaggtcttaaaacaatgtacaaaattgtaataaattggtgtacaacattaaagttttcactaacaaagttgtacaccatatgtttaagactattgtacatgttcatcggattcaacctggatgatgtctttttgatgtaggatcagtttttgtgcccagatcgtcatatgtcatctgagtataatcacgcttgtcatctggatccggtagcttagagacaataagtgggattgcctcaaacgccagcatttggagtgccaatggaaatccataacaacaactacttcgttgtcttatacgggctttaagctctgtgatgggatcagtgtcgctaagtgtaggaggtccaaacctctccatcgttgtcttgaaggctactctcccccacgggtatgataagaagaacctaacatcatcaagcatcttaacatattctggggttatgttgaggtacttgttactacagactatcacaccatccactagcaaaatcagaactagacaaaagcgcttccagcaagacatcttctgatgatccggcatcttgacatctttccttagcatatccagaacatcggtaaccgtgacatcttctttagaaccaaacaaagagttccaaacaggcttcgtatcatttttctgatgggataagatttcctcttttcttggaataggtcgacattccaacccagttgtaatgtggaattctctcaaagaaaatctaagaggcttacctccaaaaacgaaccagaattcgtgtctcttcttcgtcactagctgtctagacaacaaaccatggatcagtttggcggagtgagctgtttggcaaaccggatacttgaacaatttcccaaattgagattttaacagacgctcaaaatctgatgaaccgccaaggaactcagcaatttcttctaagagctcaggtgaagaataaatgttcagccttgcgtccttgggaaaaaaacctcttgcaaggactctctctggaagcccatggtccacgccgtcctcactttccgaatccttcgaagtcgttgacagatctggccatgttaagaaaaggcatgttgaaagcacttgtcggagatgcagcatgaaaggacactagtactagacgtgtcgtataccaaaaaatttagccgatatgtaccaatcttcgtaaaaggcgaaagaaagggatgttgaaactaatctcttctgtgatgagccgggaccttcttttaaatgccaagatgatgataatcatcttgatatggcagattttctctattgatcatgacaacgagaaatcaatgtaatatattatagctatatgtatgatcatgctatgtatgacaaacattgcagatgcttttgttttctgggataatgtttttattgtaatatattatgacatatgaatagtctattgcaaacttttaatgaatagatattttgtttccagaaaaatgtcaaatatgagattgaggatgaagatatctttctggcgaacaatgcttctatgcacacaatctttaaagataaaacgtacttctcctctcccgaaataaaag

SEQ ID NO: 20783 - DNA, 483 bp, Arabidopsis thaliana landsberg
ttttcagttcttggaagtgtggcatgtttgcagttcttgtatgagtagaactatgctcagttgttattatagtcagtgtttatattagttcatatccgtccatctttcaagcatctgatctgtattactcaaaatcgatctgaatattctctgttgtatagagatctttacctactgatgttgtcagtgctacttgataggggtttaatgattttaaactcattagtttctctcaatttgctctgaaggaggttgatccatgtgaagacttaacagctgatgatattcggactgcaatacaaaatgcaactggtcccagatctgcattatttgttccagatgtaggtttatctatatccctaagcatgtgggagcttttttttgcttatctgttctttccacatacttattttgcttgagttttataccttttacagcaactctgattagtatctcttgctttcattctcatctgcataggtt

SEQ ID NO: 20784 - DNA, 468 bp, Arabidopsis thaliana landsberg
tttgttcaccacaataataatactgaattatttgcgtcctttcacgtcactcctttttctgttaacgtttatatgctcagatggatttattattgctagtggtgttttttaattttaaaatattaattgcctagaaaatattacagagaggaactcgtaggacaaataaaacttttacgctcgtttcgagagaccaaacatttggtaagaattgaattttgttagtccgtggaactggaacctcaatgtaaatgctcatgcagttgattgttacatccctaattaaccagatatgagtgtttgtagctgtcaatgaaatctacatgacatgcatgatgagagagaccagattgtttcggtcccaaagatctttacaaacgaatgttggggatcgcgattttgcaatgtggaaaaaaaaagtgtagacataataactatttgactaacaattgggaaaataattgagtt

SEQ ID NO: 20785 - DNA, 1398 bp, Arabidopsis thaliana landsberg
atttgattctgtattcatatgacttgcagggtgaaatcaattctctttaatgcaataagtgagcactttcttccacgttggctcgacttcattgtgtggggccatgagcatgaatgcctaatcgacccccaggtccatgaaaaatttgatttttggagttattgcatttaaataagagtgagccacaatgttacttgcctctttgagctaaaagctattaaacttttgaaggaggtatctggaatgggcttccacatcacacaaccaggatcttctgtggcaacatcacttattgatggggaatcgaagccaaaacatgttcttctcttagaaatcaaggttcttcagcaaacaatctgaaatttcatcttcactttattcgtacttcattttctggtcttttttcctccttttcaatcaagcatgtaagcttgagtgacttaaaatatatgacttacagggaaatcaatatcgtcctacgaagatacctttgacatctgtgaggccttttgagtatacagaggtaaagtttacttttccttaatatgttatggtggtggcagacttctttgcttacatattttcaaagtgcagattgttttaaaggatgaaagtgatattgatcccaatgatcaaaactcaattctggaacacttggataaagtgggacctattccctcttctcatagttcatgtggatatttttttctcctgccgcctttttatttaggtttaacaagtcattgaatgcctctactaatatctacgaaattgttaggtcacaagtctaatagagaaagccagtaaaaatactgttaacagataagagatcaagctcccattggttcgaatgaaggtaatttttttccaagttcacttcacactgctgcaaattctagcagcactcatataatcaaacctttaattattttctaattcacaactagaggatagtctctcagcttggtgatgaattgcttgactccctaatagtaaagcatatttttcacgaaccttatactaatcatcttaatcaggaacaataacaactgcacaaaggcaaatagaagcaaaatgtaacgaaacaacattttaagtcaatcgcttgtgcttttcacactccatcatcagtgagtcaactcaaggctttgatgattcataattatattgtgaacgcataactcattctcaattcgaaattacttgaggtggaatgtggaaaggggccgagagtttagtaaatatggtcttttagagaaaaatcctaaatttggtaattctctccacctaaaaccctctgttattaatggaagaattggtttttcatttttggtctcaccacgttttttggtcggacccaaattttcatttttcttaatataaattattccgaattat

SEQ ID NO: 20786 - DNA, 497 bp, Arabidopsis thaliana landsberg
ttctatcacgcgagtgagttaatctgttgttgaacctgttgtctagggatagctttattgcacttgttaaccatctgaataggctaggataccactccatttgattactccatccttatggatttctcgtctatttgatttgtcggttgcattgctatcgttttaatcgttcttattgcatgtggctcacttttcgcatttcttacctgttatcaccaacttactcgaccacacctagtgtttggtgacagactgtgcaatcaagtacagttgctttattttctgtctgatactcgacctgtttctcgaccacatcctgctcctggcatcagtcagttgtggtcgagtgatttttgtaaatctgttagaatttatgttttctgggactgttagaaacctcaaaattgttattgcttggcttgactgagtgacttctgatcacatctcatctatttgcatcacacctgaatcgatcgacacctaaaatactacaacaa

SEQ ID NO: 20787 - DNA, 1076 bp, Arabidopsis thaliana landsberg
  unsure (1)..(1076): unsure at all n locations
ggttatacntaagtattatctctgtacaggctttcagattatggagaatggaaaatattacatacgttagctcaagacaaaaatggtttgttatcggaaaagagcgtcagggccatctacgatggtagccttttccaccaactggagaaaaaaagatcatcttcttcttctcgtggcaagaaacaaaaactaccttaaatgtttacgtgaatcttcttatattattatgtggagatcacataactttcgtggtttataattatataattttgtcaaataacttttgtaatgaataattacatagatcaaacactctttaaataattattgtgtatattgaaaaaaaaaaaacttatcaaagtatacttcatttaagttataagtacccggttgaataagccggtttatcatctaactatgatctaaatactaattttcataaataagagcaagaaaatgttatcattaacgtagacctagattcaatggaggatttaagtaaatagtaccgtgtaagtcaagaaagggatgataatgaattaaaagggaaaaagaaatcagtaagagtctcacactttgtggtcatgttgtgataatgaggaatgcgtctacgcatgtcaatacatgcccaagacacataaatacactcacacaaacatctatccactttattttggatcaaatcttttgtttatgtataagtctgtataactaacacaacacctaacaaaagaaaaaaaggtaaacaagaaaataattaacggcttcttcgatactttatttgtttatataaaccccaaaagaatgatcctaaagtaataagaaagcttgtgctaacttcattgttctgtgttttctctccatctctgatatctttctcatgactctgtttctcccaagttcaaaggtaatgtcccatgacacgttttagcatgcgcaaatggataaattaattaaaaaatatgcataagatttttacataggttcaaatggtgcttatatattgtttcttcttaattttttcagagtgtcagttaacactcggctgttattacgacaaaaaaagagtgagatcg

SEQ ID NO: 20788 - DNA, 491 bp, Arabidopsis thaliana landsberg
ccacccttagttttgggctttaggtcggcacaataatctgaatgcagagaaaactataactccactcctcatttcaaatacatttataaaaaaaaaactaggaaacaaaaatttgaagtcttcacgttttcttacaaaaaccatctgtatatcacaaaattttgacttaaaatataagctccataagaaatatctcttcgtgactatataagcgatgaacaatcaaatccgataatcgccaaacctgaaactaagaattaagacaataaaaacctaagagtttatatccacttcaccaataaaatacataaaccaaatcatcaaaaggtttaacgcaagaatatggatcatctaaacgaatacaagaactccaaacttcatgacctcaaataatacagtataattggaattccagaattatgctttggattaccattagctagtatatacttaaatatcaacaggaatttgaaacatctaaactccatgac

SEQ ID NO: 20789 - DNA, 551 bp, Arabidopsis thaliana landsberg
tcttcttgttagagttctttttctggcaagcatgaatatttcacagaaagacaatcctcgaacatacatatttttacaaacaaagaaaaataaatcaaagtgatcttagtgaaaatttacaaacgaatagtgattaaaaatacctctcaaatggtttaaatagtcacaatttcttaaaacatatgcatgtgcgctttggtagtctttctctgaaagccattctacatgcatttcaccacttggacggccgacgtgcataaatatgttaggtactccagggacatgatatataggaacttcaccttcatcgaatcttgttaacctgattcatgtaattgaatgaagatcgaagtatagaaaatagttaaataaataaatgtatttaccttgatttggtttgtatatgatcggtaaagtagtgctctgaaaagtaagcaatctcgtcattgatatatgactcaaaaattgagcctacagtatatctttttgttctttgcttttcaactttttgaaaaacctctcaatgggtacattcacctatattggatagg

SEQ ID NO: 20790 - DNA, 1108 bp, Arabidopsis thaliana landsberg
ccgataagtatgatgttgctccatgggctatagaagctgtcttggagtatgtaaagcagagctatggcaatcctcctgtctacattcttgagaatggtctctctctctctctctctcattctctctacctctctctcgttttagtcggttaaatctcttgttaaatgtcaactaataggtcgaccgataaatcgagattcgcagttgaaagaaaaggacacaccaaggattgagttcttacaagcttacattggtggtgtgctgaaatccattaggtgagtaaagtttcttattgcatattttcgtcacttctcttgtcagtgtaataaagaaaaaaaaacattactacatgtaggaatggatcagatacgagaggttacttcgtatggtcatttatggatttatacgagatagtaaagggatacgagtttagttttggattatactctgcgaatttcagtgattttcatcgtaagagaactcccaaactctctgctcattgttactctgcttttctcagtggcaacatcacttttcttggttctcaaggcatcacgcaattgcagaggaacttctcttcttcatcttcttcgtagtaatcttttgaatttagtttattctcatgaatctgattccttcagatttagcgaaaaccatgtgaattgtgccgaacgaaatctcatcttttagggagaaccctcagacctctctgttttactgtgtttgaattgcttgccgttttaaagtctatcatcctaattttgtttttccttaaaacggtatgctttccttgatcccacgtaatagtgggatttcttttttcttttttcacactgtgaccctaatgtattacataattttcaacacaccactcgctcatataaaattatttgtaattctgtttaatttaggtttggtatgattccatttttggcttgataccggttcggtttttgcttaaaagaaaactaaaaaaaaaaaaaaagcaaacataagaaatggagtgtttgaagtaaaagaaacaaaaaatagtaatggattggtacacgtacataaaacaccccatcagataaacattatactaattaatgtaatgtaaaacaattaa

SEQ ID NO: 20791 - DNA, 587 bp, Arabidopsis thaliana landsberg
aacgttatattgtgtatttattttttacattgtgattgatatattattagaagataaagggtagaatggaaaaatatgacgatttgaaagctttttttttttccggaaaatccttatattagatgaaaaaaatccaactggccagtaacatcgacgagcaaggatcttaagaattgaatatattgacacaaaccgctgactctctatattgatcgagaacgttgatcctagaaagagcgttccatggtctttaacaacaacaaaaaaggttgttgcatggaagatttttcaccgttgtttgtcttgaagtgaaattttaatgtctagctccaccactattttgcgtcaattttcttctaagaataaaacaaaaaggaaaaggagaagcaattgcattgaagtggggaacaaaattaaagtctcaacatcaaagttgatgacttcatacatataatgtcacacctaagagactaatttgacactggtagcaaaaataaaaatcaaaccttcatcatgggtcaactcttaattaaaaatctaatttattaagttctctcctatctaggtatttatttgtagtgttgttg

SEQ ID NO: 20792 - DNA, 979 bp, Arabidopsis thaliana landsberg
ctaacgccacaattatggattgaaatgtgggtaatgccatgtaaggatcatcaaaaatagaaacacatggtgagacaaatgtatggctaataaaagacatcttgaactgatgatcagtaacccggaaatgtcccctgacttgacccaaagagaagttctcaataactctccactggtcaagcgcaatgtgcctgtcatacatattcaccaaactctttttaacacttgcatggatcttggatccctgtcacagaagattatagtttatcatcaagaagtatatatatgaaattaagaaaaactttgatcatattgcataacatgaacgtaccctctgatcagctagtaccatttcgagtgtttctcctgactgggctgtgtattgtttccaggtgtggaggattttcacttgcacacgccagctagtcttgaagggtttaacatcagcaaggtaagttgtagccatgcccccattcattttgtttagaacttgctagtgaactttatgctattaaaatggagtaggctgatgtgttcagggttgtaaatgatgtgtgtatttatagtttccaagcataaactgtttaggttagcataatagtataatcctgtttcaagaatcgaatagaatttaagaatattctggaacaaaatctgcattagttgaagatatggaatcgaaactgttataagatataatggattaagctcgtttattaggccagatacatcaagttgagttgtgatattgaagatagacatatgatttggatgtttatgagatttcgagaaatcgtaactgaaattagatataacgaatttttatggttttttaatagaagtacaaagaaagctgatatgcgatattgaagaaagatttgatttggttgtttattcgattttacttgcatatctaatgaaactgtttttccctcaaccgaaatgttcaaatgttcattgtgcttctgatattagcaaa

SEQ ID NO: 20793 - DNA, 1612 bp, Arabidopsis thaliana landsberg
tttcgattttattaacatgaccgatgaattccttggaggtcttagagaatattgtgaatggtatggtccaaatataacgaccacaggcgagacttggtgatgacgattggcatgacaaagggtcgtatttgtggggggacagatatcccccgggtccactagaaggataaaagacctcacgaaagatccaaaggccccataattcgtaaggtcatccccctcgtgggcctgggaggaacgaacagtgagacagatcagcgcaaggccgggtcggagcaagcccagacggcccaacagcgtccgagcagtaatcatatcagtaacccgtcctttccgcacaggagccccgcgcatcggaactgggcgaggatgagtcggctgaattatagggagacagacccagttagttcactattatcctggcttacgttgttatcatatccacatataatgccccacggtcgaatatataaggcctagggggcaccccttcaaaaggatcgaccccattactactctaccgtccacctcaactctctacgctttggagagctaccttgtaacctcgtacacaaagcatactcaccaggacgtagggtattacgcatctcaaagcggcccgaacctgtaaacattgtccatcgtccctcgtgcatctggcacgaaccattttgctacagtcggcgacaccgtcctactcctaaaacacctcgaggggccaccccgggtgtgcggtcggacccaaaacataatattagagtcaaccttagcaattaatttagcattttcatttctaaggttggcaataatatcattacaagtgcttagctcacaagataatttttcacatttttcaacttctagagcataagcattcttaaccttaacatgctttttgtattctttaataaggaagtcctcttgagagtccaaaagatcatccttctcatgaatagcactaatcaattcatttaatttttccttttgttccatgttaaggttggcaaaaagggtacacaagttatcctcctcatcactagcattttcatcactagaagactcatatctagtggaggatttagatttaaccttcttctttttgacgtcctttgccatgaggcacttgtggccgacgttggggaagaggagtaccttggtgacggtgatgttggcggcgtcctcgtcggaggaggactcggtggagctctcgtcggagtcccactcgcggcacacgtgggcatcgcctcccctcttcttgtggtacctcttcttttctctcctcttgcccttcttgtcgttatccctgtcactgtcacttgatagtggacatttagcaataaagtgaccgggcttaccacacttgtagcaaaccttcttggaacgggatttgtagtccttccccttccgttgcttgaggatttggcgaaagcttttgatgattaaagccatctcctcattgtcgagcttggaggtgtcaattggttgtctactcggtgttgactcctccttcttctcctccgtcgccttaaatgccacgggttgtgcctcggacgtggagggctcatcaagctcgttgatcttctttgagcctttaatcatacattcaaagctc

SEQ ID NO: 20794 - DNA, 2399 bp, Arabidopsis thaliana landsberg
tttatgaaacacagatttctcagcgtaaataatttaagagatgaatatatgttatgtttttgcacccaaaagaaaagttagttttgttaaattatagtgtatgtatgcatgtataattcagagatatatatgagaaaaattgaagataaaatccatcgagacatgagatgtgtaaacagttgcaacaagcaggaactatataagagccaactataattacacattacatgatatgggttacatgtatacactatataatttaacaaaaccaaataagcctatacacccgaaactctaattcaactaaggttcttcttatacattacatgatactataatttaacaaaactaaacaaacctatgcacccaaaactctaatttaacgaaggctcttcagttttaaatataagctcaacacacacaagtgacacaacttacaacaagcaaccaatgaatgagacagaaactacctgaagatatgtctcgagaaagtttagctcttgctgcgctaccaaaacagcatatgtatcaaagaatcatatctcgtgatctccccaaaagtttctatggggtataatatctcataaaccttctggttacccctgctctcatacattaagatatcaatgttagaatatagcgtttgatcgtaatatattttcaataaaacggaactagaggcttcacctatggaggcaatctaataaaattagattcatctacggattagcggagatgttgatcctgagcctgaggatggtaagggtcttctcacaaatggatggttcagcagttcagctgcagttggccgctcttccgggttcactttaagacacttaagtatgaaaagccgagcatctagtgataacgtatcaggtacttccggaagagtaccccttccgatcctaaacagggcttgaacctgcgcgtttgcacaaattctgacttttaactcataaaatcccataaagtagacacttcaaatgtcgtttaagattattaagacagttcaaaagtttgaaaatcttgaagacttacgggttcgagatcggagtaggggatctgaccagtacacatttccagcacagtgcacccgaggctccatatatcagctggacttccatagccatcactatcctttcggttaataacctgatcaaatgattatgttctatttagatataaccatacaagtatagcctcaagtacaatgaaagtgaaatgaatccacatctgttacgtacgattaacatacatacttacaattatcaaaaaccattaactgatataaagaaaatttcaccaaatatttgaagcaaacataaccaggagtttttgaggttataaagcccagaccagaacatttttattaatgtaaatcactgggaaagtttcccaaaaccatacctctggagccatccaaaatggagttcccttgcaggacttaatgtcgttaaactttgaaacctaaataaaaaaaaatgacaaacatatcagggtactaaacgatggaccaagtaattactttagagcaaagctataaatatctatttatggaaaaaaacctttgccaatccaaaatctgcaagtttgacggcgccattagcgtccaccaatatatttgcacatttgatgtccctttgttgcataaaatgataaaaataagtaacccatgagatgcaggaaattagatagatgcttgggaattacagctgtaccaagagagtttactagtctaacctgtgaataaaacctttatcgtggagatatttcaaaccgtcaagaatctgtctagtgtacaaggagactacagagtcccgaagctggtatctttggtagagttttagaagggacccttgggttacaagctcaagaaaaatgtacaagtttgacccatcctgaaaacagcgaaatgagttattattgcacaatgaaatagttaggcaactgcaactaagaaaaagaaagagagaacaggaccacaccttggctgtgccacgatatctcacaatattctgatgctgaagctgactaagtagtgcaatctcctgtagaaaatgaaaaatatggcaaaggtaaggtggattagcaacctacttttgactgctccatgagataatgacagaagtgataaatgatacggatcattgacccatgtatatgaaacttccatttccatacccgctcaagttgttgtatgcattcttgtgcctgacttccctgatcaagaagtgaaacttccttgacagcaaagaagtccccatctctacatataacataaacatccattagccgaacgcataatggaagactcgtttggaccacatttgtcagccgcctactgtagtattcctcattgagtgtctacttttttaaaacatcatgcgtctaagtatcaa

SEQ ID NO: 20795 - DNA, 727 bp, Arabidopsis thaliana landsberg
gcaaattaaaagttattgagaaggaacctcctacaatggttcattccttagcttgtttatgaattttattttcacaccagactttcacattcagataatattaatctaattatactaaatcaacaatcacttttttaataactgatgcattctccatttgatatgtggcataagttacaaattctatttatctattttttcttctctttcatatctatttatttacgatttttttttaaaaaagttcttttaaaaaatttaaaactatttttcttccctacatctccatgatctctacaatcttcaaataaattattttctttcacacatttgtgacaaaaaaaaaattgttttaaaaaaaaaattaaaattgtatcttcttccccaacagttgatttattttattttgacataataatgatacaactttttttgtgtgtttttaatactaatacatatgtttgatattttaaaaatattttaatatatattgttaattaacatttaacatcatatgtttgatgttatatggtaacggttgattaaaatttaatggaattaaaaaaaaaaaaaacagaattaacatttgttgggagaaaacgttcgtcgaatcctctgacccctttatcgccgacgcttcaaactcggtgacgtatgttcaggtcagttgttgaatctctttctctcgcatcgtttcatcttcggtgatcgactacaatttttacac

SEQ ID NO: 20796 - DNA, 1582 bp, Arabidopsis thaliana landsberg
aatctagttttttggaatacagatgcagatctttgttaagactctcaccggaaagactatcaccctcgaggtggaaagctctgacaccatcgacaacgttaaggccaagatccaggataaggaaggcattcctccggatcagcagaggcttattttcgccggaaaacagctagaggatggccgtacgttggctgattacaatatccagaaggaatccaccctccacttggttctcaggctccgtggtggtatgcagattttcgtcaagaccttaacgggaaagacgattactcttgaggtggagagctctgacaccattgacaacgtcaaggccaagatccaagataaggagggtattcctccggaccagcagaggttgatcttcgccggaaagcagttggaggatggcagaactcttgctgactacaacatccagaaggagtctacccttcatcttgttctcaggcttcgtggtggtatgcagatctttgtcaagacgttgactggaaaaactatcactttggaggtggagagttctgacaccattgataacgtgaaagccaagatccaggacaaagagggtatcccaccggaccagcagagattgatcttcgctggaaagcaacttgaagatggaagaactttggctgactacaacattcagaaggagtccacacttcacttggtcttgcgtctgcgtggaggtatgcagatcttcgtgaagactctcaccggaaagaccatcactttggaggtagagagctctgacaccattgacaacgtgaaggccaagattcaggataaggaaggtatcccgccagaccaacagagactcatgttctctgggaaacagcttgaggatggtcgcgcacttgatgatttcaatatccagaaggagtgtacgcgtcaccttgtgttgcgtcttcgtggtggtatgcaaatctttgtgaaaactttgacaggcaagaccattaccttggaggttgagagctcagacacaattgataatgtcaaagctaagattcaggataaggaagggatcccaccagaccaacagagactcatctttgttggtaaacagctcgaggatggaaggactttggctgattacaacatccagaaagagtctactcttcaccttgtcctcaggctcaagaggtggaaccatgatcaaggtgaagacactcactggaaaagaaatcgagattgatatcgaaccaaccgacactattgatcggatcaaagaacgtgttgaagagaaagaaggcatccctcctgttcaacaaaggtaaaacaacactcacgtttttcttttatgacttgacgagtttgtcttgcatcgtttttgtcttgttgcatctaagctgaagttgtgtgaacctctggttacggttttcaactttggctctggatgacattgtttgcagtatattgcatgtgttagttaccatcgtttgtttgcgtcttcttaagacattatctaactctgtgtttacgctctctggattttcaggaacaactatgccggaaaacagcatgctgatgacaaaacggccaaagattatgcgataagggaggctct

SEQ ID NO: 20797 - DNA, 556 bp, Arabidopsis thaliana landsberg
aaaacaagtctttatcctttccacactccctctgtaacttgtgcgacggcgcgtcccggtgcgtttcagaagagaagtagccgcgaaatttctcgatgaaaggagagagaaaagtaagcaaaagggaattttaaatgaatcggttatcgaaagagattagtctctttaccgggtcagctcgatgagacttggatcataatccggatcttatagtcattctttttgtttactaccataaaccggtcattgggttaattgtaaattatttatacaactaggattaaacccgcggtttcccgtcgcgcgaaggcttttataaattttttattaaataaattagtgtgtgttatattaaaaaatagtaacatatatttagtttttttaaaactggtataaataatgattggaatcttttattagtatggagactatttactgattagaatcatgtattttattgtgtttaaagttgtgcatcaattactaaatatgtatttgatataaataaaatgaaaacaaaaatataatataatgatagatggtgtaattgttttgt

SEQ ID NO: 20798 - DNA, 943 bp, Arabidopsis thaliana landsberg
  unsure (1)..(943): unsure at all n locations
ggtgtatttcaacctaactagtccaccttcgtcaggcttgctgatggtttccgttggcatttcccattgctctacaagaggccacactctaaaggctatgtgctcctagaccaaatccctcgttccgatgaaagagcagactatgccgaaggcttttggcattcttcggctgcatcatcgatttccaccttcggcttcataaggccgaagcgctgccnnnnnnnnnnnnnnnnnnnnnnnnnnnnnnnnnnnngtgcctttaaattgtttttcacgtaaaaccattccttcatccagtccccaggccatcttttccggaaggttggcacgggacagctcgagccagagcgagcgacgaagctataacagccaaaattgttatgatattgctctttgcctcagggtttcgtctcatataacaattcatgcatattgcataagctttttgcatttggctccaaaccttggctctttaccgacccagacgaagattcccatccttatgattgcttcgggagtaatttgatgaaggcagatttcaaatatcttcaaaacttctaccacgaaactgctcaaaggaaatcgaagtccagccttgaagaaacttcggaatatcacgacttcattctcctcgggagtcggacaagttttctcaccttcgtcagccctcacaatagataaatcccgaaaatatctacccctcatattagcaagatggctttgtttaatgcttgattttccaaaaactgcatggcttggtcgccaaggtcgatcttcggaatcttcaccaccactttccacatcatagctgtcactgtcaccagtgtctttagacaaaccctctaaaatctccctagtaatcttctttgtatttgtctttgccattgattcaagaaaaccgagattcatctcctcagaaaggctcagcttcgattcagcgggt

SEQ ID NO: 20799 - DNA, 1043 bp, Arabidopsis thaliana landsberg
tacgcattagacaactaacaacgagggcactgagtttatctggtgaaccaaaatgcttataaggctatctcatcattatcccctatgcataagcaacaatcctaaatgaaacactctagactcgatcctaaatgcaatgcaactacatgaacactctatttttgtgaaatcattttctgaaatttttcaatttttttggtttttttctatcccttagatgaatgcagactcaagattatataccatgcaacacacacttcctgagccctcccccatacttaaatcatacagtccactgtgtgaccaaatttggaggagagtactcaggacaaaacacatcacaaaaacaaaataaaaacaggagatggtatattacaatggtgaagtcaggagcttacctcagttgaagtatgaacagagttgtcatcaatggctgcctgtgattgctcccaagcaatgaaagtgtcgccctgttctgtcttagccccaactccctgaggatacttgacctcatcgcctcttctgtggccagcaccgccacaaggatactcgacctctcttcttctgttgcggccagcacggcggtcgagtgatatcctcgagttgataaggcgtgatctgctgctagaacgaacgagcatagccttcttcttcttcatgtgctcccgagactcgaatgatgaatgtctagctgggaaatgtgagaccctctgctcactaggctcaggcctgtgttgactcggctcaagctcgtcaaatctcctcgatggcatgtcctgaggaggctgtccctgcagaatagttgtagtggaagtggagtagcttagcatggccttcagagacttgatagtctttaggcatttgatgatgaacttgtcttgcttcttgcaccacttctgcaacttgctattgtttctatgagcttcactcaagctcttactctccctcgctagaggtacgtgctaaatgaaataatacatgcttgaatgatacttctcctcatctgtctcaccgatctcatcctcagtaccttctgcatcctc

SEQ ID NO: 20800 - DNA, 696 bp, Arabidopsis thaliana landsberg
atataggtaagcagatttcgttgttagttggatatagttttttagaattattattgcttttataatccgaaagcccaatcacatcgtccaattaagtattttaggatattttttcctacctaggtaaacaaattctctctttacgatttccattttatttggatttgatcagtgtcaaacgattattttgattttttaaaaatgtttatcacttactaaacttaaggtatgacgaaatggaaacatttgtgttttaaatcagagcaaaaatatatatcttgtgcatgcttacaaggattttgatttatacttacttaaaacatgtgtattataaaatcgaaatataaatcacattttagataacacattggtgttattatatgagctagataattgcagagactcttgtcctatttgtagctcctcttcatttcattgaccagagattcaaaactctctaaaaacaattatttttaatagaacattttagccgtttttgtttgctcctcctacatactgttcaaaactcttgaaaaccttttttccaaacgggcaatggaccatgggcttacaaagacttcacggttactacaatacaaacgtacgtgagtagattaaattttatactttggacttgtcacttataaaactaaaaaccagactaaacggtcctagctggtccacatcactgccacc

SEQ ID NO: 20801 - DNA, 602 bp, Arabidopsis thaliana landsberg
ccaattacaagccaaatgtttaaaaattcacaaaagtagacttcatttcaatgcaaatcaagccaaacgtttttaaataaaccaattgttccacaactaccattgactcgatcaatctgccttccgcattctcttacgcttcttatcatccgccacaaacggtgatttaataaggcgggatgctccccttgtttgcttctttccggtttctattacaggtggcacctcctacttcttcttgcccccgccattcttcttcgcttttcctttcagctctttctccgtcgtgtttgtctctttattacctacacacattttaaaacaaaacctaagtcatatattcacatttttatacccaattgacattaattattatacttactgttttctacaacctctagagaatgttctctgtagatcactacatcccgttgttgcatcctgccggtggtcacaaaaccatcgggcgaagcaaaaacacgtcatcgtctgttgcatgcccatgttgacttgcctcctctgtttgcttcccatgttccctttccttcagatctgccacatataactcaatagactgcactctcacatcaatgacatcaatc

SEQ ID NO: 20802 - DNA, 535 bp, Arabidopsis thaliana landsberg
aagtacgatcggaagtcctccggatgaactcgatgagatctcggcgggtattttgaaaggagatctgaaggcgaagaaagcagtggcgattaagattgttttgaactcgaaggtgaaagtgaagatgggagctctaaaaactcctaaatcaggaattagggttacttgtgaagggattaaagtggtggctccgacgggaaagaaggcgacgacggctacgacttccgccgctaagtgtaaggttgatccaagatttaagatctggaaaattactttctaaatatagtaaacaaaataatggaatcacattcttagttttttcttcattttctttttattactccattgtttcaattttcatttctttttaaatttgatttcatatacagttctttgattcctgtaagactttatttttttggtttatgtaaatgaagatataaatatttgtgttctgtctgaaattttatttttctagcttagttaacaaaacccaactgttagtatttaagtactggaattaggtaataatgcg

SEQ ID NO: 20803 - DNA, 497 bp, Arabidopsis thaliana landsberg
tgagattgatgcagataacagcagcgacaacttctttcatggtgttcttctcagcaacaatgtctgcagtccagtacctgctactaggaatgcaaaacacagacacagcttatgtattttcctttatttgcttccttgcttcacttcttggactggttatggttcagaaagctgtagctcagtttggaagagcttccattatagttttctcggttggaaccgagatgtctctgagcacagaccttatgacaagttgtggagctcttgatgtctggactgattacgtggcaggcaaggacatgggtttcaagctgccatgttaagacatcatgcctttggatcatcgacaatagagatctaaagaaaatcatctgtttcttttaatcatctgctttatcttgatgggcaacagaggctctgaattgactactatgtaagagggagataaagagcaatatggcatggaaaagataatatgatacgtaaaaaaaatactt

SEQ ID NO: 20804 - DNA, 981 bp, Arabidopsis thaliana landsberg
agtgcaaagttcagtactggtatggtaatagttagtgtatggctacctaacacccagtcagccagttgaggaattcatctctgatttctttgatgtttgcttaattttttccacaggccgaagagcttggtagatactttcgaaacaatatgtatccaggtgacaacacattacctgcttgatttgtccaatcatttcatattctaccttccatatgtctcatacaattttctgaaacagtccattgtagttgtgttgatcaatatacatttatttctaagtggttaatgaaaaactggggatatgctttcaggggaaggtaccggtttgctccgtctccatagtacataccgtcacgaccttaaaatttacagctctgacgagggacgtgttcaggtacaactttctgccgatttcgtattgacgatgaccattgagcattcaaatgttcactatatcttctggatattcctcatcggttgcactgagatatgatatgaatgtatgcagatgtctgcagctgcttttgccaaaggcctgcttgacctagaaggacagctgaccccaatcctggtttgccattttcttttaccaagctagtatagtgcctggcaatgtcataatcattaaatgtcttatctttttctctaggtttctctggtaagtaaggactcttccatgttggatggccttgataatgccagcagtgaaatggaagcagctaaggtttgtctctctctttactacatcttgattgtggcttcagcagatatgagacgaatgaaaggatgtttaggtgctatttagaagcatcaaccaatagtcagtagtgacattcataacgttctagattggatctatctctaatacaccgaaagctttctttctaaattgactaaatagaggcctttccaatgcacttactcatcgaatgtttgaactaatggttgctcatgcatggctaacatggatgaatttcat

SEQ ID NO: 20805 - DNA, 524 bp, Arabidopsis thaliana landsberg
atgcgcaggcgtgatttacccgcaagcgattgggaaggtgctggtgaaatgttccaagtgacaaccttgatcaatcacactgagagggttgagcaggatctcattgataaccctccaccaactgaggctgacgttgaagcggccaggcttattgtcaaggagagaggtgaagctgttgcgcaacttaaagttgccaaggcgagcaaggaagagatcactgcttccgttgctcaactaagtgtagcaaaggcgagtttagctcatgttgaagagaggttaaggcttaagcctggactacctaagaatgatggtaaaattgattattccaatgatttctttggccgtcaagctttcttgacagtttctggtcagttacaagtggagacctatgcttgcgctctagcagcgtgtatacatttggtcccacttttcgggcagagaactctcacacttcaaggcatttagctgagttctggatggttgagcctggaattgcttttgcagatatacatgtaataaacata

SEQ ID NO: 20806 - DNA, 407 bp, Arabidopsis thaliana landsberg
actaatttatgttcgggtttagtattacagtgtaagtttcattttaggtactgtataatttatgttcactggcttcaagttttctgatcaatcttgtaacatttcctttaaataatgcattatatttcagtcaaatgtcctttatgttaagattctgaacttcaagacactgatgagagtttgaagaagcatttgactcactggtgaagcagggaaagattctgagttttaaggtaagttttgctgacagatgatgatatgcagttaaccatcatgtctgttatttatatggttctgtagaatttgactccgaagagacatgtaccagtgaacacagagatctacaggcttactatgctagctaagtctatttaattttgaaacttgaagtccgattggactctatg

SEQ ID NO: 20807 - DNA, 775 bp, Arabidopsis thaliana landsberg
tatgtcaagcttcgtgagagatgcggggaaacaaaggaacaattatatggtgcgaccaatgtgtttgaagatttcttccgtgaataccaaggggaggattcgtttcgatagttttttcaatatgaccaacgtgaagaatgtgagcagcaatgcggagcagtttaaaaataaaaggaaggatctcttccacaagctattgttgggagccaccaaggatgtaagcgacagcaatgatgcgtacgcagtgggggagacgaggataggaagaaataagatgtatgcaatgatgcagtgtgcactagacttaacgacgaatggatgctatgtgtgtctagaatggattataggcaggtatgatagcttctactttgaccgtagacaaggagcgagagttttgagtaggagttgtagcttaagatatgagctttacccttttcttaggaggtaaaagacttttatatgagagctccatttctctctacctctcaagtttacttgtttgattttctcttttctccggagacttcttcaaacaattatttacgtcatatatgttttatgttgttatatatatatatatatatatatatatatatagctttgatgtaataggcaatttcatcatgaccctgtgcaatgatcaattctagatgatagcggatagaaaaatgacagagttgagaggaagctgacatggaattgtatgttttggagagagaggaggagatgatgagggagaatccaatgaatctccctcctgcggttgctgcgataa

SEQ ID NO: 20808 - DNA, 1560 bp, Arabidopsis thaliana landsberg
gggctctgttgcataaggacgaactttgacaagctcaaggtcaatcttatgaatctgttttgatctcctttagttccggggtaatgggtgatctctagcattttcacaggacacgacattaggaaaatatccggacaagcactcacaaacaggtttcatacttatcctcctcctcatcataatcatcttcccacatatccggacaagcactcagtcacaaacagtgtcatagatcttaaactgctcttaaagggtaacaatggatatactaatgttaggtttctgaaaaagttatcttttgcaaattgaacttattatattgagctttaaccatagtaaatgacaggaaacaatgcataaaaacaagagattttggttggaaacaaaacgtagagtgattcagttaaacataagagaagaggaaactaaggttttgggattaatttggtttggtttgaaaagaaactagaataaccgaagacaaattccaaggggactttggcaaaactttgagcaagttttgttttctcagagaattcttcctgctgcagtccacttttcagacaaataatcagttataaggagctgaacattgcaactcgataacttgttgtactcttccatcatctgtatgataactttagacacttgagggaatctgagctctgtaggatcatactcctcaacatagatgttcatctccttcagacacggaaagtagaccaagaaatgctttatcattgtcatctctttcattgttcctctaaaccctcgaatctctaacttcttcactggacaagatgtaagcgaacgacctttgtcttcccgagaaatgcaatcacaagcatccccacatttatccgtcatatagtgtaagagaccctgaaagcataaaggagacaataagattgttgagtaagaacaacatctttaacacatgttttccaagtagtttcatggtttataactggacctcaacgagtagaaattctacatatggacatttacttacaagaactggcatcgcttgccatcctcgtccctcctcactcgtgatacctaatgttttgaggttgttgaacagcggcaccgattcacagcacagagaaagcacctgaaaacaagaaaactagacattttgcaattaatgcttcacaactagacaaaagagaagaaaaatagaaaactgacctcgatagtatcagcagttaagtaaagtttctgaacattttgtatgccattcatgagcttcaccacattgctgaatcggagaacaacatcaacttcatcatcttgtaaccaatcttcatttggtgctcttactcgcttgatttgtttttcagtaactataaagttgattcgagcctcaaataatgccttcatgttaactaatggatagtcctcggcaactaaatcagagtagttaaaggaaagcagacttggagtatcaaaagaaatgctctttggatttcaaaagccttgacaaccggtgccatgaatacttagcagcttgatggttgcacttgacacggtttcatccgactctgtccactccatatt

SEQ ID NO: 20809 - DNA, 1298 bp, Arabidopsis thaliana landsberg
  unsure (1)..(1298): unsure at all n locations
gcctctgtctctccctatcttcttcttcttcttctgattccccacactctcttcttctctacttcaccatcattcacacacactcatggcttcttcttcttcttcttcttcttcctccatcacaatcatcaccaccttcctcttccttctcctccacacaaccgccaaaaaaacctacatcatccgcgtcaatcactccgataaaccggaatcattcctcactcaccacgattggtacacatctcaactcaattcagaatcatctcttctctacacttacacaacctccttccatggcttctccgcttacctcgactccaccgaagccgattctctcctctcctcctcaaactcaatcctcgatatcttcgaagatcctctctacacacttgacactacgcgtactcctgagtttctcggtctcaattccgaattcggtgttcacgatctcggttcttcttctaacggcgttatcatcggagttttagatactggcgtttggcctgaatctagaagcttcgatgatactgatatgcctgagattccttctaaatggaaaggagaatgtgaatctggctccgatttcgattccaagttgtgtaacaagaagcttatcggagctagaagcttctccaaaggatttcaaatggcgtctggtggtggtttttcgagtaagcgtgaatctgtttctcctcgtnnnnnnnnnnnnnnnnnnnnnnnnacttcaactaccgccgctggatccgccgttagaaacgctagcttcctcggttacgccgccggtacggccagaggtatggccactcgtgctcgtgttgctacttataaagtttgttggagtactggttgtttcggatctgatatactcgctgctatggatcgagctatacttgatggagttgatgtgctttcgttatctcttggtggtggttctgctccgtattatcgcgatacgattgcgattggagcgttttcggctatggagagaggtgtttttgtgtcttgttcagctggtaatagtggtcctactagagcttctgttgctaatgttgctccttgggttatgactgttggcgctggtacttcagatagagattttccggcttttgcgaatctcggctacgggaaacgactcaccggtgtttcactgtataacggtgtgggaatggggaccaagccgcttgaattggtttataataaagggaatacgagttcgagagaactttgtttacctggttcgcttgattccagtatagatcgtgggaagattgtcgttcgtgatagaggtgtttatgcta

SEQ ID NO: 20810 - DNA, 969 bp, Arabidopsis thaliana landsberg
aacgccgcgaaagctaggaaccaactgggaaggtccctatcaaaccaccgaggtggtaggtgagggcgtctataagctcgaaaaagttatcaacggattacctgagttacggccttggagtgccatgcatctcaagaaataccacgaataggtactcaaaaacaatcgaactatgataaggcttgatcccttggcagggtacgtaggcaactccccccaagagcacagcctccaccccaatcgaactacgtcatggcttgatcccctgaccatgtacgtaggcagttcccccgcagaacgcagccagcacctcgactcttccattaaaagcagaccccttcgacaaagaaaatggacatcatgccctccataaaaaaacgtcagcttgttcacctgacaattcaaccatctatcgacaccaagcaggtcccctcttggcgacttgattgaggatcgtcatttgctttacctcgtttgtacttaaccatttcgagataagaataaaagaaagttcaatacttaatattactctttgcaaacaatttcgatacttaatatcactctttgcaaaccaatcgctaccactgcgatttaaaactcattcgtaatcttgcgatacctaaagcccaacacttgaatgttgacgcaaccatttttgtgatctcgcttctaaaaagttgatagttaaccttatccttaaaagcacgtcacttcgacttcatcggagctcacctacgagaaccatatctaactccttccttcaccatcaaaacattacaacttccgggacaggagccatggactccaccctctcttcccctaaaggggggacctcctggtcaatcacggctagctcagctgctgagtgccactccggcaatgtccgagctctattcggcaaggcggggagccactgaccatggtagctcggatgaccagagacgtgaattactggtgattgcggtggta

SEQ ID NO: 20811 - DNA, 1346 bp, Arabidopsis thaliana landsberg
cacaacagccattatccaacctatccatttatcgcaaaaaccgaaaagtcgcatcgtcgtttccagaaaatcccactctactcggttatatgctttgctaacatctgttttcactgccatatatgttttcgagactcgcttccggacttttagggagtgcataatttcatgagcgatcataacattatcattgataattctccctggaataaacgcagcttgcgaatccgagacgattgagtttaggtgtgttttaagacggttcaccatgcattttgaaatgactttgtataagacattacacaaagctataggtctgtaatcggacagcgtttgaggattttgaatttttggaatcatacatatgttagtgtgattgatgttggtcttcatatgtgatgattcgaaaaaaagtttcacctctttaattacatcgttaccaacaatatcccaacattgtttgtaaaaacgtgctgttagaccatctggacccggagccttatcgtcaccaatctgacaaattgcttcaaaaatttcactgtcacgaaaatcttgcgtaagctccgagttaattatgtttgtgacagatgaagggaaatctgcaaagtcaattggggatacttgtattccgttagtggtgaatatgtccgtgaagaatttttgagcatgacaaccaatctctccatcacccatgtacatatgtccttgatcatctacgattgaatttattctgttttgggaaattctggtttttacgcaagcatgaaaaaaatcagtgttatgatcgccttccttcatccattggttacgacttttctgtttccaaaacttttcttcgtcactaaacgctttggccaacgattcttgtaattgaggtatgtgttgtctttgagctctattcacactctccattgctttgtttaatctcgcctgaaatgttttgatacgcacatccgaatttaaatttgaacgatgtttcagtttggacatagcctttctgcaactttggagacgttcagtgatggcaacaacgtcatcacgtgggcgatctgttccatcgtcgatggttatacttacataaagcctattgcataatcacagcaaacgatctatctacaccgagcactggatacaagcggcgaatgttccaacctcaagtgtggacccacccccgtttatggtctccgacagctttatccctagtctctgtttcagcccttcgatatttagcagaccaagcagaatcaatgactttagctgtctagaacagcagtcaactggtatgtgtgcgtctatccgcaagccaacagcatccatcccctggtgtcggatttctagcgatcacc

SEQ ID NO: 20812 - DNA, 466 bp, Arabidopsis thaliana landsberg
tcttcgcatttggaactaatagcaagattgaatattctgatgccacattcaagacatgacaatggtaaaatgtttacgagatttcgacatttcgacatattgaattctgtttaaactcaacgaaaaatcctcgttagaaagcagcagagatcttaatacaataaaacttctataaattcataatattgagaccgagaagaattcattaatttagagaggtattaatttatcgataaattaatagattttacaaattttataaatttcttacaaaaatttgatcaaaaaagtagttattttttataatcaataatatttctgaaaccaattacaagtaaaacacaattatgaagtttaaaaaacaatacaatattttttcgacgtagtacaactattagaattgaactctacaaagaattaatacaaattgcagaagcataatactagtgtcatgttacgctaaata

SEQ ID NO: 20813 - DNA, 1943 bp, Arabidopsis thaliana landsberg
cgaaaacactgtaaactcttgaattcagactctgaataatttttatcaccaaactcaagtttcgtcaaccacgtgcaaagaaactcccatcgtttcgacaaaatactagttgagacagcagctttagtcggagctaacgacattatcttaaccagtatttcatcaggtaacccactgattctgtccatatctttacaaaaatcaagaaaacacaataaatacttaggatttgtctcaagccaaccaaacaagaaaaaaaacacagaagaacaggagacaaaccctagaaagctctggattgttatgtgatgagactatttcagtaaattctcaatttttccgcctctgaaccggaatcataagggtaaatcaaaagcgcctgaagaactctgcggaagaatttctggaaaatctacaattctgaaatcgagaaagggagaaagaagaagaaggtagcagaagaaactcacaatcactgagattcgttgagaattgtttgctacctaagtgggcctgggctttgggcctgctaataagactctttcttctcttttagactctttcatgaaataatgaaaaaaaaaaatatgaatatgctgagagtcagacaaatacatgtcccaatttttgtgaaggaacagagaaataataatgagaacaaaaatgtcgaaacacacaagaaatcaaatatcccacacaaatagacgaaataattaacaaactttggctgctttgtcttaaatctgaatcgtccttattcatcctaatcaatgacaccgttttacttcttcttcttcttcttctctatccccaagacaagattttttcaattgatggacataaatcgattttgagaattttcttgagtttccattaaaatccacttctttgggctaaattcagggttttgtgaagaatgggtaacagagtaatctgcatgaagaagaaagatgttgttatcagaagtggaggagatgggtccagaagcaagagagtgaatcgttcacagaggaagttgcttgctgatgaagagaatttgcatcgaagagctttgtctatggctattcatcaagctcaagtttctcagagatttgatggatccatgtctatacgaatcgggtctactagctctagaagaggaacactctctgactcattttctaataacaagcaggtccaagctttttgataataatgataaagtttggatttttaaactttgaggagagaattcaaaagtatttataaaggttttaaatttgatattgttcttaaaagtggttgggaccaaaagaacagaataagtgttcttaaaaggtcttgtagtgcgttttgctttttaaaatgtttatatagggtggttgtcatattactttatgggtctgtctagttttgattagaacaaagatggagaaaagaagcttctttgttggagaaggcagtgaactttgttcgtgtaaatattacttctttgtaattgagactgcctatgactatgagaaaccaggtctctagagatcagtacacaatttatgttttgactttactgatgctagtatctttttatcgtttgttgagtgttgttctcaaatgatagttattgtcttattaccctacgggcctgtcttgttgtggttagaacaaagagtgagaaaagaagcttctttatggttattgaaagcagaggactttgttcgaacactcgagaatttgttcatgattgttcctgtcacacataattgtcattgctttttatgttcagttttacttatgctagttttttttttttttatctctttaggttcctgagtttttggagagcttgaaggttaagaaattcgttttggtgcatggtgaagggtttcgggcaccgtgttggtacaaaactattgcgtcaatggagaaaatctggactgtctcctgttacggttgacctcgctgga

SEQ ID NO: 20814 - DNA, 785 bp, Arabidopsis thaliana landsberg
atttttacaaatcctaattaaaaacttgaatgctaaatctacataatagtaagaaaaacaagttgaatatttggaatcgctaacgactaatgctggatccaaaatccggttagatttcataccattatgtaaatttagtaataaaaaaataaaaataaaattaaaattaaaaacaaacacaaaatatatcaaaatctttattagaaaaaaaaaaaaggaaattaagaatcaacgaacctgactcatggtggactaaatggattatgactctctcggcatgactcatggattgttgtttactaaagcccattcgttgtaatctgaagcccatcgattcttccttgacttgggccgaaactgcaatttttgatgatgaagaagatctcgcttttcaggtctgaaactctgaaccaccaaaaccccagatcttgtcgtcactttcactcgcgattctctttgtgacgattatattttgccgaaagtttagatgcatccagtttttgcgtcacgtcaaactagtttctggaactcaaagtaatcttcctccataattagcccgcgatcgtgaaaaattgatcaaacacgagagacctctttcgacatgacgttagtacagtacggcgatgtatatgggtcataaatttcacggtcacgatagatcagcgatcctttttgtaaaacagtcgcagagaaagagaataatttttttagggtttagaagaaggagttatgatttcttaaggaaggaaggaaaagattaatatttatgacgagagaggttcacg

SEQ ID NO: 20815 - DNA, 1206 bp, Arabidopsis thaliana landsberg
  unsure (1)..(1206): unsure at all n locations
atcacttcggctccagtttaaggcatcgaataacgaagcagaatacgaagcaattctcgcaagacttcgactcgctaaggggctcggagccaaacagatcaaagctttcagcgactcnnnnnnnnnnnnnnnnnnnnnnnnnnnnnnnntcgatgccaagaacgaaagaatgcgggcttatctctcactggtccacgaactttccagccagttcgatcagttcgccctggtcaaaattcctcgaaacgacaactcggcatcagatgcactggcctcaagcaccaacgtctgatttaaggcgaactatcccagtcgaaagcatagcaaaacaaagcatcgaaccactgaattcgacctgcgtgattgtagaccctgtgacggccatggacatagacggcaacgcagtcaacgcgccggatacaaaagaggatccggaaccatccgattggcgactccccatcaaaatgtacattgccgacggcatagttccaacagatcgatgggaagctcgccgacgaaaagcaaaagcggcgaactacatgatgatggatggcgaattatacagatgaagcgcaacaaaagctttcctcacttgcgtggatcaaaaagaagccctaacactcatgaaggaaacgcatgacggagacggggggaatcattctggcggacgagctctctgccttaaaatcaaaaaagatggtcattactggccaactatgctggcggactgcgaagcctacgcggcgaagtgcgagccgtgtcagaggcacggtccgatgaagaacgttcctcccgagatactgcgttcggtcacggcgcaatatccattcatgcgatgggccatggatatcgtgggaccaatgcctccttccggctccaaaagaattatgttagtcctaactgattacttcaccaaatgggttgaggcacaggcgtaccacaaggtcaagtcacgcgatgtggtcgcattcatctggaagaacattatttgccggcacggtcttccttatgagatcgctacagacaatgggaagcagctcgtctcgctcattactagaaacttcctcgcccaatagaacattcgcatgagcaacttgactccaagatccccacaagggaacgggctagccgaagccccaaacaaaacgatcatcgccgggattaagaaaagactaggccttaaaaaggggaactgggcaaaccagc

SEQ ID NO: 20816 - DNA, 1892 bp, Arabidopsis thaliana landsberg
aaatcaaaactaaccatgttaaagtaaaaaaaagagtatattgaaagtgagaataatattgacctataaattccaaagcacgtggttgggatttccctccccaatctatctctctatccacttcaattttttttaatgaaataatttttattaattattagataagtgaaagtaaaaattgtaaagatataaatcttaaattcttcaagtagctataaatgtcacagttgacaaatccactgtctttgctttcctttcactgctcacttcatctctctttcttgtttcctccattgcaaacaaagctttctccctctaaaccatttttcaccaaagtttttttcttctgttccccattaacccattactgtgtgactctatatacacacacactcacttccatgctatattaatattttttttggcttttaaccataaccctgaatcaagttccttgtgggtaaattaattttagctcaaactctacaattcattattggtacatctctgccaattaataaactgttgtttgcttaaaaaacagattaaaaaaacggagccttttctttttccattgtttcatctgttctgttctaagatgaagacaaatctaaaggacaaagctttagtctctctcccaacatactaactaaggtaacttcttcagtcttcttttttttccataagacccagaaatctttccttgaatgttttcttttgatatcattatgtgattgattctctgtaaattgtctcttgcttcaaagttaagtgatgcttttttcgatgatttttttaaagccgagattctcttgtttcttcaagctcccatcttttgtggggacacgtaatgcccataacttatttgttgatatgccgctatatttttacttataccaatgaaagtgtgcgtttttttaatttcttactgtgtctgtgaaggttttttttaactcacatctattagattgttccatgtggcctcagattgagttatctaccattgcttctacgctttctgttttggtggctaaatgtgaaatgagaagtgtgaaagatttctttttagtccttgtgtgatgtatgcaagtgtttatatgtgaatgtgatacactctcttgttttaggtgattatagtgaagttgtaagagaagcatacaggaccagagatgccacctgagagttctttaaacgctgaaatgtccaagaagatatcattttttggtttgaagggtttgaagttgtgggtatgggtatgtttggtagttggagtattcatagttatgattctctgcatcttgtctctatggatcacattccgtcggaaatctagaaggtcttcaagcaagtttcctttcaaccaaataccacatgtgtccaaagatatcagagtcgacagggctgggtttcagaatcctcaccccgaaagtttatatatagaaatgaatgataaatccactggaaaaacgatgatgtctcacttgggaagaaccaagtctagtgataatgacactttgagtcaatgtagctctgtgcatcatcatgagagagcttgtagttctcactctggtgaagatggaagctttggagctgcttggagacaaaattccctatcacagggcgggctagtaacagcatctcctttggttggtttgccagaaatatctcatcttggttggggacactggtttactcttagggatcttcagctagccaccaaccgttttgctgctgaaaatgtaatcggtgagggtggttatggagtagtttataagggtagactcatcaacggtaatgatgttgctgtaaagaagcttcttatcaccctgtcagttttttttttttgggtttatcaaaagttgagattgtgcttgcttcctttttacttgttt

SEQ ID NO: 20817 - DNA, 648 bp, Arabidopsis thaliana landsberg
  unsure (1)..(648): unsure at all n locations
tgggattacgtatctttattatacaaaattagttaccataataaggcggaaacgaattaactcccataattttaaattattttttatcataattttatacaatcggaaaatatttagttaacatagttcaaatgtcccataattctagaaaatcaaaaatatttgccatattagattttcacaagattaatatttcagatttttaagtttctgggttatttagtaggtggattagttgtggttattatcttttttaatcagtattgaaattaaaagatcctattaatcaaataaccggtaattaaagctaattagaatccaatctcagtttaaacttaaaatttatccgactcgaattatatttgtacttctcttttaataatatagggataaataaaagaaaattaaattaaaaatctatcgaattttttcgttatttttaaattttgtatatgtcattgtcaatatcataaaaaaatctaaacgaccatcaaacactcacaaccaaatataaacaaaagtcaaacaaacccaaccaaaccataactagattagtntcaagagaaaactattntctaacaatgtccgngaactaaaatatcctaaccaaatatatattatataatgaagttacaatcttgaaataca

SEQ ID NO: 20818 - DNA, 1061 bp, Arabidopsis thaliana landsberg
agttttcttgttgattctctcaagactctgcagcgttaatggagaatctcaataagcttatatttattttctgattgaaggacattattgttattgaacttacttggaaacctgaggttgatcttccttggactacatgcttgcgatcatcttctgaaaccggatgaacacttagcttcacggtttatagcgatctgcttccatttaaaaacatgtttttgtatgtatgaaattcagaaaagctagtcaaatttataaatttcagtccctaatttggtaaattgttagttaccttgagaacttcaggatcattccatggacctttgtcagagcgcatacaacctcctttgtcttcacaagtgcaagcacctccaaagaactcaggcaattcactgtttacaatacaaaacatctaatgaatgttcgagtttcgacaacaaaaaagaacatatatagtcaacaattttatagtagcatgatgttacctagcatcgatgacctcgagcaatttgctatgatatttgttcccaagaacatgaatctttgctgtggtcttgggatcaataaacgacttaactgtgctccacaagagccggaatccagaaccagcattgatgataaacatccggttcaaagtctacaagataaaccggtaatcaacaacttacgcgcttataagaaaacatatttattctaattagctacatatatacctcagggtaattttcattgtcaatcttgcaaagcctttgaagaagctctcttgcagatttgctgaagttcttaagaccctaatcactcagaaaacacgcacagttttgaatttacccacttttgaactgaaagagatcataaagaaatgaatttattaaatacgtaccacgccttgcacgtcaagaattgttgtgctctgatcaatgtgtttatttgctgctacagaacaagaagggaacttgaccttgaaagtcttctcgaactctttgacatgatatttcacgtaccggtccattgttgtcacttggagtagcttgttagcatcgatttgacctagtctctcaatg

SEQ ID NO: 20819 - DNA, 1714 bp, Arabidopsis thaliana landsberg
cgtaatctcttgtacgtgtctactggaaaccaagattataaattgtatttctactattttaaagctttcgccacaatattttgttttggaagagatcgattccatcattatattttttttggagtgataatctctagttcgacaaaaattatttttgttattattgaccacgagttgatttctcgaaagtttcgtgcaaccctatcggataattttccaaacctttatctttattttgatgtattttttaaggctttactggtttaaacgtaatgggtacggttacggttgcgggagtttgcggaaacgggcggttgcagtttcaagcgttatcaagcgttctgaacgactggttgagcgtttgataatggatgcgtttgcgagagttttatgactggtaaaccagcggatgcgataataattaaataaaaaaataaccaaaataaatataatatattactattaaaaaaataaaaatacaatatattatataaattgataatattagaaaaattgattttctgaccaaataaaaatacaatatatcatctcatccgaccaaatgattttctaatcgagaaaacaaatcgaaacatgtattcaatcaaaaaaatttaaagaatacaaaataaaataaaaacaacaataccatgaaatagtcgaaaaattacactagctaataaataaataaaaggatagatgatatttatgtttgattattgattttgatttttatcggatgccataattgagagaatatggttacaatatattgattagttttttttaataaaaataagatatataaaagattagattattttaattatagtgattatggtttgggtggaagccataattattttaattaattaaaaaaaattattttttttaacctaaccgctaccgcccgcaaccgcaaacgcttgcgggaaggagcttttgaaaactggcgatttcgagcggtccaaagcgatatctagcagtttttatgattggtgtcaatcgctaacaaccgttaccaactgcaaacgctgcgtttgcgaatggtagagggagaaccaatgaaaccctaactatatgttagattaacttgtcggaaacatgttggaaaatacgtgtaattacttaaatatccacaaaaatctttctctctgctattttcttaatttatatattttatttggctattcaataatattacctatctattaaatcaaaaataaaactaaattataatttatatagtaaatgtttccaaattgttttttataattactttagagcatatattattgaggtaagcatttggaaactctattctttcaccaacagtgtggattagtatggattggtcaccaaaatattaatacaaaaatgatagaatctttattttgtagtgaaccacttgctttaggatcggacttcagataccagaaagtttcttgatccaaaccaaacataggagaacgtaactttatatttttaaaaagccagtaagatcgtgatatttcttccattgatataagtcgaattactcattcggttttgataagatattcatggtgcacaaattatctaataatttaggacaagataactaagatttttttttgccattaatcttatccaagtgaatgaatcttaagtatcctaaccctaaaatcatcaaaccaaactaacaaatctaccctaagtcccaagttggaaaact

SEQ ID NO: 20820 - DNA, 1575 bp, Arabidopsis thaliana landsberg
ctaatttttagtgtaaccctttcaataaaatgtagttcttataattaaagtatagtagtatttggttttatatggttaaatatttatacaaatgagatcatgttattaagtaagttgtaaaaagttgttcattgcttatataatttcttatttaatctaaaaatagtcacgttttcttttctcataattgttaaaataattgtatatattaaaagtcaaaatttatataaattgatattgcaacctcatgaaatcgtagggatttacccgtagtgtaccacatgtttttttttttttttaataaactgatatatttgttgattttagttaaaaataaaaaaaataaattaagttatatttgttttgtttattgtttaagattgtataactatattttgattgttaattccatgattttatctgtgttataatattgaccaacaccccgctagtttgtggtaatctagtgtagaccctcacagacccatccataagaatacgcataaatagatagtaatattaggagataaacatcattagaacatgaagtaatttacttatgaatctctatctattgttttaaagaatcgatattctagattgattgtgaggcaatgtgaatatatgcatagcattaaaaataatgaaaattacctgtttaaaaataatgaaaattacatgtttaaaaaaatacttgaaaagtttatatcatttaaattttaattaaaatgttaaatattttaatctatactgataatatcttctagatatttagaaatctaaaatccaaaaattatcttttgaatatgctaaatcataatttaaaatcttctttttaagtgtactaatgagaaacaattaacatagttttgttaaggaaattgtttaaaatttaaactaaatgattatttgttattaaattagattgaaattttcgaattatctaataacatattaccaaaataaataaatttacatatatacaattcgaattaaaatagtctgatatgttatggaaacgtttttaaatgatttctgaaaatattgggtagttacaaatttattgattttaaatttgattttttaaaagaacaaaatccaaatatttatttagttgtagtagttgttaatttactaaattactcatgcaaaaattcatttagttaattttaaactacccttacaatgttatggttcacacaatgcttcctaattaataatatagatacataaaactatagatttaagacaaaatttatgatttttattaaaattttgaacttaagttattgtaaaacatcaaaaactttctaattaaatgactaaatagcaaaaagaaaaattgttttatacttgcaatctaaaagtagttaggatatgtaagattagacgaagattaatcagaaagaaatcagattaaacggaaagtaataaaataactgattttttaaaggattaatcattaatctatgtggatagagtacgcctatcgattaaaccggaaataatcaggctaggcggagttttttaaaactattccaagttccaactatgaaagggttggtgaatttgtta

SEQ ID NO: 20821 - DNA, 501 bp, Arabidopsis thaliana landsberg
ccttggcgcggagactcttcaaagaaaactgttgtgttgcgtaagactcgcccatgggttctgcctcatcatctgaatgatggattggagcctcatcatcgttcactccttccatcggcatagcttcatcacctgaagtatagaggttctccactggtgcgcaaaactcaatgttgccaccatctctgatcaaagtggaagcgggatttggaaggagaaaaatagattgtcttgctgcggggtgatcgaacctatatttaaagaggccattcttctgttgcgaccaaaaacaattggaattgataaggtgttgcatatcaatccagctcggaggaatcgttcgaatgcagaggtacaatgcatgctctcaaaattggggtcacaactcctgccacaaccattcttcatggtttcttaagtcccttagcccatcctctataacacagcagatgttcgattatgtataatgagactgaagcgtctgcctgatctccagctaga

SEQ ID NO: 20822 - DNA, 1001 bp, Arabidopsis thaliana landsberg
gtgcttttcgactctcccctccgtagatatatatatgagagatttgtttactaggatattcaacttttgttcgatatccaagtcattttcagggagcgtggctttcacaagatcaccatcttcatagttgaagaagattgcaatgtggagaaataatgattgttcattctcatgtaaactctcataaccgactcttagtacttgttcgatatctcgatcaatgatagtttctagcctccgtattacatattcccattcttcctcattcttcccatgtaaagatgaacccaccacacgtagacccaacgggagcttaccacaaagctctgttacacttcttgtaagctttttaaaaccatgacgtgaagagctctgtctaaaagcatatctacataagatcttgatagcttcttcatcagaaggaaatcctacatagtaggtattgttgataccatgttgcttcaaaagctctttgttttcggttgtcacaataatcctacttccaggaccaaaccaattactttcattagccaaagcctctaattgcttgacatcactcacatcatcaagaatgataagcactctcaggtcgcttagcctttgttgtaacactcctaaatggcatatcctcgtaccatcttgattcaaaacctttgcaagaagttgttcttgtaaacgcaactgctgaccgtaatcgtgaagaccactattctcgcttcctctaagatccataaaacatgtaagttgaaacctatcagagagtcggctctccaaagctctagcaatggtactcttaccaatgcccgcaggaccagagattccaattatcagagcttcatccttataatctaaacgtaacaaagactggattttcttcaagtgagcttctagtcccaccatatcttcaaaatcctttgatggtgtagcattaagtttatatgaaacatcccttgcaaaataaatgatcatgttcgcttcattatccctaacaaaataaaaga

SEQ ID NO: 20823 - DNA, 564 bp, Arabidopsis thaliana landsberg
gtcacaagtaagatgccaacacgtgcaaaagcaaaatcgattcacatcaacctagaaaacttatttacaagttacaacaattcgacagttcacgaagctaagcttattgatagaaacccagaaaagcaaaatcaatttacaaagtatacatgctataacttactccaagggacttgacagcaaagatccctcgagaacagcgcttgaggtgagggaagaacgatgagcaaacccagactaaagagaagccgaaaggactgaagctcgaaaccctaatatttgaagaagaaggagagaagagatcgactgattttcttttatatacccattgggtacccaataccaattaaacaagacccaaataaaatggttactaattatacccaacccattttaaacccaaaattttttttctgtgtatagactaaacccataaatgatggtcttggatatcccttctttttttatataacaaaaactaatttttgtgggaaaaatcacgaaaattaaatcaacttaattatatcttctgaaaaaatacacaaactttagcgttgccaaaag

SEQ ID NO: 20824 - DNA, 1256 bp, Arabidopsis thaliana landsberg
caggtttacgctgaggcccctggggtttatctctttctcgcaaaacagtcctcggtccactattggcatgggtcactgacattgcacaaaaccccctggacctaaccgaaatctaacccgcgctccctgactgacttaaacagtacccgcggcataaattacggcggtggggcttaccggcggcagtagagctccggcggggtggtcagtgacgtccgggaggtcgcgacggtcacgtcggtgtgcgggtcggcgtcggaggtggtcggagctaccctggccacgagcacaggcggcgggggtcgtcggcggctcctgctccggccaaaccacggcggtatagttcaattaaggtgcacgaggagctccacggggtgatgtagaggccatgcgcgcaacgaattggaaatcggtgcagaggcttacccggtccacgtgcgccggcgggttcttgaactccggtgagcacgattgggctgttccggtgacgagggtccccgggtcaagcttgagcaagtctcacggcctcaccaggaagctatctgagggcttggatcgaacggaggaggacgggagaggggctggtcacggtggttgctctcgggcggcactggcgggtcgcggggaggtcgccggagttagtggctgactcgggcaagtccggcgaggtacggaggaggtgacggggaaggcagccaagcactagggcgggctttatagccgtggcgcgggcgtggtcacgggcggccgcgggcgcggggggggtcgcgcacgggcgtgctctgagcgcgcccccggatgtcagctcgcgtcgaacacgtggaagcttgcttctgccatggttcaacggccgattagagtgccatagcgtgcgtatcttggcaaagtcactgtgtacggtcgcttctctgctccaaatcctatcttttcgctgtgagttccaagtcgagatatggtcggggtagggagataaagaggggagaagtttgctgtgtcagccaagcccgaaccgagacaaaaggggtgtcaagtcgtgtctagcgccctagggtaggtgtcatctctttccagggtgttctagggttaatttggcaccattttgtcaattgggtcgaagggttttgaaacaggggattaaggtgaacatgtggagtctttgtgcaagggttagtttttgtacttaggcaaaaactgaattttcccttgtgctaaatcttaggtgaactgtttaggggggatcctctagagtcgacctc

SEQ ID NO: 20825 - DNA, 730 bp, Arabidopsis thaliana landsberg
cattgttttattgtgaaaagttttgtttttgatataccaaagttttcaaacgattcatgagtactatttatcaaacttttgcaaacttattgtgatgataacatgttatattgcatattattttgattttgtctcattgatttgtattttttagcagaaattgacaagttggcttttttttggcagaaaaccctatacttaatgatcatattattattttcatgcttttgtgctcttgtcgacaacagtatggttagctggagtttgattcgacaatgatgtagtttgatggattgttaaatcattaagatttgaaagcatgcatgagaaaacgatgaaataattaaaatgttaaatcttggttatcttcgacattgtatatcctttgaaatccctcaataaagatacattcaatttttagtggtgttttcataagtgaaaatacaacaaaacaatgtcgggacaaaggcaagtgtttcatctcttacaacttcattatgcattcataattattcgttcattcatacatacgttgattaatatacttacttgtctattatatatacagaagattggatggcaagatcgtaattataacaggcggggctagtgggatcggagctgaagcagcgaggttgttcacggaccatggagctaaagttgtcatcgttgacttacaagaggagcttggtcaaaacgtcgccgtttcgatcgggctagacaaagcaag

SEQ ID NO: 20826 - DNA, 1416 bp, Arabidopsis thaliana landsberg
atgtgtaactgcccagcggttacaagcgctcctccactttcgcccaaaccaacgggtgaaaggacggaccgccatgcaggcggcatgcaactacaccaagggggcgcaccctttcgacttcgacgcgtctagcatggaggcccaggcccacacgtcatgtaaccagtgcgccggttactacgtgcaagaaactgcaccgccactcgcgctagtaccgcgccttcttgactgcggaaccggtgccgcgactcgaggcgaccctgcgcatggcccaacagtgccaatcgagcacatcggtcacgggtcagtcagccgcgggagaaggcgcgacggtcgatgcggccaaaaatgggccggcagtaatgacggtggcaggcgggcagaagcagcggtcacgtcatcagccaagctcacgtcacctcgtaggacagcgagagaaccctctctcacagcgtgaagacgacgcgcccgtgctccgttcctcgaacgacccgcgcacgcacaacggctgccccgcgaaccactcgccacgtcgcattaactccgcggcggggcaggcggcgcctctggcaggagaagtgagcgacgcttcgccataatgaccgcgtcaaaaaaggtacgccacgtcattcgatttcatatccttttccttttcctctttctctctcttacaacagggaccgggaaaggggatattccaaaaagggtccttctcagcgaaggcaatgggccccgagccctcctttctgatcaggggttccaaggttgtgccctccggggttcggcaaccgccccagagcactcgggctccgagccctttactgatcaggggttcaaaggctagaccctcggaagggttcgacagtcgccccagagcatgcagagtcagggatgaccctgggtacgtccgttacatggccgaggctcgggctacgctcccgaggtaccctaggacatttccgagaccagcgggaacgatttgtaatggaatcccaccggagggaggcgccgagccatcggaccctatcgaatgggtccaggtccagcaaatcaccagcaggtacttttggagcgcgcctctgggccactaaccgacccttatcgaacggggctcgggcgtccactcggatcacccgttagcaactcactagaaacaccatgttcggcgcccccccgagggtaacatggcacgttcccccccttcctccttgcagaaaggcgatgaaggggcgtactataatagtcgagatggtccttgatcgtcctctcactccgtgcagaggctcgggggctgctctcgcaacccggctgcggccaaactgttgacagcgtcaacgaaactaacttaaaaactcagagcctgaccatgcacccgggctacgaccaggccacatgagggaacaacaaggaaaacca

SEQ ID NO: 20827 - DNA, 714 bp, Arabidopsis thaliana landsberg
tccgatgaaattgaattgaagagtaagcggagagaattgttgtttacacggaggtcgtgtaagaaagagacggttacaaaattcaccggctttccgatgaatttgagctgattacggagagaaagccaatgcaagaaacgaatgcatattaatcagagacgtgtatctctcctattgcgtttgatttaaaattattaatgggataggttgtagacgatgcttattgcgtttgatttaaaattattaggataggttgtagacgatgcttcaacagtggtacaagaaaaagaaaaaaaaaaaactgaaaatattgttggaaagttgtaaagggtaaaactgcaaaacaacaataggtaaaagtacatgaatttgtgaatactgtgagatgttcctatctccacaaaagcacagactttaaccatcactagttctaaaatttatcacacattttagtctcttgaaagaaatttcaaaattaaacataaaatttaaaaattgatttgttaaagtgcaaaagaaaatcaaaattttaggcgggatgacttcgttaggcttcctactagtagagctaaattaatgcaaaagaagttgaaaaagaattgtgttaaagcaaagatgatttcgttaggcctcatagaagcaaaggtgtaaaacttccataggaccataacatagccctaaatattcaattttctttgaattaaacaataaaat

SEQ ID NO: 20828 - DNA, 786 bp, Arabidopsis thaliana landsberg
ggtctagtgatgactaaaatctacgaggaccatgggaaaacagagagataaattttctatgggttggatatcacgctaaaaactggatagtaacgttgtccaatcaactttttttttgtgttttttcgttaaagttgtccacttaatatttatcttttaacgatacctaagattgtgacagagacagcatagacctaccgataacgttatgataaaattgatgacgtgtatctacaactttatttaggtatccaatttgggtaaatgttgaaatgttttggtactagagttagctaataggattttgttttgagaaggaatatatgtttcgtatgtttttttttataacaaaatatgtctttatgtagataaattttgaaatatattcataacatgaattttgcatcaatttgcaagtagaaatggcaaattcttcgatttgtcacaaattgcgggtaaaatcttttacttaagattatgtgagatgtagatgatttttaaatccggataacataagtaagaatacaagaatttctaaatgcaaagccatccccgacatgggttatgttagcttgtcctttatgcttaagatcaaagaaacccaaaaaccctaatcatcaacaaaaagaaacacaagtgtggtcatttattgagcttaactatcatacctatcaatcaacggaagtatggtgtaaggaccctgtgacaacgcaaaatggaagatgttaagatatagtaagcctatgagaagacgaccataaattaacttgaattgtgcctggaacc

SEQ ID NO: 20829 - DNA, 1732 bp, Arabidopsis thaliana landsberg
ctgaagatctcatgtcgcaaatgatgactgtgaaaaggatgtagtattattccatcagctattctctggaacggctcaccatcatctatcatatcatcttcgtctggtactccgtcaagatcttttccatcccacatcattaaatgtaatgcacattttgaatgaacaaaataggcatcacatttattgcaaacgtatgcaccatatctatcgtcaacagattgacggcacactccacaagttagcagtccagattgaggagaaaaggtaaaagatatacggtgggggtgacgagatattcttatgacaagtggaaacccgatacaatctctatggattacgaagacacattggatacatatgtatgtgggatcaaaattccgaatcagggaacaaatatggcaaactaaagaatcttgtgtagggaaaaaggtgagagagtgttgatgccttttcaggtggtcgataacatagggtatggtttcatggcacaagccggatgcatagttaagttgtaggtaggacattgataaaacatttgaaggatatttgtttcgcaacagttgcaaaacaataagctcaagggaggacaataaagctggagagattgaaaaggataggaagggtgattgatctcaaatggagactccacacattctttgtggaattgtttaccacatgtgagacaaaaataatagtttgtaccatgttttgagccataacatgcgccacaataaaattccccatcatcattatcagattctttattgttgcaccaaaagagagggacaacaggaagcttacatataacaccatggctttcggaatcaagcagatattggacttgttgatcactgctggggaagtgtggggaagtattgagcgggaataagttatcagatgaagcttccttcttatgttttaactggtgaaccctaagacgtaaagagggacagaggaaaagaggttgttgaagagagaggtggtcgtcgccatcaatggctgtttcaccggaagaagaagggattttggtgtctgtttgagatgataaagtgtatatgtgaaatggttttccatcgatttcccctctcacgaaatccacccactggattcatagatgctgctaagacgcttttggaaagtagtgatatttctcttctccttctcctccttccatatataacttgaaaaacacagctcaccttgatcgatatatttgtattttagtaggtgttataactatatattttaatttatattctttgttatagaaaaatcattcatttttgtctctaagtctcgatataaatatataatctttgttgattaacttttatttttttgttgttgttaactaggaagttcatagtttctttaggtcctaaagcaattcccaaactccaactttttctcgagaaatccctcccaaacaccactagtgactagaccactatctatttggtttcatttcattttcttgtatacatcactgatgattttgtatgcatcaattgaatattattattattgcaacttgtaacaagtgtataaagaatcatacgaaaaaaatctaaagaactcacacttggaaattctagtaataaaatcgtttatggtaagatttttgaagccgggaagtcaaattgagcacatgggatttaacgtacgttaaaagccaaaggcataacataggaataaaagttagctggcaactttgattcgttgactatag

SEQ ID NO: 20830 - DNA, 1304 bp, Arabidopsis thaliana landsberg
taaaaatcttttaaaaacccttgtaaatattttaaaaccctttaaaaattccttgtaaatcttttaaaacacttttaaaccctttaaaaatcttttaaaaccctttaaaaatcccttgtaaatattttaaaacccttttaaaccctttaaaaatcttttaaaatcccttgtaaatctatttccatccaaaaaaatatttttgcgggaaaaatgtttttgagaaaaaaactttggtgggaattttgttttcgaatttttttggtgggaaatttattttagaatattttaggcgaaaaatattaatatttcattttgttaacctaaaacaatttcgaaataggagtaaaatggccattaaaaatttaaagagatataaatgaaaatgacaaatagaaaatggtagaactgaaaagaggtagtgtggaaaggacattctcagcacttattcaaaatttagttgtatgattcacagtacatctttaaattactttagataacaaactttctgaaatttacgttagataacaaactttatgaaattactaagagtaatttctagcttaccacaattctatatacattgacaatatattactgtattttaaaagtacaatcacttaaaactattacaaaacttcaaattataagaacaaagtaagctagaaattactcttagtaaaaagaaacaatgagtgtaagataaattaattcttagtaaaagcaaaacttataaatataaaatattatattacatgccccctgtttttatatggatatatttttttctttttttttgtcatcggatattatttaggatcagacgagccaaactttggataagaaaaaaatatttttaaatagataataatgaattacctggtcaattaattaataagagatttcctggatgttatttagaattaatgagtccaccaaatttataagaatcgtagtgactagaatcaccttctttgctatataaacagtctttgagccaacaaattaaacaaccacacaaaacaaaaaacaaattcatggggatgaagaaggtaaagctatctttgatagctaatgaaagatcaagggaaacatccttcatgaagaggaaaaatgggataatgaagaaactctacgagttgtcaactctatgtggtgtccaagcttgtactctcatctacagtccattcattccggttccagagtgatggccgtcaagggaaggtgctaaaaaaggtggcttcaaagaataaggagatgtcgccgacagcccgaacaggaagatgatgaatcaaggagggtatcta

SEQ ID NO: 20831 - DNA, 429 bp, Arabidopsis thaliana landsberg
tgttccttagatttgatatacctgttgtctcgtggtttgatatgatttctcaactggtgatatgtggttttgtttcagtggatctgtgtttgattatattgttgacgttttggttgttgtatggttgatggttgatgtatttttgttgattctgatgtttcgatttttgtttttgttttgacagctatgggtaaagagaagtttcacattaacattgtggtcattggtcatgttgattctggaaaatcgaccacaactggtcacttgatctataagcttggtggtattgacaagcgtgtcatcgagaggttcgagaaggaggctgctgagatgaacaagaggtccttcaagtacgcatgggtgttggacaaacttaaggccgagcgtgagcgtggtattaccatcgatattgctctatggaagttcgag

SEQ ID NO: 20832 - DNA, 323 bp, Arabidopsis thaliana landsberg
atgatgtctatgaagtatgagaaattttactagaaaataaagttgtgtagaaattggtataaagatgtttattttaactggttataaaacctctttcagatctatttggacgtcgtaaatcaacacgacaacatgtattatcaacaattggcaagtccctcgttgatcttggttttaggaaggccagacagaacttactggaatttgaacttgggcgattatgtgaactgaagagtcatttaaaactgaaacacatttaaaaagactaatcttatacaaagactctttttaactcgacttgctttcgcttagctctggaattt

SEQ ID NO: 20833 - DNA, 518 bp, Arabidopsis thaliana landsberg
agctcaatcgaggctgtgattctaaccacggtcaagcacaagcttgtctccaaacttacaggagctggtgttgtttggctgcgtcctcactctattaccaaccggtaaactttgtcaggaactttcaatcatcctttttgtcaatttcggttcttgattcttaaattaacccctctctgcaaaacaaactcgtttcagggacggtggtggacaaagtggtggaggagctcgagtccagcggttttcagtgtttcacggcattgattggtggtaacggagctcagatttgctattgatcaggtcggaaaaatcatatttggcctctcaccattcttaaacttgctgacgtgtacgtcaagaaggctgcaattagaaattcaaagagtcgattttttcttataaatgatgtgttgaatgtaaaattgctttattattataccatgtgacaaataattgaaaaaagcaaagattgtttagtttttttttttgtattttgaaattgttatgttcatgatggg

SEQ ID NO: 20834 - DNA, 1577 bp, Arabidopsis thaliana landsberg
agctgatctctacctctagaatcctcaaagcatgatgcgcctccaatgactgaaaaaattgcttgctctctatccactgttgtgaaccatagataaaatctaccacaagacctttgtatatattgaagtactcgcaagcatattgaacaacctgaagatgggtcataagctctggtcttactggtaccccaactccttggccgttttctggttccttgaccctaactaactggctacgctctttcgaaatcttcctatttttgtattgctccatgaaccttgtgtagtcaatccctggttcggggtccccaagcattgaatgcttgaacctttcgagactagctccacgcagtgctcctatcctctcaacatacttgatgactccagccacaagcatgagtgatgttggtaccacgagactgttgggtaatgatagcaagaacacgtagagagtaacaatgaactggcacaacaaaccgaacaaactcctgagccagagctcattatcctctagagcaagagctgtgattgtgtcaggaccaccaaggtgcaagagtagaaacattgcccagaacgctaagagctcgtttgtcttgggcgactcgtttggttcaggcttgtctccagaactatctgagatttgtcccacggcataatcagccgaccaattggctagaaggtaagccgaccagatgagaagtcgaaaaagtctcctcggcgttcgttttcgatttggtgagagaagaacaaggattgcctgaaggacaagactgaatatgacaaggccacggatgttccatttgtcccacatatctttcagtggctttggtattgcctctgtcatctttgcttttcgatcaactaactggaactggttcctgtctgtttggcacagtttggtaatttggtttctttggcttgattttaaatcttgtagatgcaaactctgttagaaacgagtcatctcgatcataagttcataaccggtatggcacagaaaaattgattacaagagaccggccgaaaagaaagatttgtttttttatgctgaggagtgagggacccagttttacggtttaattgttttgttttttaagactaccgatataaaaatttgggaaattgcagtgtataaccatcaaaaactttataattcaataactaaccattgagaaaagaagcggtgatatgtggcatattttatatagtatatgcatatttaccctcgctgatatatgtgcctcaaaagtcaattctctacttctcctgaccatccagacttcttcatttcttttatctcgatttgatttccaaatcagctaaataatgtgaatgtactatactattatcgttatggattagcgatgtaatcaatagaactttatttgatttggaattctgacaaacaaatttaacactaaacaaatatttaattaagattatcacgaactatactattattttaactaattactaattacaagattgcatgttttttttcattgatatgagtgaatattctatttgattatagaaaatcataacttatgtcaagactattcaattacccatatcac

SEQ ID NO: 20835 - DNA, 407 bp, Arabidopsis thaliana landsberg
  unsure (1)..(407): unsure at all n locations
attcgcaaacgagagcaaatggatcaatcgtggatacttacgctgacgccatttcttttccagcttaatnnnnnnnnnnnnnnnnnnnnnnnnnnnnnnnnnnnnnnnnnnnnnnnnnnnnnnnatctccggattgttacctttctcttcacgaaatagattgatatccaacatctttcctgctccttctctgtgaatcaaaagcagacacagaaatttggattcgaagaaaacgaagtcggcgnnnnnnnnnnnnnnnnnnnnnnnnnnnnnnnnnnnnnnnnttttgaccatacgacgtcggttctttaaacgggcttataactatcgatatgggccgggtaagcccaacttaatttaatacggcccaaatccactcttaccgtctcttctctgagattctcgag

SEQ ID NO: 20836 - DNA, 1173 bp, Arabidopsis thaliana landsberg
  unsure (1)..(1173): unsure at all n locations
cattattgttttattgcgtcttgctagagtttgatgatgaagctgatgatgtgaagacaaaaggagggttgagatccgggaggttcttggtggaagaagaagtagaggaattaggaaatggaagcttcttgttctttctagaacctccgcctacggggnnnnnnnnnnnnnnnnnnnnnnnnnnnnnnnnnnnnngacaagacttacacaagtacctaggctgtgctaagctgtagttgttgtaataacaaaacttggtgttgcttgagttgcatcttggacagtttcttggttcttgcggcctagtgctcattgtcgtcatcaacttcttctcgtcatccattatcatagttgttgctgttgttgaatccattgttgttgttgttggtggtggttgtgttgtgacgatggtgttataggaattattgttagtactagtcatcatctgatgttggtattgatcatgatgatgatactgatgatggtccatgatgtgagcttcaattacagtaattaatccctgtaataagtatacgtatgatcaaaccattgaattaagcatataaaggcatgctagcaaaagtggatctaataaaaagtagcacatacaaataaataagtaaattaataaaacttattgagagaacataaaaagttgaagtccatgaaacaaaaactatagagaatatctatacatggaactatatatgtataagataagaagaatctagattaatcaataaaagatctgagagagtgggaacaaataatcactttctaacgtatggatcgagcaagagagtaataaaaaggtattaggagttgatctctaaaaagccagacatcttttaaagaaagggaacaaaatttcaaagaaattaaagaccattgaaaagtaaaaacaaaagaaaagaaaagaaaaccctaataaacacaaaaaccaaaaagcaaaagaaatttataagaaaaagaaaagagaaagtaatttgcagaagaaacaaggagataagagaaaaagggaagaagatgaactgacctgatgttcaaagagatgacttagagagagacagagagaagaatattttgaggctaaagtttagaagggtggtgggtttcacttttatgggcatttttagtggggtgttgttttgactatcttttaatctctctttc

SEQ ID NO: 20837 - DNA, 609 bp, Arabidopsis thaliana landsberg
cttcgaaagcggattctacggacaatatcactcacttcccaacgtcaatttggttcatttaaaattcgtaatctattaatctctctcacatattatacaagttttggaactaatataaatatgtaaaggtgtggagagatgtataatgttattgtcataaagtgggttgacttggccaactcactctatttcctcactctagagataatctctcgttttacgtataaaattttcccatttactattgttttatttgaagcactgtaaattgtaggaatgcgagaacgaagaaaaagaacaactcagtccaatatcgatcttagattgcccattccaagatgatgcaattagtcctccatcgcatcacaagggtaaagtcactgattatatatccttatgttcttgaatattcgctaatcgatggtcattacttgttatcacataggttttacgtttacaagtttcattgttgtgagaaaaccctttgacaaagattttatctattcaacgcaaattcaagcatagatatagttgcattaacaattaggtttataaacatatgaactaatcttttataaattgacatttacagaaacagatgagaagaaa

SEQ ID NO: 20838 - DNA, 1140 bp, Arabidopsis thaliana landsberg
gtgacaagtcttgattttgttgaagtcatttacaaataggttccttctttgtgtctattcatgttggtatggattcgttttgtgacgcttatgtttcgagtccatcaatgatgttttcatataaaaaattcttaaaaaatacatatttttaaacttctactatacacagcaagtgacggccatattacaatttacaaataattaatgaataataaaaaacagggattcacccaaagttcctaaccgtagattcttgttgcggtatgtcatgctttaaaggcaagttcaaagatttgacccgaactgtgaagatttccacaacacaaatcaagaataatgacttaagaaccagagaacgtcgagatctctttaataactgaacttcaacttagaaccgaaaatagagtatttgagtgtaaaacagaacacacacacaatggtaacccagttcacaccaacggtgctacgtctgggccgggaactctctcccggaatccactatatcaacctttagagatttacaaagagatttctcaccctctcagccccttacaaagctaactaagattcactctctttcactctctgtttccccaagaacacccaatacaagtttactctcgattaagtgcctctgtgtttcttaacttttctctctctacaatgctcaacttaaatagagcaagagattttaacctagtctccttctggatccttctcggttcctctcctctacacgctcctctgcagtagcctccaagcttgtcttgtagcctgctttggttcaggcgtaacggctcttctgccttcacacacaagacaagagttgtctcctccgtacaccattgctttagcggacaagcaaaacgggtattctttgtcttgtggtcctgcatatccacgtgtatcaagctaagctggcattgtcttctttttcccgcttcaattgttgtgttcttctttactaaatcctaacatatttatgatattggtggttacacaaaactgacaagtctgtcattcctcgtacgagtcttaggtctcgcgtcaagccgagctcaaaacctctatgtatccttctctacccatgatcaattttttttgataaagctgatcaatctgttatagcttagtatgtcg

SEQ ID NO: 20839 - DNA, 421 bp, Arabidopsis thaliana landsberg
ttggatattgcaatcgagtcgggtcagttaaaccgattttaatctagactcggcaaccttaaccggtcggcctgattcggttttcactgtctctctttagtctttcccctctttagggactttccgttaatgtcgccggcgacggaaactcaggaatgtcggatctctgtgatctcgattccgacgaaaaggcagcaaatttgcagccgtgtcagccgcagagagcatccccttcttctcgtaaccgcagcagccgcagaaactccgacaaaaacgccatcgtttcgatacagtaaatagcaggtggattttcaaaagcacctgctttagattcttattttttatgcttcagtgcttgaaactgttcgaagggtagaggaaatttgacgaaaagttgtgtcttttcttgtggtggaagctg

SEQ ID NO: 20840 - DNA, 498 bp, Arabidopsis thaliana landsberg
cacagctgacggatggcatctacccgtaggcctcgtttcttcatattatctgcaacaggcaagccattatgcaaggagcgccaccaaaaatgcttaagttttggagggacgtccacattccaaatgtacttaaaaagaaaatgagtgtgttggctgttcacagtagcgtcttgctcaattcctcttctacgaactgcataatagccagatttgacagagtagctaccatcttttgaataaatccaagttatactatcactgacccccactaaagatggtctaatagcctttattagatttctgtcttccaaagctattaccttatctatcaactcctcattccaccgagtggtacctggtatgaaaagatccttaaccagttttagtgaggtacgaacattttactagcgtttaggggcacgcgttgggttcgatggaagccatttatcttgccatatattttttctctgcccattaccaactacccattttagtcca

SEQ ID NO: 20841 - DNA, 1327 bp, Arabidopsis thaliana landsberg
atatgtgcaacattacaacgatttagtaacacttacatacttaatgtttagttttatttctctgatttgatttgaaaaggctttagagattgatcagaattcttcaaaagaattgtggaaaatagctccttagtatttaccaaaagttttgtcccacaaaaaaaaaaaactcatcaaaattcatgtctttctcatataaaaaacttaaagttggttgtaaaaaactcaaacataagttcttagttaagaccaaaaaagttttcttagatctcacaaaaaagaccaaaagtaattcaactgatgaatttagataaagtaatttgtcttctaaacccaaggcaagtgttcataattgacattaggatgattttacgtcatattttgcttattatgcttcatatgtttaatggcttacttattttataatgaagcaagtagagattaaccagactaaaccaagactacagttcgatagaaatgacatggatgacgtggtatagagcctataatgagtgtcgagcttatacaatgatatgcatttatgtgttagtattttcttcaagttgttatattgtaacattttattttacattgaatcaaagaaagacataagtattaattctgatcaccaatgaccaagtttatagaacactgacatttttacaagttatacacatactatatatatatatatataatttatttcttttagaaaaactttaattacaaattttcttttattttagataataattcacaagacctaatagattcttagattacaataaatctattttagttacaagatttatactaattttttgtgggtgaatatttttataataaatattagtaattaaagtttttcaaaataagtagatatatttacataatttactatattaaatttacccacgtatcgcgtgagactttttctaatatagtataaagtaaaattgattattattgttataacaaggtcattatctaaaacattgcaatattatatgaatcaatgtatcttaatctcacaattgtgctaagtatgaaattgttttttatttgtcatcataaattttattttagaaaccgatgaatttacatacgccagtggaaaaaaaatgaaatatcgtaggaaactagctaagcaagcaaaaaaattttgaaatctctggagagatacctctaaaatttgagacatgtcgtgaaaaaatactatatatattaaaactgctaaaccaaagtttttaccaattaaattttaaacctatcaacttgtttttttttccaagggcataaaattgtttgatgttgacgaaaattcaaa

SEQ ID NO: 20842 - DNA, 778 bp, Arabidopsis thaliana landsberg
ataactataatctggtttttacgttagaatacgcattttacgtagactggtttgctatgctgatattattatagaagctattctaaccaaatcaatatatgtaaactagtatatgctagattgctagataacgataaattaaaggaacacaaggttcccacgagctttcaatttagtatttatgaggtttgtaagagagagcaaggcatgttggtggggttgtgccactcccaatatacatttgaatttcgaaattaatatggctcaactttccaaatattctccctccctatttatttcttctcttgttaagttcctatcatttatttaatatttccttaaaaaaaagtaaatatatgttttatgaacctatgcaaaaaaaaatcatgaaagtgatcatttcggccgctagcaaagtatatgggtaatcaacatatacatctcaaaagtttataatgtgttttgtgtacttattgaaaagtgtattcatatttaaaaaatgcttacaaagtaaatgcatacataatagaattttcctaattttcaatgctttcatatcaatagtagggtcaacttaatatttaggaattcttatcatttttaatagatattgcaaccaattggaaagatatgcttaaagaaataattgactttgcacaaaagattatcatataactactctttcaatcatctgaagtattaactacttttagtttagaaaaaatatggctccaaaaaatttagatatatgttcatggtcctttacaactaaacctta

SEQ ID NO: 20843 - DNA, 834 bp, Arabidopsis thaliana landsberg
gttgtatgttgaaactctatttgaccgatagtttgatagactaattaaagaaaaacgcggcgggatagactaataggcacctattcatgttatatcaactaaatatatatgactgaaaatgcatttttaagaatatcaaaactggtgttctgtaaagttcatgcaccatcagtatttaaaattgtattcatttcgggtatttcctagtaattagtacgtatatcgaaagtaaataaaacggccaaataaacaaacgaaaacatagatagtaagaaactgaaaacaacataattaaggaaacaaaacacaatttctatctatcattaagtcaggataagaaaaaacaagaataagtagtaaagctgactaagacatagctggagtttgtatgtacaatgactcaaaatttaacattctatatacaatggtgtgtttccctttctttgtatttgcaattatcatatatatatatatattagagaaaataagtgaaaaataacatcattccataaaatagaaaatataatcttgtattacttagcttattaatacatttttttacatatcaattaatattttttacatattaattgctatatgaaataacatgaagttaccagtttgcaacggtcgatataacgaactgaagcgtaacattttttaaaaaattgaaatgagttagtgttttttttaatttacttttacacataatgacgtatactataacaattatagatatattttagctaagtagataaattttagattatacaaagccagttggtatgcacacaaaattattattttggaagacaaaatgtataagatcaccat

SEQ ID NO: 20844 - DNA, 1439 bp, Arabidopsis thaliana landsberg
taccagaaagatgttctgttttcttcttgtcctctgaagaagagtataacgtcaacatgcacttcaaagttcaaagttcaaaagaatgattttacttgtaccctcaaaagtcaaaacttggtacgaacctgaatgagttctctgaactttccgtatttggtaatttaattaaaaaggtcggaaaaatattgtctaattaataagtcatcattcaaaacacaacagctaatcaaagtcccaaatttcaatttggttgtctcaaaaaaaaaaaaaaagaacgatttggatgttatgtatgtaatttaagtaaagacataattggtttgattccgtcagatttttcagccagattccgattatgattctatttgtgctactcataatcgtccctaataattgcagtcgtttgttttttaaaataaagaagagagagagagttgggaacaaacttggatctcgaacagtggcattgacggtgtagccacggaggagcaaaagcttgacaatccaagacgctatgtagccggaagctccggtaacgcagaccacctttcctccgcagttcatatctcctgtctgagtctctctgtgtctgaaaataattgttttaaagagaacttccaactcgaatgaggtgacttgagagtgttcattagtaggtggtttggtaaaatagggccgctcaatcagaatatgggccttgtttgaaatgggctcttcagtttttgtaagcagaaacaaggttcacaagttcatgtaatcaaaaataaaacaccccacgtgttaattttttcaacaaatcacgtagcagtaattttttttttttttaatttatacacaaaatgcaaaaaatgaagttcagaatattaattattttctttcagttttatagattttattttaaatgtataaatatttcaatatattgtaaagcctagacatcctcaagacaaaatcataggtaaaaactttaaaactagaaatcaccagaaaaaaaggtttttaagatgattgatgagtaattactactatacataattacacatactaaaattcatttgtgcttttaatttttatgtttatttatatttagtctgttcgtttcgtcgccgcaagtagttgcggctgcggtagacgcagatgaagctgttcatttcactaccgcagatagctgcggcaaaacgctgcggccgacgcaatgttatgcggcgaaaaaaattaaacgctgattaaattcagcgttaaaattaaaaaactgcgattaatatgccaaatgacagaaatacccttaatatatttagaaaacaacgataaaacctaactctaaaacctaacacattcacgatctgaaacttttcttctcttttacacgatttcgatctgaaaaagtaaagctcagcgatttcgaattaaactcggcgattttgaagaaatgggtt

SEQ ID NO: 20845 - DNA, 1158 bp, Arabidopsis thaliana landsberg
  unsure (1)..(1158): unsure at all n locations
atatttttgcctctctccctncnnnncaccctctaaaacccacatgggaagactatccttcacattggaatgaccgagaaaagcgaacttccctttataagatatcatcatctttggctcacaaccacatggtaatctaatcgcttggaacttttcagattttacttcaaaagtcattataaaccgatgagtcgatgacgatcaatctcggctagataatatagaacaccgttgatgcatctgcatggtccataattgtttttgcgattgccacggctagggtgatgcttataattggttctgactgttctccatgattcttgatctgctgaacccaatgttaaaatcctacactcatcagaagctttatcacacggcatggccactactttgtgcgtccgttcgagtggatcataccctaaaaagactgttaaactctcccagctcttgtccggtttgcgtaaaggtttgaactttctcatagtagggttccaaactataggctttgtacctctctggaagcagatcaaaccgtggaccgactcggttttaatggtgaagcagctatgttttggatagggtgtttggtaactatcaagaatctgagaagaagtatgagaaacggactcgttcggtctccgattaggtttaggaaccgtgacaacaaagaacctgtcagcttctttgaagaagaacaaaagattaggtcgagtttcgaacgagttggtgaaatatggagcggtggtgattgatgaccaatgcttcgccacacaactaaaccttacgacagacttcgcaggaagccttaagaatatatctgtggctatatcgagaggtatggacaacgacgatgatgatttacttcttttcctcgccatattttcgttcttctcttcttcttcttgtggcttcatctttttcgtcgaaaccctaattcgtttcacgatttcgtttctctctgtataaggatctgatctctcgacttcttttgcctcccctaaatatatatatataaggatttttagttcttgaaatctttggaacggtctattccttgatatgataggaaaataattatttactattttaaatatttcaaagttatataattagttactaatttaaaaacaaggaaaagaattatttactattttaaat

SEQ ID NO: 20846 - DNA, 876 bp, Arabidopsis thaliana landsberg
caaaccataatttaagacttatatcacttacgcataaaaagtgtttgatatcattcatgtcgacttccgatccctcttcttgaataagatcgatcactgaatccaacaaatcgcctctcagtgcatcgactctaggtccaatctgcgatgatctttccgggatccgagcatcgatgaggccttgaaaaacctgaaacaacctctccgaacacatgaccttcatctctttccggataccctgtagatcaagaaactcaagagacggaaaataatttgcgaggttcggtttccccattgttttcatcatacgagacaaggagtcttggagctccgtggaggctctcggatcgtaactacctaagtcgatcgaaaacacaacgtttgagtctacattaagcgacgtgatgaagcacgcacgtacgagcaatgtcgacggagaagcctcgttcgcctctttggataatgaaatgttacaagttctttcgctttcttcgaccttacggacttcgtggctttgtgatgctcccgtgagaaaagttttgtcgccagtatccataacctaattggaacattgtatttatatatatagatagataaccatatttaattaatcacattaacttataatttacctccaacgagacgacgtcgaaggtagccatgctacggagacttcgtggtggccgaaggctcgaaccgtcttgctaaaggtttgcccggataagacatggtcaagcgtttaaagaacctctcttgctgcatctggtgaagaaatgaccactttggttaaacttccaagcctaagactcatgactggtccataaactctcgagaaatcagcaagtgaacggtgaggagctcttccgatgatctgga

SEQ ID NO: 20847 - DNA, 536 bp, Arabidopsis thaliana landsberg
  unsure (1)..(536): unsure at all n locations
tttcagatcccgattcatccacacgactaggagaaaatgactttcacctgcccctatggtacatttgcttatcggagaatgccctttggtctttgtaatgctccaacaacatttcagataggtatgatgtctatcttcacaaacatgattgaggatatcatggaggtcttcatggatgagttttttcagtttatggatcatcgtttgaggatagtttagagaatctctgcaaagtgttagcaagatgtgaggagaaacatctggttttcaattgggagaaatgtcactttatggtgcaggatgggatagttcttggtcacaagatttctgagcatggtatagaagtcgatagagctaagatcgaagttatgacaagtcttcaagcacccgataatgtntaaagcagttaggagtttctttggacatgcttgtttctatagaagattcatcaaagacttcagcaaaatcgcaagaccactgactgctctactctgtaaagaagtcaaaattcgagtttacaaaagagtgtcatgatg

SEQ ID NO: 20848 - DNA, 526 bp, Arabidopsis thaliana landsberg
cttagttttcatatgttttagacacaaaattaattaatttataagaaaaaaaaactaaaatataaactgatgcaaaaagaaaaaaaaaacttcatctctattttgtttttctttttgtttttatagaccctatcggctgacctcagtaggaatgcaccgaagtgttaaagagtggacttcttcaaatccatgtagaattgggccaccacactgcctcattcgagtttagaatgttttccaactaatgctacaggatagtcaggctgtctggcaaacttcccaaacaaatgtgtttttgttttcagggagaatcgaacttgggtctgagagtttcacccttcaccaaagcttcctctgctactagaccacagaggcttgggcttcatatccattttactaatttagttttcaaattgcaaatcgttttgccattcaaaaatataggttaattattgactttcaaagtcttaccatttataaatttgaatcattctcaaagtaacatcataaaacgcagaacaattgc

SEQ ID NO: 20849 - DNA, 613 bp, Arabidopsis thaliana landsberg
gcttttcacaatgacccttgtccagccattcgctgaggaggctctaagacttgcacacctaaccacatcatactaatatgtttgggggtatcgacaaatagtacagcctgtttgatatctttcctgcctacaaagcagaaaggaattagaaatgtgcttcgtgccattggtacaagaaataagcatagagagagtgaaagaaaattacctctttctctttgagcttcttgtttagttccgcaaaatcctcttccgagttatactgacccgaatggtaaaagcatcttttcaagaactgctccatcttatccccacatttttccctgttgattccaacttttgttcgtataaccaaagcatacactttaactaaaacatacactaaaaacgtatagcagaatatacctttgatcaatccggcaagttaaagtactactaatcatgtcacgaagctcctcatgagtgagtttagtccgagcctaaccaaaaacagaaaagtcctgaggaagacaaccctcataaaagagagcaaacaatgccggaaatatcttctttcttggctaaaatccctgacgctccaacgactgtaatactaagggtagactctcctttt

SEQ ID NO: 20850 - DNA, 525 bp, Arabidopsis thaliana landsberg
aaatgctaagaaacatccctgagttgagcgagtcttagcttgcattttccatttcgtcccaaacaaataataagtaaaaaccaagcggaacataagaatgaaaaataatgttttcaagactcatattttagccttgtcgtctcggtcgatctttggttctccataccatttttctatatctcaatacaaagctaaacagtaaagaaaatttataaatagttaaatactcatatgtttctaattgattattattttggaaaaaagttgatatatttacgtttttcacattttattaacaaaacaaatgttttgatataattttcatatcaaatatttttaatgattatgaattaatatgcaacgtgacttaaagacagtttcattggaatcgggcaacgaggcaggtcttgtcattattcagaattcccaataaaagatcaacaattcaaaacctataaagatcaacaattcggaaattttttaacggccctatcacttttgaattctaggtaataccgttatctc

SEQ ID NO: 20851 - DNA, 1037 bp, Arabidopsis thaliana landsberg
  unsure (1)..(1037): unsure at all n locations
tcgactagtccgttaagattgtctttatgtggatgctttgtgtagtgtcttaacattgtggtgagggatcggcgtagagttcttcactgccagtaatgcattagaaggtttacgacaaggttctaaacttgtcgtataccaaacaaacttaattctcgagggttagagtcgtttacgtctcttggaaacgcaagaattttacaatctttctttcatggcaggatcttgaagacaaaactcaggattatctttcacacaaggagttactagaaatagttcaaaggttaagatcctttcccctcttcgtctgataaatatatatatatatatatatatatatatatactctttttattttgttgaatatatatgcagcaagattgaagaagcaaaaggggataatgtaagtatagaatctctaatttccatggaagagcagctcaagagtgctctgtctgtaattagagctaggaaggtatatatgctgctactaagtgattgcttctatctaattcgttttccagtacagatttcggatcttgcctgactttggaccatgtttccaatttgactcaatcctcaatgtcttgttgcagacagagttattgatggagcttgtgaagaaccttcaggataaggtcagtaccttagtttttatccnnnnnnnnnnnnnnnnnnnnnnnnnnnnnnaatcctcttaagctaggagtatgcagaacactagaccaagtttagctctctagatatgtctttttttggtcttgtcttagttcttgatatataatttttggtttaatttaaatgaaactgaaattaaaaaggttttaaagttttgatcaaattcaagtttctccctggtgaattaccgaattgtgacgaggatttttagaacttgttggaactaatatacctttatgacgtttgtttgtcctcaaataggagaagttgctgaaagacaagaacaggttctagctagcgaggtaacagaggcacaatctcttaagcgtaaagaaactaatttaatcattttacacgtc

SEQ ID NO: 20852 - DNA, 580 bp, Arabidopsis thaliana landsberg
gttttttatctggtttggttttctgtaaaaatgtattttttctgtactctaaaatataccaatcaattttttactgtagggtttaaaaaaatatatatatatcagaccaaagaaaaatttaaaaacaaaataattaagagtcttatacaacaagttaggttacaggagaaaaggagaaagagggttaggttaaatagagaaacactttctcaaaagagttgtgaagagtgaggtagaactatgatcaggctttcctttgagaaagtacgcgtggtcggtgctgcagtaaagatagctctccttaccagttgaattcttggtaaggacattggagaaacctaagtactccttctcttgagacctcttcaagcagatgttagccatgtacctgaagttctctctgttctggaataaaaggttggtttatgtatacctcaatcggcatccactgagaaaaccgacaacaattgagtgttaaaagatctgcagtaactaaaaccctccttggatttgtaaaataagatcaatgtgtgactatatctttataccaaactcaaaaatatgccaagatcacataaaa

SEQ ID NO: 20853 - DNA, 2314 bp, Arabidopsis thaliana landsberg
tcattgacatacaataatcattaaaggcttatgaagtgaactcaccgtcgttatcaagcctaactttctttattacataatcatggatttatgctttccacctgattatttgggaaataaattttgcgaaagtcgaattttgtattgtcaatagacacacatgtgaccatctactagatgcgtcaatcattaccataaagtaacgaaatggcccacacgaatggtggataaggccacctatgtcaccatgtattctatttaagaataatggcgattcattcccaattttaggtggcgatggccgaattgtgagttttccttgagaacatgcatcacataaaaactcatgagattgcaaatcatatgatttttcagtggatggccactagaattttgcacaatttttcgcatcatgactgaaccagaatgtccaagtctttcacgccaaatcttaaatgtacttatgatgtgaacagatttatttttgtgcaatataatctaggggatagcattggcaattcttctaatatatattgcctctcggattttatgcaaagatattcaatgccatctttattcatagtctctatatgatatccattacttcgaatatctttgaaacttatcaagtttctatgagacttaggggaatataatgcatcatttactttaaaatgagttccccttggcattgtaaaattggcttcgccaaagcctaatattatctttacatggccatatatagtactcacgtttctagcggaataatttatttcgatagaggcaaagtattttttatctttaaagattgtatgcgtagaagcactgtccgccagacatatatcttcattctcaatctcgtattttcacattttttctaagataaaatattttattcattaaaatcttgacatatgctattcgtatgtcataatatattacaataaaaacattattctagaaaacaaaagcatctataatgcttttcatacatagcatgattatatatatagctataatatgttaattttctcattgtcataatcaatcgagaaaatctgccatatcaagatgattatcatcatcttgtcatttaaaggacggttccaactcatcacagatgagattaatttcaacatccctttcttttgccttttgtgaggcttgatacagatcggctaaatattttggtatacgacacgtttggtaccagtgtcttttcatgccgcatatgtggcaagtgctttcaacatcccttttcttaagatggctaacgtcattcacatgaagatttttgttggtttttactgtgttaaaattattgggatgaaaaaactctttcttttcctcggccacgaccacgacctctccgccgaccacgaccacggcctcgccaaagtcctggtccttgccaattatcatcaccggatgtaacaacattcacttttaaaagtggagctgatcgaggtgggcgagataaatgattaatcatcatgagttcattattttgcttagcaaccaaaatgacttgcatcaactcgaaataatgagtgtatcctttggcccgatattgttgttgaaggagtacattttcaggatgaaaggtggaaagcgttttttcaatcatatcataatcgctcactttttcaccacataatatcatcctggaggtgattccgaacatgggggacttataatcaccaacacttttgtaatccaaaaaccggagatttagccattcatgtgtggcttttggcaaaatcacatatttacgatgatcgaaacgatctttacgtgattgccatagatccacaagatcttctctcgtgatgtattcatttttaaattgtcgtggagatggtggcgtagaaataccatggctttagctttgctctcatttaatatcgtttcagatgcatttatggtgctaagaagcccatttgatctaagatgcatcttaatatctgatgcccatgacatataattttgtttgatacatcaagggcaacgatatcgagattagctagatttgacatgattatctatatagataaataatcattcaattaatgagccatttatggcatttcgaataggcatagcctaccattcgattaaggaggaggtataacctcatactccaaaaatagcaagcatataatttcttataaatgaattaaaatgaatttaacataattcaaatattacctcaaaagatgcttgaacaaatagacgatcggtcggttagacaatcacccggagaaacgctcttactgataacctgttataaaatatttaaagaagagtgtaattt

SEQ ID NO: 20854 - DNA, 464 bp, Arabidopsis thaliana landsberg
ctaaaccagctggaagactagctaacttattaggtgagctgaccaacagctcgactgagctcggtgagctgatcaagtactgacccagctgggtggtccggtcatctgacactcgagttggttgactttggtagctcacgggtgaagaggtgtctcggccaaaaggtgtaaggtcgagcgggtaccaacgaacggttgcatcaccaaaggatacaaggaacggatgtgaccttttgaaagaatgcaaggaacggatgtgacctttcggaagggtgccaggaagggatgtgatgctttgagaagcatccattcgccccctatataagggaggacgcccaaggcctttggaatcatctcacaacattcaaaacaccacaaaacattcttaaaagagtcccaacacattctgaagttgttggtcgaaagggggtgcggttcggcgagtttaacttgaccgaactgat

SEQ ID NO: 20855 - DNA, 414 bp, Arabidopsis thaliana landsberg
ctcataaaaatgcattaagtttagttttcctttttcttcattatttgtgcatctttgttctaacagttggtttaacttgtacatacttttttgaatttaaactttgaacaaaaagtcttataccaaatgaaaaacaaacatttttcttttgacatatcgtacataatatacaaagtaacatttggatatgagtaattgtatctcatagagtcatagtcaacatgctattctctctatccaatttaatccatattctcaatcacgtcttgaataaacttttccaaagccgccttcgaagatccaccgtccattaacgccaagtggcacttttccgccatctctttcacgttgttcctaacgtcactgtcttgctccatcacacgcctaatggctctctctatatccgccgcggta

SEQ ID NO: 20856 - DNA, 951 bp, Arabidopsis thaliana landsberg
  unsure (1)..(951): unsure at all n locations
accctagaacatccatggtcactgattaatgccttcgaggctgtttcatttgtaaacaatatacgtgattagttatagggcaccgtgtttaacatcataaaggaatcggttataacctattccataattttcactaacctttaaaagtggaggctcttcagaaccggagaactgcagtgattggctcgtagttataagtttcaaaccaataagtcgataacactttctcagaaaggactgacacgcactccctctagcaacacatgttatgatcatatcactacaaccaaccaaaaaccaaattatcatactacaaaatgcattatgttcctaacttacagactatagcaatattcgtattacttgagaacttacagattatctttgattgtaaatgtcacatatctggcctcaaagtctgtttccccttcacgacagacatatggaaatcttgacacagttgagacacttgatatgactccaatagcatctaataataacagtataacaatcaaatattataaatcttagtactaaggaaataaaatagagagaaagcataaactatatagataagtcttagattaccagttacataatccttatattcagattcgacttcatcagcatggatgaattggagagaagtttcatcagaatctatcacttacaggccacattttggtgtgctacataaactcgatttcataaacataatctgagtacttaatattgaattactctcttcaatcggaagtcctgaatgtaataccactttccttcaaataaggtaggcttgaaattagtataaataatncacgncccaaaggccaactccttagcccgttcgatttcttatttccccctgaaataaaaatacaaaaatatcaagttctttggaatacaatagaaaccaagaacaaaaaatagaaacaaaaatttacataaaaa

SEQ ID NO: 20857 - DNA, 631 bp, Arabidopsis thaliana landsberg
ctttactcatgccctgaagcgacaatctgtctatggtgttgcatgtttttgaaacgaaaatctgtctttcaaccctttggttaatatctcctctggctgaagaatatgaaaccttagattggaaaaccatctatgaatttttgtctttgaaggttttatcactaccgcatctattatctctatccgtgaatatactgagcttatcccggagtgtcaatttagacacatctctgccggacgttatcttcatcgactatccactgaagcatcttgacaccacttcaatctagcggccaaaactaggagttgtgatttccctgtttttgcttaagctttttcgaaccatagctaactgttccccgacacacatccagctagcttccgatctagaatttcattcttacctgacttcaagggtcctcgccatccaagcttccccgtcatggaaagaaccttggctctggttccatttgtcgtttgcgccggcgaatagtgagactaagtacctttagtaatcgtcacaaaatcttttgatagtgactagttctaaaatacctgaattgttcgtggaagtctctttgacacaccaagaactcgcttgtggcatgttgctagctagcttctgtctctg

SEQ ID NO: 20858 - DNA, 760 bp, Arabidopsis thaliana landsberg
agaactaagagagtgaaacatacaacacaaattgtcccaccaagaacactacctcctgatactctctcatctttggacttgtttccctcactgtacattttcaatatctggagaactgagttaactacatgactaccatagccctgaaaccttgcctgcacatggacaattttgttacttaaaccgcaagttaacatatactaaacatcaaaatgttgtttccattagtttaccatttcagcaatctatacctcaagattctccataaaattggcggaacgttttttttgtttttattagactcagctggagggatggttctcttagcctttggaatgaagaaggctaaatgatccacaggacgggtggttctcttatcctctggatggatggttttcttcgcttcagaaggcatgattctgtttctattagcctctcgagggatagttctcttagcctctcgagggaaggttttcttcgacttgggagggatggttctgttagccttgggagaaatggttctgctagacttgggaggtgtggttgcctttggagggatggttctactagcctcggaggagatggatctggcagcctcttcgtattgcttagacttgggaaagaagacacttaaaacaagaagcagcctcgggtgccctttaatgatttcagccatccttgcactgccattagcttcttcgattctacaaaacatcgtaaaaaaattcacaaggtgtgtgtttgtcacagttgaaaaaac

SEQ ID NO: 20859 - DNA, 3072 bp, Arabidopsis thaliana landsberg
aaataacttatccgaacacgaacccgatttttagaattatctgaatagggcctacactttactacccaaaaaaacccaaactgaatccgaagcaaatctattacccgcgggtatccgaatataaataatacctaaaatattagttatatatatatatttgtaatacctcaaacacccaaaattaaattataaatcccagtatactagatttttttagtgatgcatatacatttggattacacgaccatgcaagttaacattgtctggatcataattctagtaaaaaatataaaacgaaaagagaataattagactattgcatgttaaaaactcaaaaagaaaaaagattcaaactttttttatttaatactataaattatgcagaaagtggcatattaagatactagtctgttgaccacattctgacaacaagctagctgatatgtcgggacggctgcaattccttttttattagtggagaaaaaaaaacaaaaaaaaaacccgaaagagaaagaaaaaaagatagagatggagaatcacacgaccatgaaagtttcatctcttaattgtatcgatctagccaacgacgatcttaatcattctgttgtttccctcaaacaggtttgtctcccatctcagtttttcgattttgcatgttgttgttttcttttgaaaaatcaattttgcatgttatgaatcttgatcattaaaagaaattttttttgattcaatgatgatatgggtaattatggcttcaggcatgtttggattgtggatttttctatgtgatcaatcatgggataagcgaagagttcatggacgatgttttcgagcagagcaagaagctttttgctcttcctttagaagaaaagatgaaagtgttgagaaacgaaaagcatcgaggctatacacctgttcttgatgaacttttagatcccaagaatcaaatcaatggtttgtgtcacctcttgcttaatttcaaaggtgtttttgattgattgatattgaattaatcttttttttttttggggtttaggggatcacaaagagggttattacattggaattgaagttcctaaagatgatcctcattgggataagccattctatggtcctaacccttggcctgatgctggttagtactttttttttttgtgtgttgattttgttaatagcactttctttgaataaaccttgatgtttttggttagatgttttacctggttggcgagaaacaatggagaaatatcatcaagaagcattgtgagtctcatctttggtttggccttgtttatttcaataatttatctgtgtgttgaaaatctgaaaaaagtataactatatgaacaaattatttcaccaaacttttcgctttcaatatgatgagacgtttttgtatggtcaggagggtttctatggctattgcaagacttttggcgttagcacttgacttggatgtgggatactttgataggacggagatgcttggaaaacctattgcaactatgcgactgttgcggtatcaaggtaatttatggtcttatgaagatcatagagctttataaatccttaagctttgtatgttcatcccattggcttcttttgatgactttagggatttctgatccttcgaaaggaatatatgcatgtggagcacattctgacttcggaatgatgactctgttagccactgatggtgtaatgggactccaggttttaagcagctcagatttgcttatttacatacgttttgacatgacggggttagttatgtgacgtttgataaaacttgatggtagatatgcaaagataagaacgcggtgccgcagaagtgggaatatgtaccgccgataaaagggtataacgaacaacctttcttatcgttcattctgcatcatctattaaaccttgaattatatactgactagcatctgatacatattagtaatttgtcaattggttcgatttatttatattctgtctacagagcatttatcgtgaatcttggcgatatgctggaacgttggagcaatggcttttttaagtaatacttctaagttctaactaacaagtaatagtgatttgaaagtaagtttttctagctaacaattttctcacatacgtatgaccttacagatccacgttgcatcgggttcttggaaacggtcaggaacgatattctgtaaggcccttactaacgcacatatgtgtcttatctttacaatcttgcagaacaattaggaagatgtttttagtcatatactcaatgcttgcttataatattctcagcagtttactttgtgtttgacatgttcagaatctggtctagcaagatatacgacatctaatgttttctttatgcagattccattctttgtggaaccaaatcatgactgtctcgtggagtgtctcccaacctgcaagtcggaaagcgagcttcctaagtaagactttaccttgtgttatactgagaccttttaagaggtaacagtttcttaaaaatgtttatgcatgtatagatatccaccgatcaaatgttcgacatacctcacccagcgttacgaggaaacacatgcaaatttaagcatctaccaccaacaaacatgaatgctctttttgagatcaacactggagggagtctacaaaagtaaatttgatgtaagttcgttgttactctaggggtaagctcaaagcaaagtataaaagatattgtaaggtaagtgaagtttacggtcacaccctcccttacttattgggagggatacacatacttatgtcttgtttcaatctatgtatctgtaccaattgacaagtctctttaacgtttagaatcgacacgggctagacttgttacattacgagtttacgagaagtttttcaaatgaaaattcacccacaacatatacacatcacgttggtggagatcattagcccaaaatgcgttaaagagttcaccataagtgatacccaaattccgtatacaagcaaaacgttgttcttttcatcttttgtacaacaaaccatgtcactatcatatacatgcacagacacaatcattgaatctgttttgat

SEQ ID NO: 20860 - DNA, 482 bp, Arabidopsis thaliana landsberg
tattactagaaactctgtcttttaatacagagatcgggcctctgtattgagtgaaattgagccacataatttcaaaatccaattcagtgacactcaaacaacagtactggagctcagacctcggagtgacttgcctcagcttgaactaacttgtaagcctcgagtgagtcgagcgacatcgcgagttatgccgtattaattaacctataaaataacgacaactatatgatattttttaatagatttttgttaagtttagtcattatttaataatgaatacatggcaatctataattcaaattgatttgaatgttaaatgataattctatacttcgcacccgcgccggttttcgggccttacgattagggctaggcaaaaaaacccgtaacccgaaacccgaacccgaaatacccgaaacccgaattttgttcgggaatttcgggtagcaacttgcaaaacccgaatttatttcgggtaattc

SEQ ID NO: 20861 - DNA, 354 bp, Arabidopsis thaliana landsberg
  unsure (1)..(354): unsure at all n locations
tctgcttgggaataaaacagttacacattagtatatcttgataaaaggttaatttgtactaggataaatatagtggactacataccagggttgaaacccatttatgaggtttggcaagatcgacgaggaatgagttggaaataaggaatccacacttggtaacatgttcactatgatgtaaaaaagtagcattagtgaagaacttgatgatgaatgttgtggaaataggaaaaatgaatgctaaaccatacatatttggagagctggagagggttttgacaaactgtgaataattggtttttttaagtgttggtaaaaggtggttgtgtnttaggtattagttaggagagaatt

SEQ ID NO: 20862 - DNA, 1262 bp, Arabidopsis thaliana landsberg
ctaagaggataatcgttttaactactgtggcagcgcagttctttgtgaaaatccagtcgttcgtctgattagtcaggtgtcgatcgaccctttgaatggtatcggtcgacaccctcgagcatggtcgaatctcattctcaactgtaacggaggtgtcgattgacactttgaatgttttttatctatcgacaatgcagcttgattcatcaactcaacaattttgtagtcgtctttcttagttgtatcaatcatgtatatattttcttcaagcaagaagtcattgatgggaacatcatcttcaatcctaattcgtgacaaatgatctgcaacaccattctcaactcttttcttatctcgcacctcgatgccaaattcctgaagaagctaaatccatcttagtagccttggctgagcatccttcttttgcatcaaataattcatggctacatgatttgtatgcaaaatcaccttagatccaacaagataagatctgaatttttcaaaagcgaacactacaactaacaactctttctctactgttgcatagttcatctgagcgtaatcaagtgtcctactggcataatagatgtcgtggactttcttatccttcctctgccgtagaacagctccaactgcaaaatcactcgcatcacacatttcttcgaaaggcaaatcccagtatggtggttgtactatcggtgcgctgatcaaagcttgttttatctgctggaagccatcatgacaatcttgtttaaactcgaactggacttccttgtagagtagagctgtcaatggtctggggattttgctaaaatctttgatgaaaatcgtctgtagaaccagcatgaccaaggaaactccttactactttaacataatcaggcgcttaaagacttgtcataacctcaatcttacctatatcaacttctataccatgctcagaaatcttgtgtccgagaactatcccatcctgcaccataaagtgacatttctcccaatttaaaactagatgtttctcctcacatcttgctaacactctgcaacgattcgctaagcaatcctcaaatgatgatccataaactgaaaaatcatccatgaaaacttccatgatatcctcaatcatgtttgtgaagatagacatcatacctatctgaaatgttgcaggagcattacaaagaccgaatgacattccttgataagcaaatgtaccataagggcaagtgaaagtcgttttctcctggtcatctggatgaatcgggatc

SEQ ID NO: 20863 - DNA, 929 bp, Arabidopsis thaliana landsberg
gttttactctgttcctgagtatctcgcccgatgtgggatctagcaaatcaattagcaagcttttgatggattaatatgggctttaactgatacttatagcccatttcaattaagccatgacggagccagattgaaaggaatgaatccttagtttttgctgttattacataaaactgttacatattatagtcgttgattaagcatgtttctaatacaatgtaaacagtcaacgtatttttattttttttccttttattttctcttgaatttattgtttaaaacctatatacaacttgagtgagtcaatttgtaacagtgtcaatttgtaacagtgtaacacttccatgtttttattcaaagtttgtcaaaacggatgactcaagtgtaactctcgtaatgaattgagctactctataaattgtttatttcttttgaataccaaaaccatcccagtcaagcaatttcactctatctcctctgactcaaaagaaaaataaggaaacaatatatacgtgcaatggaaggtaggatcgaagctcttctctccactattctagttgtgacgactctgtgtgcgactactctattgacaccaggacaagccgagggactcgtgacaccgcaattttcttccattcctggttctccaattgttctcacaaaatgttggtcatcactcctcaacattcaaggttgcaaaatcgaaatctttaaatctgttttaaccggtaagtttgaaaacgttggatccacatgctgcaaggcgtttacagaggtggatgcaaagtgttggccaaaaatgtttccgctgaacccattattccctcctctcctcaaggatggttgctttcgcatcatctctggcgcaccggcacacacgacaccttaattccctgtcatccctggttcttcgatcgatctcacaaatg

SEQ ID NO: 20864 - DNA, 600 bp, Arabidopsis thaliana landsberg
tcatacaaacgggcaaaggcttaagaaatacttatcagatcaaatccttccgttggttacgtcgattcatctccaggaacttcatgatgattaaaggagtaaaggagtcaagctaatgattttaaataagctcacataggaagaagtcccatgattatccctgtaaataaatttttcctttcttgttatttttgatttgttttaattgtgtttttggttctcaggaacaaaagaacaacgtggagatagagtaaaaattcaaaacttttaccctaaagaaggcctggagatcgagtgtatagcccaatggagttgaattcgagtacatcagtcgagtacatcagtcgagtacttcagtcgagtacatgtgatgtttaaaacccaaaaaaaaaaaaaaagttttaaatcatgattatactcgaccaacaggagctacgaagacttgcagggattttgtcaggttacagaagatttcctgaagtttcaaagacaagtcaacagagtgtggaccacgcgctttctccctgaagataagatggagagagaatctcaaactcaatctccaccactccttttgaaatcgcccacatttttttactc

SEQ ID NO: 20865 - DNA, 536 bp, Arabidopsis thaliana landsberg
  unsure (1)..(536): unsure at all n locations
acatttggcatatgagactaggacatccaaaccaagaaattcttcagtatctgcacaagaataaatctgttaacatcaacaaaannnnnnnnnnnnnnnnnnnnnnntgtcagtttggtaaaagcacaagattacctttttcaagctcttgttctactacttcaaggcctcttcaaaagatacattgtgatctatggggtcctgcaccagtaaagtcagtacaaggcttcagtttttatgttatctttgtagacaactactccagattctgttggctttaccctctaaagaataaatcagattttctaccaatatttcttaagtttcaagcattagtagaaaatcagtttcaaagcaaaattggaagttttcaatgtgatggagaggaagaattcacaagtctcacctttgtaaaccatctgcaacaacatggaatccaaaaactaatctcctgtccacatacaccacnnacagatggattggcagaaagaaagcacagacaccttatttgattggggtggctatgaatgtgtcac

SEQ ID NO: 20866 - DNA, 1711 bp, Arabidopsis thaliana landsberg
agtttccttttctttattcgaagaaccttttgctcatatatactcaagtggaaggctaatcaatatccaacatcatcattcacttctcttctcttcgaaacaataccaaaaaaagaaaaaaactttttctttatgcaattctcatacagagaggctcgccgataatccatgtagactttgaataagagagaaagagccgatgatacataaaccgaagaagccaaaaacatcttgggagaaaaaggatagcttttttgaaaccatggactgatgagagacatcgatcgtttcgaagaaggaggcatatatactccaacaatctcgcatcctcctctgcttcttcttcttctaggtatgccggcttcttctatctttattgctgctgctacttgttctgcggtttatatttatataactttagggttcagaatatgtagttatggggtatgcgaatatagataagcaaagacagagattgccagtagtacaagtgtacaagttacacaactgagattctctttttcgtggagatcacgctaccaccgtcgtcctcaggttttttctctcttctttgtccttggtttatttgtttgctttttgcttttctaatttcaggcatcttagaccaaagacagagattgccagtagtactagtgcagtctttttaatatgttgtagtacgtacccgaaagaagatggatgggctcaatgcctcaatgaggccgagttttttgcttgtaccagacgaacgttgtgaaacggtaacatttttggaccgtctgagttaattctcttactcggttttctttctttcttttttcttacaaatgccaaacacactctgttcttatcatcttaattatttctgttctccgacttgtgttctcttaaccgacttgtctgtctctcacttgtgttctcactcagacaacaataaaggcatcatcttacaggtaaaaaaatctatagtttgtttaccattaaaagatttttgttagtctctgacaattatgtgcctataattatatcaagctaatgttgacttcaatgatgtgagattaatttaatgtgcggttgtgttatttttatgtataaaacaaaaagttatatgttagggtataaaacaatgatgtataaaacaaaaaagtagaatgggttatctaattgttgtgaaaaatcgaaagagagaatatatattttttttttctttttgaatttgtaattaagtaccgtacttattgaagatttatttttattaattttgcagagggtgcacggcgtatatgttatatgcaatgtatattttttttttatgaaggatgtatagatgtataaatagggtgtgaatgtgtctcatgcataaatccataatagatgtatgatagggtgtgaatgtgttcatacatggcacgaacgtgtctcatatgcataatagattgttgattgggtgtgaatgtgtctcatgcatggcacgaatgtcatactcatatgcataatagatgtacgtatagggtgtgaatgtgtgtgcatagattacgtgtgaccgagcgtagggtagtagcaaaaacataaaacacaaaataccaagcgctcgctagttgaaacactcaaaaattcaaaaaatgcggttttaatagatagacaaaaaacacaaaaatatcaaactcaaaataaaaatcactagacacaaaccaaacactcgtactgaggc

SEQ ID NO: 20867 - DNA, 1055 bp, Arabidopsis thaliana landsberg
cgtgcatccgttcatgcgtaggtatttgagctgtgagaaattctcgatccaccaaggaacttcttcaatccctgttctgtctagaaagagatatgatatattggttgagaatcttgaggtactaggaaaacttcttaaccgtgagcatccactaagatccagggcaccgatagactcaaagttgatgtctgttggaagagtctccagatttatgcagtttgaaatttccaaatacattagtttatggaacttcttaaatgaaggaggaagttccaccaaacttgggatatccgacagaaacaacacctttaaagaggggcaaaccatatccatcagttgagtaagcggctgaaccaaaaaacaaaaacaaaacaccagtttagatgaattaactctcctttccccaagtatagttctattttgggttttaagttgaaaaattactataagttatgtctaaaatgtcattgttttgctttgtaggaaaagacagtattacatgtatgtcgttaataaaaactatttattttcgaaaaaatcaaaatttatttacgatactgtcactccattcttttgctcgattttgttaaatttgacctgttggcgacagatatattttggaccacaaattttgttcgatagacttttttgtaccaccaactttttttgatatagtttgaaagatttatattatctcgcagatttatatttcacgaaggatttgttgtatgtagtcttcccagatttttctaaaactttaatatcttgaatggttgtgtaacatatttgtcttaggtttgttttgcaattgcagatttttttattgtattgccaactcatttttttatttaaacaaaaaaattatgtttaataacaaaaattttaaccaaaaagtgatatctaatgaagacatatttgttttgtgtaatcatagactttataaacttgtcaataaattcttgcattttacggcatatttttgtaaaaataaaaaattactaaacagtcaaaaagtgataacagatttgtttttagttatgacatttgtgttttcg

SEQ ID NO: 20868 - DNA, 4849 bp, Arabidopsis thaliana landsberg
tggtagacgatctaaactttaatcacaaaatatctggaacgaacaaagaacctttgatgttttaaccaatatgtggtgtgaacaaatgcagtagtaatagtaaaaaattagttctccattgtttgtggtccagccttgcaagccgcaataatggattgctctggacaacaacaatgtatttcatcgtgaaataccagaattaggaaaaattgtatttatgttttctgatacatagaaacatttagatatttatgataatatgactgcagtatgagttttctattattattttgaaatctctgatggtatattttacccggctttgtaatttctatcgtccagatattttggagttgcaaaaggtagcctttttaccagctgcaaatgggacacgcttggtgggagcaagctccctttttgttcgcctaccaatcaacctatcaccttttgcatttgaacttcctagtctctatctaccgtttctgaatatccttaaagatttgggacttaacgatgtgctttcagttgctgctgcaaaggatatcctctccaaattacaaaaactatgtggttatcggcgtttgaacccgaatgagcttcgcgctgtgatggaaattcttcattttctctgcgatgaaataaatacgacaaagccacctgaaataaatactatcaaatcagatgtgattgtcccagacgatggctgcaggcttgttcatgcactatcttgtgtgtatgttgattcctttgggtcacgctatgtgagatacatagacactgcaaggttaagacttgttcatccgcttcttccggagaggatctgtctagatttgggtgtgagaaagctttctgatgttgtcattgaggtatgcatggcatcagtttcttctgatcatgtctttctttttgttatatttgttatgtgtgaaacaatctcaaaatcattgcttctttacctaggaacttgaaaacgctgaacatattgaaaccttagacaacatagggtcaatatcactcaaggctgtcagaaggaagttgcagagcgagacgtttcaagctgctttatggacggtgagccgtcaggccaccaccgtggatgacttatcttttgaggttatgcaacattctctacaatctgcggcagagaaaattggttttgtcagaaatatatatactcgatttcttctcctgccaaattccgtagacgttaccttcgtggctaaggaatccatgattcctgaatgggagaatgaatcgcatcatcgaacaatgtattttatcaatcgtcacagaacgtctatcctagtttctgaaccgccgggatacatttctttcctggatgtcatggcaacagtggtgagtgaggttttaggctttccaacttccctgcccataggatcattattttcatgtcctgaaggatctgaaactgaaattaccgcttacctgagactatgctcttattctcttactaacaccggcacagctgatagttctgttggccaagagataatgccacaagatgctgtacaagtacagcttcaccctctgagaccattctacaaaggggagatcgttgcttggaaaatcaaacaaggagacaagctaagatatggaagagtcccagaagatgttagaccttctgctggccaagccctttacagattaaaggttgaaatgacacctggagagactggtttattactttcatctcaggttttctccttccgaggcacttcaatcgaaaatgaaggtccctcgactttgccggaggtgctccccgcagtatctgataaaaaatctcaagaaatttcagaaagttccagaactaacaaaacaagttctagccaggtttgttacatttctcgtgaatcgttggatttaatcacgccccaatatttgtattatctataatctatgtgattctaagagacaaatgcatactgttcttccccaaaatgttttatcatcttgagatagttttgatcttgaatcgtgctctggggaagattgattggatttgttctttgtcacctgcagcctgtgaatgaaatgcagcttggtcgagtcacagcgaaagaattggttgaggcagtgcacgagatgctctctgcagcgggaatcaacatggaactggagaatcaatctctactacaaagaacattaacacttcaagaagaactcaaagactctaaagtcgcattcttacttgagcaggttcgatatacaattaaatcctccttacttaaaacacaaccatgatcataatgttgattagcaaaacatgtatgtctggttttcttgcaggagagagcagaggcttccatgaaggaagcagagacggcgaaatcacaatggctgtgtcagatatgtcagacgaaggaggtggaagttactattgtaccatgcggacatgtcttgtgtcggcattgttcaacatcagtctctagatgtcccttttgtcgtcttcaagtcaatagaaccatccgaatcttccgaccgtaactaacaccaaaagtcaaatattaattacccaattcatcaaaggttttgtcctctatacattacaacagtttctgctaattcatttgtaaatacgtttaggtgttttcacttttgtatatttaagtaaagaaattttttattttaagccgctatcaatctatcatcattttaagcattgagtagactgggtattcaccctatcaaatatcaatatctcaaatcaaatttgaaatgagccaaactaggcaaaatcttcagagaccatcacaatatcagctaacgagtacaaaccaaaaaagctttggcttatcaagttttttctgacacttttctttttctagatgacatcaattgtttcttgttgtttatctacttcttctttgaatttttcttcttaacaaccaacatttgagcttccactgtttcttctgcatcgttcattaggttattatcatccgcgttctgttctttttggagttgattcgtaacgtctgtatgtctccgaaatattggtatcgctatgtattctttcttctcctagggcctagtctctccccctagtcattccaggggagtctaaagcttggtggatttgaagctccagacaccatccatagctatttttggtttgtctacatcaatgcttgtaggaataatttttttttccggagaagctgatcaccgttgtgatagagagacttgccaatcatatgtaagcatatggtctcatcaatatcataaattaataaatttataaatttatcagaatatattatgtatatgtaagaaaagttagtgaaatatgattctagtattgtttgtttttcttaaataatattaagttttgatcaaatattcatttttaatatgtttactgtataaaaaaaagttgtgtttttaaaaaaaaaagagaatatgttcttttacttgtatttgtatctaaaaagatgttggttatgacaaataaaacttcttttcatataggaaagttaaaaaaaattacaaattaaccaactctctctataaattaataattcaacaaattaatatctttataaattaataaattttctcggtctcgacattattaatttatagaggttttactgtatatatatacaatcaatccatatcatttgccttttacttgatttttttttgttaactaaagtacaacgtacctattaacgtatatataactatggttttatctgaaaatgaacacaacaattttaatgtaacataaacgcacacgaaaaattaaatcgagtgtatgtaattaatagagatttgacaaagcttgttgaatttgaaaactacaggtggaaaacaatgcttgcattacacgcaagtggtgtggagagattcagtgaagatagggtgtgctagggttcaatgcaccaatacttggtggttcgtgagttgtaactataactcacccggtaattgggtcggagagtacccttactgatcctgatcactaatactgtattacctaagacaataaatatgatttatgaataaaactaatttgaattactgcatatgaaattataaatcttttgttttaatctcaagatgtaataatttatgatcttcacataaagaggttgtaagctttgccttcttttacaattaaatcaaacgttgttttcattcttgtatatatagtgaaagagtttgttctactcagaaacttggctatatatttcagatacatttttacactgtaatcatatcgaaattgcagggaatccgaatttaattcaacttcagtgtagtcaattattagttccgagtactttgtttttaatccatgctgtattaaacttagagaggaccattttggtaattataatatttagttgtgcttcattaaatcaggaagagttttttcacccgaacaagtagaaattccaatttttttacccaaatcatttattagaaaaaggctttcttttaaggcctttatgcaatggttgttttgtgataaatcgtattacaagttaacagttatcaaaaatgatagtttggccgagtggtctaaggcgccagatttaggctctggtccgaaagggcgtgggttcaaatcccacagctgtcatcaaatcattttgttttgttttctctttggtcaacaaactcttagggggtgttattggttccaaatttacaaggaattttgatgatttcaatcaaatcctagaaagtaaagaaatgaaagattttaaacgattgtcagagagtattttataatattgttgattagattttcaaaatcttgtaaagtttctctaacaatctctttattttgataatacttttcatgactttccatgacttc

SEQ ID NO: 20869 - DNA, 1186 bp, Arabidopsis thaliana landsberg
aaaagtaacatggttcggtacctttttcatcgattttaatctttgttttttggtacaatgacacatcgagctcgaagtcactgaaagcacttgaagcttcaaacccgaattcgatcttaaactttggaattctgaatttaccaactttaactcttctttctggattgtcactatccaagaatccaagagtagatgtcattctttccaaaagatcatccaattcacctttcttgtccgggagatagaaatacattgcgaagttgcggttggtattgtcacggccttgtcgataaggaagtctgagtaccttaaaaccatcataagccgcaatgtattgtttctcaaagctactcatgaattgcacagacactgatgttccattgagaaggtaaaaaggtttgcgtttcgtcattgactttgagaatttttcctcccaggttcctttgaagtacaatgcgtttccataaatccgtttggttagacatgtaactgatccaagaggaagaagatttttgatgagtccatttgtgtgacgtgatgcccacgcattcacctccatacgcacttcttcagccttcaaacaaaaaaaaaaacacatattggatgatttttgaaaacagtctcctaattcgaattatgatttgggaatcaatataaattacgaactattaggtttccaatttgactagttgagtatgttttttaattcaaacagctatcacacacttcatctagatacaccacctaacgtttctgcgaaaccctaattatatttcttcgaaaccctagtgtttttttttgctgattaaaagtggaggattacctttgatcggaaatctactggaacgtaaacagccttgaagaagttctcgaagagatccttgtatttgggatcaatcggtagtgatttctcaatccagaggccattcaccgccttcatctttgggccgccactagcgctgctgtcggcgtagacgatggatgatagttctcggaagacggatttgagctcatcgattgaagaagatctgaggaaggagaggatttcaccggcgactaagccacctccgggccagcggcgtgcatggtgatcgcagagttcattgaccccggcgagaagatgacgttagattcagacaaagaagataagacgtgcctcgcaaggaacatcgccccggcgttggct

SEQ ID NO: 20870 - DNA, 3082 bp, Arabidopsis thaliana landsberg
  unsure (1)..(3082): unsure at all n locations
gacgaaactatgatatgtatgtctagaaattcacgatttattagaaattcttgatttaattgtactgataaggagttggggtttggctaacgctaacggccgggttcaatttgctcttctaaaattggtccaatttatcttgaaggttgtataaagatagcccaatattttggtttcgaatagaattggaaaagctaaaagtgttacaaacttgaaccaagtaatacatgcccatatattagcccaatcaatgaattcgtcttcttcaacgtccaaccccggaagtcaacctcgatcggatattcggatacacacatacatatatacaagtagttccgtgatttttgttgaagaatcccttctaactcataaacataaccgtgatatataacacctagataagatttttgttcgtgttgcagagataacaatagacgagagctgagaaacaaaagtactagtttctagcatttggtgtttaattacatgagtgagaaactaatacaaacgtccattttatattacaaaaatgcatcacaatccaactaatatatatctaatcataatcatgattgcaatttttgggaaattgattgttaattaataattatagagccgaaattaacaatgaaaaattgataggtttcttaacataaataagattcgtttttttaataataaaattaaaaagaaatactttttagttttaggtgcgtaaaacagtaacaaatttaattttcattttaaagaaaacataggaatagtagcaagttcgtttaataaaaaagtcttagctagctttcgatggtttttcttccaaaaaggtaatggagaaacgacaatttcaatgtctcacgattgaatcagtcacatagtcatatacagttgctttggttaaattggatccattctatgtatatatgctatagtaccgattaattacttcatttaaacaaagcattgtttcatggttaatttctttgtaccatgctaaacatgaatagaaatgatatttgaaacgtgtagtttcttctacggtaattaatatttactaaaaagagatggatacatgaggtttaatttatgaaacctaataattaagtttcaagttgctccatatgatcatccttaccaccacgcaagccgtttacctcctcgcgctcccgccggtttatgtcctggctttttccccggtttaccccccgatgctcccccgggtttatctcccggtgctcctttcggtttatctcccgaagcttctcccgacgctcctccaggtcctcctcccgacgctcctccaggtcctcctcccgacgctcctcccgacgctcctccaggtcctcctcccgacgctcctcccgacgctcctccaggtcctcctgccgacgctcctcccgacgctcctcccggtttatctcctcctccannnnnnnnnnnnnnnnnnnnnnccgacggtcctcctgctcctgacatttctcccggtttatctcccgacgctcccggttgatctgctttggttggggctcctttcggagctggattgttcttcggttttactccaatcctatgtctacatcacacacacaagtgtacatgaaactatttagattttttttgtgtgctgaaaacatccattattcaacattagaaccaataaaacatgcattatgcaggttcgttgtagatgcacacatgccttataatatatgatatgtaagacgtttgataaatagtggatatatgagatgtgcacctcgagggtttgaatagggttttcaaaaaactttagtcatggaaaaaataatagtaaattgaataaataaattttacttaaagagccaaagtatgagagcaaatgccgtcactcctagggcaactgcagcggtagcccctccgactaggaaagtagtggctatagtggctggtacgagaatcggactgaagatgacaaaaagcggtgtggctatggttagtcccacaattgaggcaccgaaggttataccggcgaacactaagaagactacagatgctacggcagcgataaccacctgaaaaaactgtacaactgggataagaaacgagagcattttgtgagttacgtttgatctctattgttgctactctaatcggatgtttgttgaaagatagagggcttttatgaaaagagttgtgtggtgtacgtgcacggtacggtacacatgcatgctccatgcaaaacgatgggaagtaaatagagatctacgttaactcacgccaaattgtgcacacacaacacaaacaaaaaacagaaacaaaaaaaaagtcacgcctgatttgcttcttcttttgtgtggcgttaacgtttcatgtattgtttaagataattttctatatatttaatgtacgataaataattaagaagttacaaggtccggctcaggtccgttgtacttgtttcagtcaaagcataattacaacttacaagtacgtaataatgacccaaaaaaaagcgatgacctaaaacattgaactaggtaaattaacctttgaggatgggtagttgtccgtaccaatcgcgatttctcacatttctcggcagctctcactcctcctcacttcatcatttggttcaaagactgacttttgtttttgatgaaatttggtacggacacttcgaacaactcaaacttgaccacaatatataattttaatatgtgtctcttgactaaacatttttctctagttctcatataacttttgtaggccttaattaacatcaaattatcttctgtgaaacaaacaaaaataactcaaattatatctttgatattattgtgttttgatgaaatagcagagcttgatttttacttttgttgtgatacatagatgttttgttcaattccaatgcatcaacttttaaccccaaaaaaagaagaaggcttttgtgtttctcctttttgccataagaatggtttctttttggttatatttgttattagctatatagcccatatgcaattaccgagtgacatgattaaggagaaaatccgcagagacatttaaaagttgtgaaggcgtaaactctgttttaaactattagcga

SEQ ID NO: 20871 - DNA, 338 bp, Arabidopsis thaliana landsberg
ctgttgacgtgcttggggtgttaaaactcctgcagatggtggtttcaacctggcgaggctcgtcgtagggaccgtggtgctgattgatatctggagatttcttgacttgacgaggtcggtgagagattgaatgacaggaagcacgtgagggccatgtttgtcgcccgggatggcttggtttccgacggtaatgaatgttatgttcacgtcggctatgtaaggatcaatgttaaccaggatttaactgcgtctttgttggctgcaagtgcctccaagtcttcgatcttgatgcctacggtgactccaatatttcggtttacacgcatagtgtttaggac

SEQ ID NO: 20872 - DNA, 1048 bp, Arabidopsis thaliana landsberg
acatttgccaattcatcttacacatgaagctgctcttggtggaccagagcaactctgatggatgttttctttttagcgattcatgaaatctcttaaaggaaaggcaaaaaatcttcctagagttgaagggtcgatagtcgcacgaagtttaaccgaggaaacgtctcacttcacgtcgtattactttagtccaagcgttagaaccaaaaagactcgtccacgacgatatgacgatggaggtttgcacctacatataacgttcctgatgttccagatacctttgcccaaataggtagacttgcagggaagttgaaagaagtttggtgggacgaccatgcgctttctcgagcagctcacaattacatactctgaaatgttgattacattcaaaaatttgaatggtataaagccatacagttttattcttaattttttatattttataatgactgtgatactaattaaggaagctaagtgatttccgattaatttgtaggttatttgattcacaaatccgtgaagcatgtcctggattagaagaaaaagaatatgaaacttacaaagatcgtgattttgctggatggttaaaatactatacacgtataagaatgtttggaaaattcgtttacttaataacttataaaaaatgataattaaacttaacattttctttgtgtacgttgcaaacggatgtggaaacgaaccattatcactttggttgcatgagctcgttcaagaacaaagatctaagatcacaacttctctgatgtacttcactcatggctatactttccatacgtatccatatggaagtcgaagggcaactgcgaattatggaatccatgttgaaggtgaaactgagttttatggaattctacaacaaattctagaagtcgaatatccgggacttttgaatttgaaatgcgtccttttcaaatgtgattggtatgatcctgtgatcggtcaaggggtacgggtaaataacttaggggtggtcgatgtcaatgcaaacaagacttattcaaaatttgaaccatttatcggagct

SEQ ID NO: 20873 - DNA, 1425 bp, Arabidopsis thaliana landsberg
gtatcatgttcataaatattattgattttcaaccagagatttttctgtatctaactcaattatgagtgatagagtcatgattagttatagttgaatagttgcatatgttatatatctatataataatcgccgagggtgaagagtatgtaagaaatttaatcatcaaattcttaggtttcgagaattccagtattaccctctatttaattagtttaagacgaacattgtttaggaattgtgtgtataatgcattgttgagaatgttgttagaaaaaatatattttaatactaagaataattacttattacataagtaaatgattagataattaaaaattatatttaaattatacgatacaaaaaatctaaaaataccgcagcgtagcgcgggtgattacctagtattacataaaaccttattgaaattgttaaatattttataaattgctcaaacctttatcttgtattttatataatatttgtttttaataaaagatcaggaagacaaatattacataaaatcacatattttattataaccaggaaatctatattaaaattgttaaatattctataatatccatatgtatttagaaaatgtttaaatacagataccaatatatcttggttgactagtatagtctagtaccaatgattctgaaataatttctatatatataattgtttccatgggttttctccattaataatacaaaagaacaaatcttagtattcctcatttcttgggaatccagactaaattttggcctctatcataaaatgaacaaaaaaactatataatttagaaaaacattaaaatagagaatccaaaaactcagctaaagtcttcatcaaaatctgcataatattttttttatcaagatcatcccatgatactctctcttatactaaaaacacaacgtgaaaaaaactgtaaattttttaccttaaaatctccaacgatgaacatgccaatgacacagaaaaaagtagcagcaaggcacatgaccatctgaatctcaagcacaagtgggaaagtgatttcttgacgagctttcttgtaagttagctcaacgagcggtaatataaaagcatagagaagagctgcaaccacagtcatcaagaacccaaccacatactctttcttgctctccttagccggtttgtctccatcactgtgtaacgcaaggatcccgataccaaccgtcaacaaaacgacggcgtttatggagaacggagtgaacttttgcttgactaacaagaaagcgaagagagcgttgaaagctagttgagttccgattatgagcgatgaagttgaaactggcagatatgctaatccgtaagaatataagtagttgtcaagtcctgtgagcaaccctatgacaatggaggcgataaacagaggagtttccatgaggaagagct

SEQ ID NO: 20874 - DNA, 455 bp, Arabidopsis thaliana landsberg
ttctaccatacacatatagctaatacttgaatgacaacatatatttaattcctcttcatattgtccatccactaactctttagaagtttttccaataagtttggttgcattattttcaaacaccatgagtttaatttcagctgtctggtcatttacacaaatatgaagcttgtacgtggagtaaaatgtattgtacatatcaaattaatatacacttataaacctttatattttctatatactaatagaaacaattttttttatcttgtacaagataaaagagtaacagaaaacattcttacatttcctccacatttgtgatgctctcctgacatttgtcatttgtcacaccagaacttaggtttcataggtatcctgaccatcttaccagtgctggttgattttctaaccagctcagttttctgttacatttaagacatccaaaatagaaccat

SEQ ID NO: 20875 - DNA, 1367 bp, Arabidopsis thaliana landsberg
  unsure (1)..(1367): unsure at all n locations
ggttttcaatccgctttctctactaactcgggttcagaggtcgatgactctgcttctatcggaaggactcatcttgctgctggagactatttggaacacgtggttgaatcttctggtccgaagctagggtttcacggtggatctaccggagctttgtcacttggggttaacgtcaataacaatactaatcaccggaatgataatgataatcattaccgaggcaataacaatggtgagagaatcaacaacaacaacatcaatgacaacgagaagacagattctgagaaggagaaggctgttgtggctgtggaaacatcagattgttctaataagaagattgctgatacgtttggtcaaaggacttcgatttacagaggtgttactcggtaagtatataattaagaatccaataagttgtgattaggaattaattaagtactgttttgtgatttgccattgactaaaggtcaaagacttcaatactattactattgaagttttggtttttgatttgttctaagtgtaagtattaatgtaaatatttgattgatgtagacatagatggacgggaagatatgaagcacatctatgggataatagctgtaggagagaaggtcaggccaggaagggacgtcaaggtatatattttccattcagttttcgaatttcttatatgtatttgatgattcactattactttgttttgtgttgtttaggcttaatgtttttcttgtgaattatatgaggttttgtggttagaagaagcttgggtttttcatgtctcttcttattattaagtggggtttagaagtaagtagagtgaagtataggacaaaggatttgtcaaaggaaaattgaatgcaagattcaaaagaagctttacctttttctttattctattgatctgtctatatctttatatgatgattgatagaactttgggtgattttttgcatttgtgaagggggagccaaagttttttttaacttgacaatacttttgagtcaggattatggaaaaaatggaaaagacataaataaaatattagttgttgttgtttgttgttgatttttcatatatnnnnnnnnnnnnnnnnnnnnnnnnnnnnctttgtctttattacatttttcttttcctttcatttcacactcttacacatactaaagcctaaaggtacattagatggggtcccatggcattgcctatatgatgcaatctctgcttctttgattgacatgtttttggacccactttgaccctctaatcctacatttctcttcacctatatatctctgtaagtgttagcatatatatatgatttgacgttatgcaggcatgtgatgtgagaccattggacctgtttcttc

SEQ ID NO: 20876 - DNA, 1616 bp, Arabidopsis thaliana landsberg
gttaccatttacgatttagaattaaaatatgcttttgaaagtgcttggagagttttcttgactatttgtcggggaccataattagaggtaccctcaagactcctaatctcagctggtaacccccatcagcacaaaactgcaaaggcccgatgggtgcgattaagtcaaggatcggtccactcaagggacacgatctcgcctcgcccgagcccagcctcgggcaagggcagccgacccaggaggatttacgcctcgcccgaggccccctccagcaacggacacaccttcggctcgcccgaggcccagacttcaccaagaagcaaccctggccaagccgccacgccgaccgaccgtatcgcaggagcctttaatgcaaaggtggcctgacaccttatcctgacgcgcgcccttcagtcgacaaagccgaagtgaccgcagtcacttcgccgctccactaaccggcctgacaagaggacagcgccgcctgccccgctccgactgctgtgccactcgacagagtgaggctggcaggaactaagtacaacctcgggcgccatgggaagtccgcctcacccgaccccagggctcagactcagcctcgaccccggaagacggactccgcctcgcctgaccccagggctcggactcagcctcgaccctggaagacggactctgcctcgcccgaccctagggctcggactcagcctcgacatcggaggagcctccgcctcgccgacctcgggctcggacccgccatgtcacagggaaggccatcattaccctacccctagctagctcaggctacggggaacaagaccagcgtcccatctggctcgccccgataagcaagtaatgatggcaccccgcgtgcttcatgacgacagcggctctcagcccccttacggaagcaaggagacgtcagcaaggactcgacagccccgacagctgtccttccgccaggtccagcagctcctccgacggccacgacatcacacgaacagggtgccaaaacctctccggctgccacgacggcatatacttagggcactagctcctctctgctagacactgttagcacactgctacatctcccattgtacacctggaccctctccttacgcctataaaaggaaggtccagggccctcttacagacgggttggccgcgcggggaagaacgggacgacgcgcataagcctctcgctctctcccacgcggacgcttgtaaccccctactgcaagcgcacccgacctgggcgcgggacaaacacgaaggccgcgggtttccccattttacgcctgtctccctccaggcttttccccccttcgcgctccgtctcgtgccgacccatctaggctggggcacgcggcgacaatttacttgtcggcccagggaccccccgggttcgaaacgccgacagttggcacgccaggtaggggcctgctgcgtgttgacgaacagcttcccgtcaagctccagatgggcagtctccagcaacctttctagcccgggacggtgctccatttcgggagtcttgagttcatgtccctcgacggcagctacgacatgatactccttcccccgccgtgcgacacggacaatggcggccgacaacc

SEQ ID NO: 20877 - DNA, 562 bp, Arabidopsis thaliana landsberg
  unsure (1)..(562): unsure at all n locations
taccattctctaaaataagagatcaattgtcgtatttatgggttgaattccacaaatctctcggatattacaatagactaagatttcgaattaagctaaacaaaagataagaaaataaaaacaaaacaaagtaagaaaataacagatgatgggggttgtaagacaagataataaaacataaggtttaaggtattctcaggaaaaaggaaaaaatgattagtagatctagtaatagctaagttgttatcgaaccattcttaaacccaaactctaatattagaataatgataacactgtattttactcattttaggcatgtgtttttcatcatttaacttagtgatcactcattgtttcatatcattttgcatcacatttagcttattttgcatacttaggcatttacgatcatcttacatacacattgcatgttttggnnnnnnnnnnnnnnnnnnnnnnnnnnnnnnnnnnnnnnnnnnnnnnnnnnnnnnnnnnnacccagaaggaagcagcagagcattctactcgaaccagtcattcgatccagacagccacagaggag

SEQ ID NO: 20878 - DNA, 1049 bp, Arabidopsis thaliana landsberg
cccatacttttgcttctcatctttgaaagctagttttcttaatacggttttgaagaaaatattttaaaattttaacactttttaaaaaacaaaattgttgaaaaaaataaaatagaagttttaaaacatttttaaataaaaacaatttggatgttgtgtacaattagtttagacaaaaatttagaatttaacacttcaaaaaaacctttaaactttaatagtgataaaaaaaaaataagtttaaaaacaaatgttaaaaattaaaattatgtgtaaaccataaaaaaaggtacttccttacttccatctggtccaatctctcttcctttgataatctttctccttgcaagaggtcaaaggatccagctttggaattggacatgtaatcctatacagctcgctcaactctcagtgcagaacaacatgaaagaagaagaagcaagctttgtcttctttgaagcctctactatctctggaattctccaagcaagcttttaaattgtgttccattactttgtgggttgttgcaggcaatgttggctcttccaaaagtagaaccggtttatggagcagatactgacaacttgattcatacagcagacattggcatcaggggctaccattcctagttgatgtttcgagagagaagcggcatggttatgatcacaacaagaaagcaggagccacgaatgttttggttataaccaacgcaatcatgtctaatggcccagtcatcctcaattttgattgtgaccactacatctacaactctgtttgtggcaatagaatctgctatgttccgttgaagatgcctattaaaacttattggcttattcaatgaatcaactcaagagtttccacaaatccataagtgaaaaaacgaaggttaaatgactcatcagcttcttttttcttgggttggctatacagtaatatttttcttgttatatatgttcccatttgtagtgaagatcatatctggaacattgacttaaacaggagtttggtcttctcagttcagcacaagcacaatattctacatggtacct

SEQ ID NO: 20879 - DNA, 2039 bp, Arabidopsis thaliana landsberg
tttagaaaaccttattaattctgtaataattttgtatgaaattttctatagtatagtaatttacttatttttgggtggggtgcagaacacacaatatgctgtctttgaaatatagttaataaattgtaaaaaagaaaaaatatttgtaagaaaaaatattcttaatcataatttatttatttattgttagtggtaaataccacctatacctttctaactagaacctaatcaagtgcatgtatcatataatactaggtgagtataattgttgatcgcttaaagggtcacgtaaagttctaatatcattactcaaagcaagcaacctcacctttttcttagatcagtctatactaatcttcatcaaccatgcattattagtttctagaattttgctttgctttgagaaaactgaaatacccatcaacttaatacaaaaatataaactaatctcaaacatttaccaaaatgtgtgtctaaaagaagataatattaaggaagtagattgtactagtggtacaattaaaagttgtaatgaagagaaatatacattaaaatctacagctcagcgtcattgtcgtcttccagtcatcagctgttggatatcattggttattgtatccagcaaccccggtattatggaggtgattacattcacaaatgcctcaagacattgttgcaggtaactgtctttctctttagctaatctgtccaccacaggaagaaatcttgcattgcagaagaaatttgtcagccaacgcctactgtttttgcagagaaatgcaacaaagagaagagctttccccctcagaaattctgttccttgctgtacgatggagagtaaactagggaaaagatttttctcctctgtcaatgtcacgagatgccttccaaagcttgtgaatgtatgatgacttccaatcatagccatgttcagaagatttaagcagacttgctgctctcttgcgctgcctttgacaaaagatgaagctatttccttcaatgaaagcttttccacgaccgtctgaatgcaaggagggttaaagcgagcaagacggactaaacaggatccagcagtttgcctcatgctctcctgtttccccgttgccttgtagatatagcagaggttgctaatcaaatcctggctggagaaacgggtggcccagtaagctccttgactgcagatgttttctattgtcctcaacgcataaacctgagtcaggtcatcttctcccttccgtaagacagatgatacaagagagatcaaggcatttgaaacctagtttaaagaaagcaagaatctgtttagataggaaacaatggaaaaatggaacattcagaataagcaatggactttggtccgctagaaatacaccataaacattaaaagccaaatgatccccatttaaaagtaataatttagagatgctgacctgccaacccgatgcagaccgggtttcttttgatggggattctggtggtttgaaatccttatgctcattttgagttgagatgtagaatagcaattcacctagagctgccatagagaatcttctcactttctcatgcttgtctctgaggccattagtaagagagtctaaaataccagaatttgccaagtcatcttcgattgaagtagaatgccgaattaacaaaccaattagtgaagcaatttgtacacgaaatgctggggtcttggataatctcagaactttaacaagcacaagcattattggtccgttagtcaggatgttggctgcatcagcattggtactcaatgtctcgaggtatctgatcaaattctgtttctctgacagtccagaactgctcccacttagaactgttatgatcctattgttcagcggttctaattcttgctttcccttcttactaaaatcagagggctgtggtgtttcgaatgagagagaatgcacagcttctttgtcagattttctgctgggcatgacaggcctaacagaaagatcagatatatgccaaaagacgtcagtgaggctagtaggtgctttagatgagtcatgatt

SEQ ID NO: 20880 - DNA, 1850 bp, Arabidopsis thaliana landsberg
gttcaaatacctttaaaaacattacaaactacagatccaaccaaaatattcaaacccaatcccaacaaaacaaataatccggcccaaaaaacaaataacactacatttttaatatgtaaaataacagttctatccaaattaaaaaaactgtattctcaataaataaaaacaaaattcaaaaattagaagaaacaaataaaaattaaatcaattcgaaatattagtaataaattccaaaaaaaatttggttggtgataaattcaaaatgtatgtattattcaaaattatgttttggttgttaataaaattttcaactactttttgagatatacacagtttattaatcttttagatgaaaatttaacaatataatatctaaatatattttgaagtttatttatatattattttgaacaaaattttgtttaaaaaaaaagttaagataaaaatgatcttttaaattgtagttaaatcaaatattaatttatggattttttctgtttaaagttttaattattattatattataatgtgattattttagtaactttatataataaaatttaatttttacaagaaaaaaatagaatagagttttttcaaataaaaactcatgaagaagatatttccaaattaactcaataaaactgatgttttggtagcatacgccggaaaaatcgattagagctcgttcagtaaaccatttgaactatatgagttgaaccatttgaactcgtctagatgaactagatcaattgaaccatttgaactaaatcagttaaaccatttgaattagatcaattctaccagtcaaactataatatcatatgtgtaccagttgtcagattaaatttcagttgtaccattttattttgcaactatggattgattccggagagcaacaaaattcaattactacattgtactaactcccattgcaaatacctaaatatccaaattcgtttcgttcacttactttctttaatcaagatctatcgatagagtagaacaaacaaggcgcttgtaaaaagaagaagatgctaggacggaggaaaaggcggccggtgaaatagatgagtcggccgaagatagtatctcaaaaggaggaacgtttccagagtggacgaagtaaatatcgagatatcgatttagatttcgatccaacaatatcgacggaggaagatgcaacaccaaagaatcgacggccggcgaaatggatgagcggaccagagatggtttttcccgagttgacagagccaattgaatttatacaccaaaaaatggttaaaaaaaaaaaaaaaactggtttccatcaaccagagaaaagcgtcgtaagaggaagaacaagactatgcctgggatacacttgaagaatttgttgcacatgaaaaaattaattcatgtattttgaatttgtatttctcggatttgtatgaacaattcaactagttcaacttattggattagattaaaaacatatatgtatttgtgttcgtggtactttttaatttatttagttgagctagttcaaatgtctttctttggttttcgtggtaacatttaatataattagttcaactagttcaactagttcaactaagtaacgttaaaatgattaaatttgtaaaattgataatttattatacatgtaaaattatatacgaatatcccaaattataaataaataattttagatcaatgcaataaaatttaatattttctaaaaaccaattttgttttcatataaaacaccccttctaatataagaaacatttagtctatgatcaccttatatgaagtaaaataggtaaaaaaccaagttttcaccgatgtcatattatgaaaacttt

SEQ ID NO: 20881 - DNA, 1082 bp, Arabidopsis thaliana landsberg
accttgttaatgtgtgttgtggaatgtggttctgatctcaatctctggtgattcggtttggctggcttatatttatctccaatcttgggggtatcactctttattcaaccaaagttgacccttatcagagggttcagaattgaggacttggaatttgatttcttggaggtgattattgcgggacggaaaggatattattgtggatcggaaagtgaattttgagctggaatggtaaactggatcatagatactgatctggtcaagtgttgggataaaggagccaaaaagttgggagtgtgtgtggttaaagtataccattttacagttcccacagacaagtgccatgtctcgctgcttcccatttcctccaccaggatatgagaagaagattagaactgacgaagcagaccctcttgtaaaggttcatatgtcaactgactcaactcttacaatttactctattatgaatcatggtcattctgctgtttttagaacttgaacgaatttaggtgaaaactcaaggatagcatgagactggagtttaatgggttcacagaattctttgtattctggaatatttttcgctgttttctaggacatatagacatacttggtaaacccttttgattagtggaatttgagactggagacttagtttcttgctattatggaaacgtcattgctaggtggtcaaacattgagtattctcacctattatcgatagtaacgagctgactatctctaacaagagcattactgatgctgatggattggtactgatgtgtagagaaatcatcagagatgtatcttttatcatctatagaattgtatctttcttttcttgattctgcaagaatgttcctttgtctcctaatatatatagcacacatatagggctgatggatacttgatcgactttaaatgatgaggtgcaagctttcaagtaaagggctgttcatgtagtttgtttcagaatctaagatgttagaattatttatctcattcattattttcactaggatttacttatttggcctgaagaccatagtaagtagtgtctctttagagtcacaacccattta

SEQ ID NO: 20882 - DNA, 618 bp, Arabidopsis thaliana landsberg
ctaataaacgtgtactatacatttaaaatcaaataaaataatatcatatatttataaattatctttacaaaaaaagtgtttttagtttaactaaaatataaacctgtccgcgatataccgcaggataatatctagttagacaataacgatcaacacatacttagtgactatagttttcttgaaaattgcttcatgtacattgaatggaattattatagttgattagtcttcattcttgactcttcaccctttaaaacaaaagtttttttctcactatgagtcatttgataattaattgaagaaaaagaaagaatcaataatgcatgttgacagaaagacatattaaattaaataaataaaaaagctaatgattcttcttaaaagtccaaagtaagaaacagtcaacaaacgttggccatacaacaagaataaatacatcacatttttcagacaaaactccaatttcacagtgaactcaaaaacaatgacaagctccgataaatctccgtcgcacgacgttttcgtctacggcagtttccaagaaccagccgtcggcaatcttatcctcgaatgttcttcggtcatggtttccgctcaactccacggctagtacgtctc

SEQ ID NO: 20883 - DNA, 3104 bp, Arabidopsis thaliana landsberg
  unsure (1)..(3104): unsure at all n locations
cgatggaatattgaagtttgaacataataatttgatttaaacaatcttaattatcaatgactaactgtagtaattagactttgaatcccactaattccaatgaagattatattaagaaactcaaagaagaagaagagcaaagaaaacaaaaacatgtcttcttgtttcaaatcctctgtttctctgttctcagttttcttgtttatgatcttgaagacagttacttcagatccaacttatctctaccacatatgtccaaacacaannnnnnnnnnnnnnnnnnnnnnnnnnnnnnnnnnnnnnnnaactgttctttcatctctctcctctccaaacgcagcttatgcatcgctttttgataacgcagccgctggtgaagagaacgatagcaacagagtctatggtgtttttctctgccgtggagatgtctcagccgaaatctgccgtgactgtgtcgcgtttgcagccaacgaaacgctccaaaggtgtccaagagagaaagtggcagtgatttggtacgatgagtgtatggtaagatactctaatcaaagcatcgtagggcaaatgagaattagacctggtgttttcttgacgaacaagcaaaacatcacagagaatcaagtgagcagattcaacgagtctttgcctgctctgctcatagatgttgcggtgaaagccgctttgagctcgagaaagttcgctacggagaaagccaattcacggtttttcagacaatctatagccttgtgcagtgcactccggatttgactaatcaagattgtgagagctgtttgagacaagtcattaattacttgccgagatgttgtgatcgaagcgttggcgggagagtaatcgctccgagttgtagcttcagatatgagctttatccattttacaatgaaactatagctgcggctccgatggctcctcctccttcgtcaacggtcgctgcaccaccactgaatattccttcagaaaaaggttaagaatcttgaaactcatagaacataatctagtaaaaaggttgttttgtttcatatgtttttgaaattgtgtttaggtaaaggcaagaacttgacagttatagttaccgcgatcgctgtaccggtttctgtctgtgtgttacttcttggtgctatgtgttggttactagcaagaagaaggaataataagctcagtgctgacacagaggatttaggtagaaccataacagaattgagcgagttttgctattgtctagtctaatttgttgaaactatcttgagaattttcctttcttaatgtagatgcagatggtaatacgtcaacagaaacactgcattcccagtttaaagcaattgaagctgccacatgtaattttcataatgttaacaagcttggtcatggtggatttggtgaagtttataaggtaactaagtcttgtgacttgtgatcaaatagtcatactttaacaaaacaaaaaaggtttaatgcttctgtgtaaaactcattcagggtcagcttataactggagaaacagtagcaataaagagactatctcaaggatcgacacaaggagctgaagaattcaagaacgaagttgatgtggtcgcaaagctacaacacaggaatctagctaagctcttgggatattgcttagatggagaagagaaaatacttgtctatgagtttgttcctaacaaaagcctcgactacttccttttcggtataacaaatcatcactcattcctctaaagaaaatatcggttttcggattaatcagattgttttctttttgtttgtagataatgagaagagaagagttttggattggcaaagaaggtacaagatcattgaagggatagctcgaggaatactatatttacatcgagattctcggctaacgatcattcaccgtgaccttaaagctagtaacatactcttagatgcagacatgcatccgaagatctcagatttcggtatggcgaggatctttggtgttgatcaaactcaagccaatactaaaagaatcgttggtacatagtaagttgtttcttcctcttgtgatcttgacacttcaatgagttattcaatttcccattatgattaaacaagttctctctttagtggttatatgtctcctgagtatgcgatccacgggaaatactcggtgaaatcggatgtctatagcttcggagtcttggttcttgaactcataaccggcaagaaaaacagtagcttctatgaagaagatggtcttggagatttagtgacctacgtaagtactgttttataaccaatcaaaaactctttttaagtactgttttctgaaacattataaatatctgcaggtgtggaagctatgggtggagaattcaccactggagctagtagatgaagcaatgagagggaattttcagacaaatgaagtgatcagatgcattcacattgctttgttatgtgttcaagaagattcttcagagagaccttcaatggatgacattcttgtgatgatgaacagcttcactgttactttaccgattccaaagcgatctgggtttcttcttcgaaccatgaaagactctagagatccacgctcaggaggttctgcttctgatcactctgcaacaagcaagtctttgcctttgtctgttgacgattcttccatcactatagtttatcctcgttgacttcaacaattagttccagtaatgttatgttgtaacttgtaactatgtgaaacaaagcaaaaacttatttagttatgtcctaaaagacaattacataaccgaaaaagctctaaaaatgccaatcagggagatttgagatttcctcacacaacattgccaagacagcaagcttggtaaagtacccgatttatatgaaccatcgagcttgtacagaaaaatataagtcaaaaccacaatcagaaattacaaacctctaaaacaaatgttgttgttgttatacagatgaaagagagactcgaaccaccagtgttaaccgtaacttaggcgagagtcgaggagttttgcggaagtttgtctgcgaggtattccaatctcacatgcattaactctagcagcaaaccgaagagagcatagagactctccagtgaaggtgat

SEQ ID NO: 20884 - DNA, 1151 bp, Arabidopsis thaliana landsberg
  unsure (1)..(1151): unsure at all n locations
tgaaacttccttgcaaatttgctttacaaaaccatcaatgaattctccattatttctcttgtgagtctgctccatggtctggacaattggagggagttgacctccattcttctcagcctaacatgaaagttaaaatagtaatcatcatcatgaaactaggaaaatgagaaaaagtgaaaagcataaattacttacactttctaatgctcgtttagcataagtcttttgacctgaggtgtgtctactcggaccatgactggccacactcgtgttgcgagattttgaacacttaccacttttattttcagactatggatcaagccaaaaaacttcaaggcccttccataccttaggatccatccacatctgcattgttttatcatctatttccttccacttacttttccacttgctaacaatatcacacaagcggattcctaccttaattgcaaattgcctcttaaccaattctttaattgagttgtccaagttatattgttgttgtgatcaaggaaataaaagcaattaatgctgcaaagctacttctacaaatcaaaaacaaaagtctaatcaattaccgcaaacatgtgaaaccaagtgtcaacaatctccttaggtgcctgtgagatgttagcgtgaggttcagtaaagtgtcctttgatgtagttagagaccaccttcccaacttcattatcaacctcaaacatatcgaagacaacagacgttagtaacataatgatgtcattggattgaaaaataaacattattcaattaaaggagttaccaatgttttcttggagggcgtttagggtctagttttgtatgcccagactgtcctggactgataagaagcttctcaagtgacaactcccccatttgataatgagcttgaccttcatnnnnnnnnnnnnnnnnnnnnnnnnnnngatctgtctcatgaaccggagtgttatgtggcgaaagagatgggctgcgttgcaccggtttagttgtctgaggacatgctcttgtagtcgaatgaggagaggactgtgaactccgaatagcagtagacccattagaccgttgtcctccattattcctaaagttcctataatgacctattcaaagcatatacatttataaacaccaagagatatcaaattttagct

SEQ ID NO: 20885 - DNA, 586 bp, Arabidopsis thaliana landsberg
ataagacacgtttgaaatttgaaattgaaattccagctgtgtgtacacgtcataattgtcatgtgcaagaagttagaggttaaccgggatttaaacattttggtttagtgtgaaagcctgaatgtttttttggttaaagcttaaccactgtgatctcatgaacatatttagattcattcggttatggttttcaaatgtgacattaactctaagtccaacccaattagatcgaaacaactactgtatatgaatttgttatcttcgcaacccaaactacgtattctcaactatacaatgaattagagaagaatgagtaatacctttttccccatattatctcaacttgctagtgatgttctagcaatgcaagtatcctctgtggcttcagaatctgcttttagcactagtgggagagtgttagatccttatccgtatatggcgaggttttgctatgtttgcaacagtagcttcggtgttcttatcagtctcaagcaagtgttgcaaacttggtgctaatgctggaagaagaaaaatatgttgactcgcttggtaagtatgatttcacatagtcagttttttatttatt

SEQ ID NO: 20886 - DNA, 691 bp, Arabidopsis thaliana landsberg
tgtatgtacatcccttttgaggaatttgcttatagatcattatgtgtagatgtatccttttactaatcgtttgtttttaaatagcttcatctacgaagactggtttatgccacacactgctgcaaggctgaagttcccttactattgggatgagcaatgcattcaagaatcacaaaaagacgagctttaaagcaaagtccgaggctaaaagcaagcacaacctttagatagtaaaattatagttgaggctttgtgacactacgtagatactggtaaattggcaaggattttacatgaatgttgttgttacaagaaagtaaataaatcttcaatctttgatgttcttaagtaagcgagtcttattggtcatgaaaatatgtaagtgtgcacatgattgcgataaatttatagagtttcactcacttttatatttctcttctatattcaaatcatagctcttcgaagacaaggggacatcagaatcatagctttttttgtgtcttgtcttgatatatatatatacctcttcgaagaagttgatgatgcagtcgtttattttgtctccatgtgagaaagtgatcaatgacactcacaaatctagtagtggctgaattggctcatgttaaatgcaaactaacgaagtctcatcaaataataactcttcttcttgcatttgctttctttgcccctt

SEQ ID NO: 20887 - DNA, 248 bp, Arabidopsis thaliana landsberg
gtttttgctgactgttctggttacaaatgtgatttgattcatagtgattcggtagttgatgtgaaagctggagatgttcatgttatatcaaagatgtctctgatgctaatgttgaggtaggtgattacaaagcatctgctcagagctgtattgcaaagctatgcgtattgagtatgccacacacgaacaacaggacagagagttgcagtaccagcacaaggcactctatcatgcaaagtggcatgatg

SEQ ID NO: 20888 - DNA, 1429 bp, Arabidopsis thaliana landsberg
ccagacatcatagcattcagtgacgagagagctttgcgccgccttatgcattgttgatatatgcgtgggtacaacatcctatcattagacacgacaaatctgcaggcgagtttgatgttgggatgtgtaagatctctgcctgtgtaccacttacctgtcgtaagtctatttcctgccatagattaggtccaaggtaaagatcaaacaccggtgcaatgttacgaccatcataatttccatatacaaaggaagccttgatcaaatatttacgtcctttctccacaatcagattgtagcagttccgtattccctctggaaaatatctcactgtctcgtatagctccccgtatccctcaggattttctctgattcgaccagtttttccgctctgtatgaaattttcgtccgaatagaacaaagtccagtttgagtctctgtataaggagacgtctcatttgcgggtagcccgcaatccaaactgatgaaacctgctaacagaaagaaaaaaaagaccgtcaagaattgtattttctattgaaaaaacacaagaagactaggaaaataatctccggacatcacaatcaagaacttgaatatctacattatccaaagaaacatatgtaaatttcttggtcagacaataaggcaacttggtttttgaaagaccatttcaattgatctcagctgttatatagtttatcactctatagctaatacattaagaatgttcagagagaaagagagagagatacacacggagtttgaatttgtagtggtcagtgaattgaattggtccatttttccatggtttctctaatgaaacaagcttttgacaatttccaattcacaataatagcttcgaaccaacaatagacagatcaatcttgaagctaattcaaagagcacagcaccgtggcaaaacgttacaaagagaagtggattaacatgagagaaaaaaaacaattccagagtgcttgaaacgcagtcgcgggaaattcgcgttttaacaacggtcattaatggccttttacaaattaactggaagacttattgggccttattgggtttaaagatagcccattatatccagaaagaattcggatccagtaactattacctatccatcagtcttttgttgtcactttgatctgtctctacgcgaagcagtctccgactcatccagataccaaagtttagagagaagaccaaagagaacaaaaagagaaaaagagaaagatgaggttgttcgatccatggccagtgttcttcaagagagaatggaaacgttgttggccgtttctcaccggattcgccgttaccggcgttctcatcaccaagctcaccgctggactcactggtaagtctattcagatctgaccgatcgtcatcggaaatgaaagagctaatcctcaattgatccgtatttgta

SEQ ID NO: 20889 - DNA, 514 bp, Arabidopsis thaliana landsberg
  unsure (1)..(514): unsure at all n locations
accaagaccgtcaagttcagaaacattcgtccccatatccacattactgaaagtcatattatttattcaagcttcttcaatggccgtggccaatgcggtggtagcatcataagcccacaatccatagccattcagctccataagtgggaatctcctcttccaacgtgatctaaacttttctagatctttggattttctaatataagttaatacccaagttaatacccaataccccctccatagccttaatacccatttcatttatcgacagtaagccatcgataactccactagtaaggatccaaacatatcctggtttcatcaaacctagctcctttgctttaatgaagactcttaaggctagagaagaggacatgtggacaatnnnnnnnnnnnnnnnnnnnnnnnnnnnnnnnnnnnnnnnnnnnnagatttcttgatccgtggcattagagggataacggatctattaaggtattcgaacattaatatcttgtaatgcatcagtgagacg

SEQ ID NO: 20890 - DNA, 784 bp, Arabidopsis thaliana landsberg
  unsure (1)..(784): unsure at all n locations
gacccatgcgggggcagccccccgactcgcctcatcctccatcttggcctggatgacgaaaatccttgaggccgagggaggggtagaggccgcatgccggctcgctctcccccaccatcaagccggagtcaccatcttgggtgaccgccggtggaggggtgcggccgggctgcatgatgaaaatccttgaagccgaacgatggctgaaaggtaccaactcccacggagttgcgtccctccagcgaggtcgcggaaagacggcggataccccccatccgggggcttggaagatggaaagacacgacgcataagggaggaagaagacatggttgccttctgaaaggagtctccctccttttaaaggcaactctccctacgtgcgcccccaaacgccacgggctgagtcttctccaacacgctccaaggccctcccctgcgactcgggggctgggtcccgcatgtcatgcaaaccggctcagggcagaagaagccaaaccgccgcgcgtggtgcgcacgaccgcccagcgttgacaagcgaccccccacttttgcccagaccaacgggcggaaggggcgggcagcatgcaggcggcatgcaaccgcgccaggtggacgcgcttctccgacttnnnnnnnnnnnnnnnnnnnnnnnnnnnnnnnnnnnnnagcaaccggcgcgccagttgctgcatgcaagcaaccgcacctgcacttgtgccaccgtcgcgcctcttcggttgcggcgctgtgccgcgactcaaggcaaccggcgcacgacccagcg

SEQ ID NO: 20891 - DNA, 2517 bp, Arabidopsis thaliana landsberg
  unsure (1)..(2517): unsure at all n locations
cctcgccggtcagaagctcgaccttcacgtccttctccctgcctcctccacgccactctgtgatccaccaacttcctcttcttcttctcctccctcgactactattcctgcagccggagtccctggcccttctcctagccttgctgcttctctcccgagtatggtgacggctcaaatcgtggccgtggtgactctcctagtctctttggcctttacaaattttgcttcttaactaggattacatatatgtatattggaattactgcatataagtttttgttatgtatacttatattttccatatagttctttttccaatgattaaaaaatgtagagatggttcaacaataaaaatgtgcactaaaaccaattagtacttaatgagagtattgttaaaccattccgttatattcttttggtcatctttaaccagagttatgagataatacggataaaattttgatttgtgccatcatttttgttggaccaccctgccaacgatccatatggttgaggtttaaacggtttaatagatctggttgaaaaaattacaagctttgtctctttattcataaggttgtttgattggtgacaaagaattagagatctctaagcggaaacaatattggtcacagagaccttaacaagttcagcttcaaagataatggcatcattcaccaaatatccttttgatgaattttttaaatcttctaacaatatgatactgttcccttcaataccataaccgcttcgaatcgcacaccaagcttcacctgaaaaagagagagaaaaaggatcaaaccaaattatatttttttcacttaatatcgtcttctggatattaacattttacttttattctttgatagttttcttactatatagttgaatgtggttggagcttcgttgattctttaactgcagattaaccgatccccaagtgtttgtaataactgcgtttgccttatagccttgagcatatagaaagattgaaagtgcacgtggtctttctccttgataccctttcgggttaaatcctaatctcctgattacatattcactcaaaactgtaatcaccaaaaatatgttttcctgttttacgacatttttgagcaactgttttgatataatttgattagaaactactaaccagtatcggactccaacgagaaattcgtcagagtaatagaacttattttccaaggtggagaaacgaagtatcttccaagtgaagacattgntccgagggcttgatatgaatgtgactttctcttgtttttcggtcgggttaacgatgaagatctcagcaccaaaagaagttgtgtcctgcacaaggtacccttcgttcgcgttgtagaatgttggaagagaaatcaattgtgtgaatccccactctttttttgcatcggtggatcgctttcactgttccatctataatccaaatccaaaacacaatcaactcggttcatgtatttacaattgctaaggaaaagtagcattggccaatatatcttataaatagataatagatctagtaaaactcctttcacattttaaagtacctgtaacagacaaatatttctttaacttccgattgtggacaaagagtttgagatcaacattcacttcccaccctcttggaagagtttctgtctcttctatcctcgcgtaaagtgaaatatgattatttataccgtcctttcggattaccattcacgtacaaaaccaatctcctgatttatttatttgcatcataattagctcaaaagatataattagtcaaaaaaaaaatgggatagagtgtaagatatactaagatctttaccatttgtaaccaccagcctcaaaaacagaggattcatagggttcaggtctcgtcctaattattgagaagctggttatcgaaagaatcttatccgatggtcggtcatccctccacactcttgtcactcctatcaataaaaagagttcaagaaaatggttatcacagttttaagttttaaccaataaaatctaaagaaagaaagtaagtgtacgtaccattcgtgaactgtgagaactgttgtattctattcctctgccttctgtggcctaatattagcaaaactattagttttattcatttttacaaactagttttgtagtaaaaataaaaacatatcgatagaaaaagtgcttaaaaagaaacctgtttaatgaggagctcagcggaagaggaagtgatgaagagaaaagcgagagatatgaaacctatactccatttttgagtgtccattttttgagatgtggttttgttttgttttggtaacgctttccatttatataaacagagacacttttgattacttattgatcgagttttagtaacaaatataaaataccgaacgtggactcctcgtggaagcaataataatacatgtacacattcactttcactgtttttgtttgactttgaatgtgtaaagaatcaaatttgatttggttgtattgtctattttatgcatcttccaaggacgt

SEQ ID NO: 20892 - DNA, 1417 bp, Arabidopsis thaliana landsberg
ttatggaaatggggcgagatttttattggtctgtggccacaaaaggtctggcatattgcgggaaagtattaaatttatgaataaaaaatgatattttttcttcaatcatttaattttgcacgatcatgaaaattatcgactcggaacatttgatccaatgattaattaatattatttccatttcgcaatataaattgttttagttaaaaatacacaaattagtaatatttacttttttaaagttccaaccaatcataaaaaaagactttattatataaatacttatcaagtatttaaaataatatataatttacataaaaatttgaaaacaatttatattataaaacaaaaaaatggttcaatacaacttatattatgaaacgagtctaatacaacttattttatgaaacagagtgagttcgttagaaataaaaattgggtttagaagaagttatggcgatcactgtcatattacccaaatacaaaattgaatctaaatcatatgatatttttttgttttctttgtcaactatgaattattggtctaaaaaaacatttttgctgtttattaaaatatttttcaaacttattgttggaaattgggcagatattttgttggccatgagattttggaattttgcgggaaagtattcattcaatttataaaaagaaaatattttgattggggaataataatgatgattgttgcgttggaatatttggaaaaggtaaaagcaacataagcgtgaagtaccagctaccaaacgaagatcttgacgcgttgatttccgtatcaacggacgaagatgtagagaacatgatggacgaatacgaccgcgtcgcacagaatcaaaacccacgcgcctctcgtcttcgtctttttctcttcaccaaaaacgtcgccggagaagaagataacgatagtcgagctagcagtatcagctctctcctcgatagctctgttaatcgggagcaatggttcctcgacgctcttaacctcggttcttccgccgccgcaaccgcggtatctaacggtgggtccggtagagtctttgagcgagttagatctgaagtctcgtcgattgtttctgaagttcctgattatctctttggattggataatttcgatgaaactgctccgccgcatgagcttcgtgatcgtgatccgagagctaagatacaacgagaagtctcgacgctttcggatcctggttcgcctcgtcgcgatgttccttcgccgtatggttcgacgtcttcggctcctgtgatgcgaatatctacaccggaactttcaccaccagtttttactaaaccggaaagtccagaaccggtttcgactccgaaatccaatcctcaaccggaacaagtaatgcaacagagtaatctcccggttaactcgcaatggcaatatgcccct

SEQ ID NO: 20893 - DNA, 1198 bp, Arabidopsis thaliana landsberg
aaattacatctcttttgccaggtgtccttcaccgtttaatcctcggttcgctaaattagttaattaattaattaattaattaaatggacttgtaacacccaaaacgtatgaatcagcagaaatctcacttcagttgaatctttggatcaatttccaaaataaacccaaacacacaaattaaaaatctcatttttatgaatgtttctgcttcttcttcttttgatccctaatactttcttcttcttcttcttcctctccttcattctctgctcaacgttgtttgacttcacagatagaaacaacaagacgagtttcatcgctgagctcttgagaaaggtaaaaacttaaactttatctctatctttcacattcatgtgaagaatcactcatttgtagagttgattcagtgtttaatggatttgacggaatctgaaaagactatgactaggatccaaaaattccgatttctgggtgaaacgagaaatttatggagaaaaactagctaaaaatattggcaatttggaagtccttggattgcaaggaaccctaacttttttcgtttgtttcaggaacattgtgtgtttctctctaaatcatggcgacactaaccgatatcggagtcgcagcaacgatcaatattctaaccgcatttgctttcttcattgcctttgcgatacttagacttcaaccagttaacgacagagtctatttccctaaatggtatctcaagggtttaagaagtagtcctataaaaacaggtggctttgctagcaagtttgtcaatttggattttcgatcttacatcagattcttgaattggatgcctcaagctttgagaatgcctgagcctgaacttattgatcatgctggtttggattctgttgtctatctcaggatttacttactcgggtatgtatatttgtatatcctttcttctttcttgaatgttttaagcaagtttgtgatatctttggtttaatttgtaggttgaagatcttttttcctatagcatgtattgctttcactgtaatggtaccggttaattggactaactcgacgttggatcagttaaagaatctaacttttagtgatattgataaactctttatatcgaatataccaactggatcatccaggttaagaaacttctttaatatttgtggctttagtcgattctagtgatgaggaatgtttttac

SEQ ID NO: 20894 - DNA, 3230 bp, Arabidopsis thaliana landsberg
tagcaaatcaaatgatgggaacatttaaatatttgttgtccaaactttctccattaatttcaacgatctttctccatttcattagaaaataatagtgcaaattaaaatgagaggcagaggttcaaaaaaaaaaagacactgttcgtcagaggattgataacagtgcacaatgtacaccagacatatcaatccatgcgactgctagtcatagacgctatttgaggctcacgattaagtaatagcctaatgagcctacactgatgcatataaactttacgggcctttcgtattacccagatgggtcttcggaccatcactaatctgccatatattcagcaacatgcataaaatttgaattccaaatttccttatacatatttgttgttaactagttataataatttttgcacactttcacagttctacttacatccacatattcttatgtttaaacagtcggattttcaaatcaacaaaagattagcaaggacttgtatattatataattcaaaaaatttaaaatttaaaataaaattatccataattgtaatctaatggtttgtgttatatatatacaagtgttgctaactgttgtgtcaccatccaaattcagatccatatcacatcataattgatgtgttattatcttatacataaatctacaacgtattcaacaaaagataatattgtataaaattaagtatacagttttgttaataaaatacaggaagaagacattgcagacggtaccttatagttatttaagtgatccgataaataaaactttatatattcatatttttgggcatcaaattatgttcatttcattcttactttatacaagtatatattattttcagcccgtcgtaaaagtcactacatcccatatccaatcattatcccaaaggatatgatcaaatagaggctctaaaagactaaccaaaacctaattatttttaaagataattacacgatagcatggatgcaacctatagtcctattctgtatataagaacataacccataattggacaacgacgtgatgacgacatgggatgaagcacgatgcaaagacaaattagtgatcactttcactaatttaattaattttgttagtcaacgtgaaacgttcatgcgtaattgcgttacaattccattgtacaaactgcaatatcctctgacagacatgcaactttttaaatcttacttgaccaaatagccaccatctcacacaccccactggtttttccagaggttaccatagtggttctatgatacatcaaaatctttgtaaatataaaaattatgttttttaattcgataagttgattcactcatattgattgtttacaaattttagtagtgaaacaaaaggcattagcgttaaaatgtgataaggctggaatattggaattgcatggttacgatttacgaagaaactaaacaattatagaaccatcacattaagaaatcttggcgatatttgcactaaccggttgcttcattgataaatacatcccaacttcttgacggaaacataacaatcatatcatatagtattttatacaaaaatgttatatctaaattattaattagttatgctgtcaaccaaataaacaaaaacatattcattaattatgatgcaacatctttaaatagtgctattgttcaaacttcaaagtcaacctaccaaccacaaactctttgtaaccattgagcaacctcaaatcgtagtctcttaatgttcctccacacaccatattttattttattttcttcaaaagaaaacagaaatatagacaagttattgtttttcattgcatggaccggagagccaaactgacgaaagtttggtcctcatgaaccccaaaggtagaaccaatctcaaccgttcaatcatcggtggtcatgatcatggctcgattctacaactactcctctttctgctactcctctccagccacggtggatttaaattcgtcgcgggtcaagccactcacggtggttcagacgtttccggagatagctctcggtttgacccaaccatggcaatactcatgatcgtcctcgtcagtgttttcttctttcttgggtttttctcagtctatatccgaagatgtctcgagcgagtcatggggatggactatggaaaccccaacgacgccggaaactggcttgccacgaaccggcaacaggcgcgtgggctcgacgcgtcgatcatcgagacttttccaactttccaatactccaccgtgaagacgcttaggatcggcaaagaagcactcgagtgttctgtttgcttaaacgagttcgaagacgatgaaacgctgcgtttaattcctaaatgctgccacgtgttccatcctggttgcattgacgcttggctccgctctcacaccacgtgtcctctttgccgcgctgatcttatccccgtaccgggtgaatccatagtctctattcaaatacccggtttagttaacgatcctcctggttctgatccgaacggtgatcggattagatctttaggttctcctgatgcgcgattgattgagtcagtggcgttaacttgtaaccagagcatgccacgtaggtctatgtcgaccggatggaatttagctggaatgttcacgaattctgaccggaccggtcaacattcagagaatctcgaccggttcacgcttagattaccacaagacatacataataagttagtgaatcccaacctttcaaaagttcatgtggccttacctcaggtgatgagttcaacgagaggatatagaaccgggagcttagggagtgagagaaattatttttattatgaacggttcgaccaagatggccggttagatcgaagaccattctccataactcctccgtaccggacaagttcgatcaatcacatgtctccaggtggcagtggtggtgatcaggtgcgtgctagttcatccaaaagtttgcttctagctatgcgatcgccgttcgatcgattatttcttggaaagaacaacaacgtcggggaaaattcttcggatcaccttcgttccggtgatgctactccgtcaaatactgtataatttggttattgagaaagtctctctgtacatatctttattttctttctgcatttttcagtttcaattataatgtcccggaacaagtcgacatacgaattatggtttaatacgacatttatgaaaatttggggataaattataaataaagatatttat

SEQ ID NO: 20895 - DNA, 1523 bp, Arabidopsis thaliana landsberg
  unsure (1)..(1523): unsure at all n locations
aaaaccgtaattcctgtactaaactccggcggcctgatttttttcgctgcttcggccgccgtgcgcctgagggggtccggatcagtggatgccggcaccggcaacctccnnnnnnnnnnnnnnnnnnnnnnnnnnnnnnnnntcccgcgcagagcaagaaccgccacgtcgtgagcacgtgcggccatatccgccgtcggataagttccgagccagactcgacgctgatgaatcggttcacggacttcgcatacccatttgtcgccgtccctacgccgcacgcctctgtagattgggtgacgtgtctccttgaaaatcctccgtcctgcacgcttcttcggcttcatctccgccacggtgatatcgtcgttttccatctccgatctggttccgatgaagcagagtaaacttttaagcaaaactaaaaacaaaaagataaaaatttctttattcttaaaaaactgttaaaaagttaatatttttcacaaattatcgtattgagtttcttaaaatagaactagattgtcaagaagtaacctacttggttcttacatattcgaaccagaattcaagattcagttgagtttgaaacatagttataaacagagtaaaatgcaatataagacagagaattcaaaatatcaaagaagatacttcacaatggtcaaatgtataagaagaaaagctgaaattacctgaaagggttctcgaaatagaattgaaatgaagctttgtgttgtgtgttgctttgtgttgtgtgttgctctgttttgtggtaatgaagtagaagagtgaagtgacaagagactatataggcgttggttggtgggaaccacaaataacgaatcgaacgcgcgtaagacatactaaactgattcacttagttgtgaatcattgccatgctggcaatatttaaacgtccttttttttatgttagctgttagttaataatgttttatatgtttgatagtgatttaaaattgtaaatcaataaatcacaactattttctgaagtcaaaaataattattgattttcagcaaacatttttctgtgttatatactctgtaatatatcatagaactgaatgtaaaatgcttttcaaacaaacttagaaaattattgacaattagattttaacccgcgctataccgcgggacgatttattttttaaaagtaatatatattaaaatttgcaaattttatttttataaaagatttatattttacagtttataattgttattaagtaacactataccacaaatccatgagacaattgttaaaaaactgaagttttaactcctattaaaacagcatattaataatattttaaatttttataaatattgattcaaatacatgcaccatataacccaattccaaaataaaacccgttctgtaatttctttacccgtcccgtgatttgttttttaaagtagtaattttatgttttaagaactatttcttatctataaaagttttgcaaattgtatcattctctaatacatttataattaatagt

SEQ ID NO: 20896 - DNA, 1235 bp, Arabidopsis thaliana landsberg
  unsure (1)..(1235): unsure at all n locations
gaaaattgatgattttgtaagatacatacacatcttatctttcccataaatcattctaaactacctttattaataattctatagattttttcttggttcccactttttttagcagttttgatttctgagtacaatgctaatttattcctaactgacactctggaaatttgggtccatatacacttctcatggttcacttaaacatgactatctttcattcatagacagaagaattatgaattgttttcttgatgctctatcgtgtagatcttaaccggtttattgatttttttgtgtaaagcccaccaagataaaagagaaggcctaactgaggagataattgggccacatataggcccactaaagaaaaacctagaagcttaaataagtacctatgagaactctgcgccatcctcttctgcctcctccttcactcttcatcttcaaagactgcgccttttagctcaggtttgttcttcgatttctcccgtaagatcttttgttctaacgcctcctattaggtttgtttcgatctcaaagtagccatggtcataatagtatttgattggaaattcgaagtttgagtattttgatccccatgattaggaactcttaagtgatgtcttagtgaatcaattttcgatgttgttctttgcttctaattgtgatctgtcttttagcaaaataaagtttcgtttttgctgaatcgttggggttttagtagttgatctgatcttgtctgctttttatatcagtgaaaaaggttcgagcttcggaaactatggcagcattccctaaccttaactctgatgctggattgaagaagctcgacgagcatcttctcactcgcagttacattactgggtaagtttcaatttcttaaatttgtcttttttttcaagtgttgtctcaattaagttgttaacatctctaatagattagatccttaatctctacctttttgaacaaaaagagtaataattagtttcctttgtgtatgcttatagataccaggcttcaaaggatgatatcaccgtctttgcagctcttgcaaagcccccaacttcacagtatgtgaacgcttctcgttggtacaatcacattgatgccctcttgaggatctcgtaagcttgattaccttctattgttttccatttactaatggattaaagtttttagctgtctggaatctggattaatctaatattggtgtcgtataatcatgtntctatata

SEQ ID NO: 20897 - DNA, 2019 bp, Arabidopsis thaliana landsberg
tcttcctccataacttgtcttcttggctcccccttgatcacgttcctcttcttgagtgcctgtccatcatcttgggttggggatgcaccaacgtcgatgaagaaggctgatcttgctcctgttgttcctctggtcgcacatcaccaatcgccatcgtgcgcattgcggccgtcggaacatcatcttcatctatgtcatcaagatcaacttgctctcttggagagccattagtctcatcaaatacaacgtcgctagaaacttcaaccaaacccgatgatttgttgaagactctatacgcctttgtatttgagtcataccctagtaaaaacccttctactgctttgggagcaaatttggaatgcctacctttcttcaccaaaatgtagcatttgctcccaaatacacgaaagtaagagacattgggtttgttaccggtaaggagttcgtaggaggtcttcttgaggaggcggtgcagatatagctggtttatggcgtggcaagttgtgttcacagcttccgaccaaaactgctcgggcgtcttgaactctccaagcattgtcctcgccatgtcgataagtgtcctattcttcctctctaccacaccgttttgttgtggtgtgtagggagcggagaactcatgtttgacaccttcctcctcaagatactccttaacttgtaagttctccaactcggacccgttgtcgctccttatctttttcaccttgagctcaaattcgttttgagccctccttagaaagcgctttagggtcccttgggtttctgatttatcctgcaaaaagaacacccaagtgaagcgagaaaagtcatctacaattacaagaccatacttacttcccccgattctaagataggcgatgggtccgaagaggtccatgtgaagaagctccagaggtcttgatgttgtcatcccattcttgctgtgatgagtgcttcccacctgtttccctgcctgacaagctgcacaaggtctgtctttctcgaagcagacattggttagtcctaacacatgttctccctttagaagtttatgaaggttcttcatcccaacatgtgctagacgcgatgccacagccagcccatgctagtcttagctattaagcatgcatctagatcggcctcctctttcaaaaaatcaactaagtagagtttgtcgtctaatacacccttaaaagctaatgaaccatcactcctaaagacagatacatcaacgtttgtaaagagacaattgtaacccatgtgacacaattgacttacagacaaaaggttgtaaccaagcaactctactagagatacattcaatatggagtgctcgttggtgatggctatcttgcccatgcctttgaccttgccttggttcccatatccaaagatgatcatatcttgggaatccttattcttgacgtaggaggtgaacatcttcttctcccccgtcatgtggtttgtgcatccgctgtcgataatccagcttgaacccccggatgcataaacctgcaaggcaaatttaggcttgggtcttaggtacccaactcatgttgggtcctacaaggttagcacaaatatccttagggacccaaatgcaagttttgtctcccttgcatcttgcccctaattttctagcaactattttcctatcctttctacaaatagcaaaggaagcatttaaagcacaataaattgtagaaggttcattcactactttcctaggagcatgaataatattctttctaggcacatgatgaatagcatttctcctagacatatttctaccatgcatataggaagaactagaagcaaacatggcatgagagtcaaaatcatcataagcattataactcctataagcatttctagtttgtctcctatcatgatacataaaagcatggttccttttagtactactagccataggagccttccctttctccttggcggagatggggccttatggcttgtcaagttcttggcttcccttttgtagccaagtccatccttaattga

SEQ ID NO: 20898 - DNA, 2424 bp, Arabidopsis thaliana landsberg
cgacgacaacaactacgagaaaaaaagacggttaattcaaacttttcctttgattattctcgtattccgcaaagttccaatgctcacttgctttccattcccctcggtaaacctccccactttgatggagaggactacagattttggagtcacaaaatgcgtagccacttgttctctctccatccaagtatatgggagatcgtagaaaatggaatgcactttgatagtacggatagtcccatgttcattaatgagcaaattcacaaaaatgcacaagctactactgttcttctagcttcattatgcagggatgaataccataaagtgagcggcctggataacgccaagaagatttgggacaccctcaacatctcacatgaggggaacgacgccaccatgctcaccaagatggagttggtggaaggcgaactacgaatgttcgcgatgatcaggggagaggagccaactcaaacatacaataggctcaagaccttggtcaacaagataaggagctatgggagcacgagatggatggaccacaacgtcgatcgacttatgctaaggtccttcactgtccttgatcctcatcttgcaaactctattcatgataatcctaggtacatcaagatgacgcccgatgaaatactcagaaagttcataagcggccgaatgatgatcaaggaggcaagatatgttgatgaggcattgaatggcccaatccacgagcctcaaaccattgttctccaagcaacaagaagcaaggaggcgctacctagcaaggtggcacaaattgaggcggtcgggcttaatgatgaagaaatggccctcatcatcaagcgcttcaagacggcgctaaggggtcgcaaggagcatcccatcaagaccaagacaaagggaaagcactcatgcttcaaatgtggtaagattggtcattttatcgctaattgtcccgataatgatagtgaccaggaacaagggaacaagagggaaaagaagaaggcttacaagaaggctaagggcgaggcacatcttggcaaggagtgggactcagattgtttgtcatccaactccgacaacgaaggactcgccgccaccgccttcaacaaatcggccctcttccccaacgaaggtcacacaggcctcatggcgaaggagaataaggtatgtactaggaatactacttatgattcttcaagtgaggatgaatctagtgatgatgatgaaatagattattcatgcttattcaagggcctagatagaaccaaggttgataaaattaatgaattaattgatgccttgaatgataagaataggctattagaaaagcaagaggatcttttgtatgaagaacatgataagtttatagaggcacaaaaatctcatgctttagaaattaaaaggaatgaaatgctttcttgtgaattatcttcctgccatgagacaatttctagcttaaggagcattaatgatgatttgaatgctaagttagaaatagctagtaaatttacaacttgtgtagaaaatgttgttgtttgcaatagatgcaaagattttgatattgatgcttgtagtgaacacatagcttctattgcaaaattaaatgatgaaatggctagtcttaatgcccaacttaaggctagcaaaagtgattttgataaactaaaatttgctagggatgcctacacgattggtagacatccctcaattaaggatgggcttggcttcaagagggaagccaagaacttaacaagctataaggctcccatctccgccaaggagacaggcaaggcccctatggcaagtagtactaaaaggaaccatgcttttatgtacaatgatagaagacagtctcataggagttgtaatgcttttgattcacatgcctatgattcttatgctatgtttgcttccagttcttcctatatgcatggtagagatatgcctaggaaaaatattcatcatgtgcctagaaagaatattgttcatgttcctaggaaagttatgaatggatcctctacaatttatcatgctttaaatgcttcctttgctatttgtagaaaggataggaagatagttgctaggaaattaggggcaaaatgcaagggtgataaaacttgcatttgggtccctaagacaattgtgactaaccttgtaggacccaacaagagttgggtacctaagacccaagcctaaatttgtcttgcaggtttatgcatccgggggttcaagctggattatcgacagcggatgcacaaaccatatgacaggggagaagaagatgttcacctcctacgtcaaaaacaaggattcccaagattcaatcatatttggcgatgggaaccaaggcaaggtgaaaggcttaggcaagattgcaatatcaaatgaacactctatctctaatgtgtttttagttgagtctcttgg

SEQ ID NO: 20899 - DNA, 1282 bp, Arabidopsis thaliana landsberg
  unsure (1)..(1282): unsure at all n locations
tcaaatgtaaacctaaaaatattagttatatattttatattggcagggaccagacatacccaaaaactaaaattataaatccgaatatactagaatttttagttattcatatacatttgaatatatttgggataaaagtaaccaatgatatagttttcttttaggtaattttagtattttggttacatttggttatatttttttaaaaagtgaccaatatatnnnnggataattggatatttcggttagatttggtattatataagtaaaaaacccgaacccgacctaaatctgaaaatattttgggtagttttgattacttttgcatttttactaaaataatcgaaccgacccgaacccgaacttgaaccaaaccgaatttttagaatactcgaatggtttttaaccttctaccctaatagacccgatatccggaaaaaaaaaacgaattcgaacgggtacccgaatacccacgcttcaattaagaacagaaaaagaaaaaaattaactttcagtgacctataaaagtttgggccctagaagagtcttttcgcaacaccaaaaatggcagatccgcaagcccaacaaggcagtggcattgccaaaagatctgtggcattgccaaaagatctggacaaaaaaaaggccaagtggtgtacaaagcctagatgtaggatataattactcaaccgtcgaacatattttccatagatcattcatagacgtacgcatcatctaatcaattcatcgtcgtcttccacaattgtcatcaccgatcgattttccgactccgacgtacctcctcttccccgttaccttctcaggtctcaatctggctttctctatttttcgcctaattcctctttttctgattgtgattctgctttctaattttgatcctaattttttgtgcttatactccggctaaactcttccattttcttcggatcaccggagttttcgtcaattattcgttatcctttttctcttttgatccgtcaattttacttttctgtcttttttttttctcctttttccccgtgttgacatttctttcttctgtacgtgatctagttatcttagggttttggactgctatacaaaacaatcaattgattttagttttatcttttgaatcgttgtaagaatttcaataacctagtcttgttgatgggtttgggctattgaatctgttcttaagtttcagcttaatgtaatctgttcttaatcagaatagggtttcatcatcattgtgtgtgttgctgattctgcaaagttttta

SEQ ID NO: 20900 - DNA, 3365 bp, Arabidopsis thaliana landsberg
  unsure (1)..(3365): unsure at all n locations
tgtcaaatgcgatgcgctgaagagacactccatctcagtcgtccacatcagcagcaacttatctcgcgtatctcctcaaaatctttcggttctggaatctgaaattaaatcgtttttgttgagtttatcctcaaaaccaactgatcttatcacatctatcatctcatcaagaatactttcgcaatcttacctgacctatatgtccgctcatcgagttcccgtactcactcaatgagctgggggcaaatgttggagctggattcccctccaggaatccacctgcgaaaataccaggccagcccacaaaagcccaataagcccaccaagtagaggacctacgcagttgatgagcccacatacgcgaatgagtacttgggcctgataagcccgcttacctaatgaagggagataagcgaataacaacctaggaactgacaaggagatattcgcggacgagacctgatatctcataactgacctgnnnnnnnnnnnnnnnnnnnnnnnnnnnnnnnnnnnnnngctacccacgtgcgtagagctatataaggaagcaaggacgacttggaagacatatacattcagcttaacactaacacctatacttttacacttgtaatctcattctacattgtaaaagttctactatcatcaatacaaaagtccattcgttcttagcaatataaatctcaaagttcttgtgtagatctagccctcctttcttataaatctatttacaaatctctagtgtggatttcagaacccacatttggcgccgtctttggggacggaaatagatccttccaacaccaaaactaataaatcaattgtgacaaacgatcatggatcccagttcatccaatttaacgagatctaacgtacctgcttagatcccaaacgataatgtcacggacgggcacctcccaacggatcttcctttttaaattcaggccgatgctatccatgacactccttcgaccccccgaccggcgtggcaaagacaataccaggatcctcctcgagacctcgcggaaacgtatctttgttgctcccgaactcgtccaaaccaatcggcgttccctgctcatcgacattcattggacgcaccactaacatctccgacacttccgggatatccagcttgctcaaagtgaagtccgacacctcctttgatgtgcacctcgcctccacatcatccagctcagcttgctaccaaggtctttccacggttaggtcgacagcagccttcacaatttgatcgatcaaagccaagtttgactccacctcggctgcttgactttccagcacggtgaactctttcttggcgacccacttatccttgatcccacttagcaacttcgaatacgaggcagccagttcaaccttagcatcgtgaaccgccttgttcactccctgcgcaatcgaagtgaggtccaacacccttttagagagctcgtcctttttttcattcaagcgatgaatctggttcctcgccatctgcttatctgcttccaaccctctgaactcctgctccatgatcttgatcttctcggcataacctttctcaagatctttcgaggtggacagcttcatcttcaacctgtcgagctacgcctggaaacgtagccaggtcagaatcatcacatcatcaataaaaaatatacaataaaataataaccgaagcgtacctggaacgatgcctcgcgctcctgacctgacttcacgctcgctatcaactcctagatgaggatcttcccttcttcgagctcgctcgccgaaggatccttgcttagacgttgctcgtagagagcaaccaacttgtttatagcagcaatcgcctgccgaaaaaaaacagaaattaaaactggcataaaaatagaaggagacagtaatcgattatgacatggccctccttcgccatcatgtcagcataagccgccgcctaggccatgttcttcacaccgggaacctaacagttcctccctttgatgtgtcggagcaggttcgccaacccagccttgtcctcgatgatcggatgatcacgatcgtgagtgtaagaccaatggaaaggcctgtttcctgcagatcctccacctaaattggacgtctgcctcacctcctgagaccggttcggaccttgagaggaagacctacccccacctcttgatcctcggcctcagccttgggaccttcccgatgatcgcctgtctacggacacagcagcctccgggttagcagccaagggtttcaccctctcttctcttgaaggggcgacctcctgatcaatcacgatcagctcagctgtcaggcgcaccaccggcaggagccgatctctcttcgaagaagacggtgcaccgtaagccctaacagcttcagacggctcagagacctgagcggccagctaattgctatttgccgacccgccgcaggagaggtctaggcgttagccccaggaagtgaaggatgagacgttgaggcttgagtgtgtgaggcagcaaggctggttcgagctgaggccaccacggccgacaggtcagcagcacgagcagaggtcccgcattggctcgttgaacatgaagacttggtcacctcattcttcttctggaaataagcggaaggtctgaagtagagctggaatcgggaggaactaaacagatgaagtgtagtgtttgttacttagtaactcgattgtgtagctagcgcaatggcctatatgtaaaaataaaaacaacaagtgaaactcatacctataggcggatctgcgacatggttcggttggacctgtgggacctcttcgagtggatccggctgcgctgctggaagggcaatnnnnnnnnnnnnnnnnnnnnnnnnnnnnnnngttacgttgcgatccctattgaaggtggccagtcggtttgacaacttccaagaagggtcaacagatagagtttcgtctcgaaaaaagtgatttctttggttcttgctgcaaaataatcccaagaagagcgatattagtagcaatactaatgttcaacaaaaaccaatctacacacaactaaaacaataaagtcaaaacgatagatttccatctgacccaggttacaggaccaggtcctcgttatccttgcttggtcaaaatcgcagaccgaatgatgtccaccttgaagaagaagtatttggctcgctaatttgaataccgacaagacttcaaaactcctagaaaaaaaaaactaagaagaacacttatatagtaagtcccttgatcgctactggcataaatattaaactgacaaaactgcagcaggtcgtggatagcgaattctctgttcacctctcgggcctggatcaatatctcctgcacgtggcgtgcgtaatttggacacctt

SEQ ID NO: 20901 - DNA, 574 bp, Arabidopsis thaliana landsberg
ggctccctttatctctgcttcaatttgattcactagtggacttgttcaagagttctcatgctacacttaaatatgttgcatgaatctttaacaaaagaaaggttgatatagcagcaaaaaggtgataaaactcttgtatgaaaactgtacatactagtgattaaatcaatttgcatacaaactcacacatttttttttcagtcgtcgatccaaactcacatatattgataaaagaaccacagttttacgaagagtcttgcccatcccctgtaaaagtggtcgcagcgacacccttactatttcttctccgtttcttttgctgttgttgacgtttaattttcagtcgccgaacttggccattattagtgtgggacaattcgtaccgcgatcgtgttttgtaaatcaaattatggctccctaaaatgtaatatactttcacttttattaagcccaatttctacaaggaaatgtccaatcaagttagcccaaaaagtagcatattactcccaatcaagtaagctcaagtttcaataactatggccccgaaagatcccaaggatcaaatgagtcaaaa

SEQ ID NO: 20902 - DNA, 459 bp, Arabidopsis thaliana landsberg
ttttttaacccttaacaaaaccacccatttttacaaaaaaaatcaactttaatttatttttttaaacactaaacaaaacaacacacgttgcaaataagatctcacaatgttccgatccttaaacatacttaatactctcccttatctaatgcaatgtaccactaatcgttttcagccccttttgaacaatgatattaagtacatgagctgcacatctaacatggaaaaactttcctccacacaacaaatcatctctagacataagctgagatttgatcatctcttgcattgtatcattgttacccacacgtttaccgtgatggagaaaattttcttatcaattcccgagtctttccacttttcaagaatctcaatagctaagtatgcacaagtatgcggaggaggcaaagcacaaaacactaagatcttgttcttcaacttccaatttttgcgatatga

SEQ ID NO: 20903 - DNA, 1055 bp, Arabidopsis thaliana landsberg
tctccagagtagaaagagatactggaggccaagcgccagcgtgtgtccgcactagccaaagtgcgacaaatgatacgcgacgaggagcagaaagcccaagacctcgatcgcgagattcggctgctgcagcgcgaaggccacctcggtctacagcaagagcacccctccaacagcgcacacaaccggaggacacgcgcgaaggccacctcggccggcagcatggcccacccctgcagcaccgggcgcagccggagaacccgcgtttcccccagcatgattacgtctcccagcacggcgcgccattccaaggggtcaactacctcgacgagcgaagtcccctggcgccacacctacaagtgacgccttggccagctaactttcgagcggggcataccccaagtacaacggcagcaccgacccggcgcagtacatcatgagttatcaagtcgccgttgcatcagccggaggagacgacgccacaatggcgaagtctttcatcatcgccctagagggcccagcactaacctggttcaccagattgcctccgctgtccattgattcgtggagaagtctcagggacaagttcctcctcaacttccaaggtaccgtccagacaccgacgctttggccgagctctcgctttgcaaacagctggaaaaggagactctgcgggagtattaccgcaagttcttaacactcaagtcgcagctgccctctgtcgacgatcagatcgctatccactacgccatcaatggccttcgggccggcgtcctctacagccactgtatcagagatccacccaagagcttgcaggagctatatcagctcttcgaaaaatatgccaaatccgaagagctccaccagcgcaaggtcgagtcacaacggaaacccaaagatgccccgcagtccagccgcacgtggacaaggactccgcagccagactccggtcgagacggccgcagtcagcagcaagtgcacaacatcgtaaaccaacagcctgctgctgacccccctcgccgccaggaatatcccccccagggccacggaaatggaac

SEQ ID NO: 20904 - DNA, 476 bp, Arabidopsis thaliana landsberg
  unsure (1)..(476): unsure at all n locations
atgataataaactgtgcagccaataatcttaagattagagtaatcagcagatttaccataccacatcttttcaggtgtcctacacttgattcctgtgtgcggcccacgatttatcaagtagcaggttgtacttactgcttcagcctagaaccgtttttctaaaccagcattagagagcatacacctagctctctccagtaatgtctgattcatccgttcagctacaccgttctgctgtggtgtatctctgacagtgtggtgacgagcaaccccttcatccttacacatctgattgaactctgatgaacagaactccagaccattgtctgtccgcagcctcttgatcttctttccagtttgattttccatcaaaagtttccactccctgaagttcttgaaagcttcatttntgtgttttagcatgatcacccaagtctttctggaataatcatcaatcatcgacacaaaatatctgt

SEQ ID NO: 20905 - DNA, 506 bp, Arabidopsis thaliana landsberg
ccctagagaccaccatcatcatcagatcaacataccaaagtcatgatagctatcatcatgataacattatcataaactcgtaattttcccgacaaaaaatataaactcttaattttttcgccaaaaacgtaaacccataaattttcaccaaaaaagtaaacccgtaattttcccgccaaaaacgtaaatccgtaattttccgccaaaaacgtaaatccgtaatttccgccaaaaacataaacccttaattttcctacccaaaacgtaaatccgttaaccagtcattaagctccctcaaacgcactaatttttaaccgctaaaccagttgttcaaaatgttttataacgcttaaaatcgcaaccgtccgattccgtaaaggaaccccgataacacgaacccaaaaagtgatgtaaaacggatatcttggatccaccatcggcgcccattagacaaaagaaaacatcccatgatcaaagtggaaaaggttcatctttatgatctcctg

SEQ ID NO: 20906 - DNA, 2289 bp, Arabidopsis thaliana landsberg
gagctttatattgtaaaacgggacatcatacggctgatatctttcatatcaagatttatctaacgacgtcgttctggtgaccaatgcggcaacgatgggctgaaatgagcagacacaactctagagtcaagcagctccatgattggtgtgaagctcacgcacctcggtaccttatactgattaatcgatgcgcctctcgagatggcatagtccatgagctcctcaaacgtaccgttctgcaccacacgtatctccaacggaccgatcgagttatcagcgacccggctttgtctataaaccgagtttaaagattcctccatctccaaacagcacttagccatgacttcttcgctaataagagcattgctttgatctctaccaagtagctcccagtagattacgtaatgacccggtatagtcttcgtttctgcgtagcttgtgtactcgatcacacgtgttccttgctctgcaaacaacctcgacgcattctccactgctttttgtagctcagcctcgtcggttttatcagattctatgcttagcaaaacattctttctccgtatgaatttgaactgtggagcggaattatggaaccccgtgacacgaagaatgtcgccaactctgtaccggcagagccccgcgtaggtcgtgatcacgagttcgtactcttttcctacctcaacattagcaagctccacaagtgacgtttcgtctaatgatgcttctgctgctccatctccatcgtgattatgtgggaggaattcaaagtaggccatgtttggcatgattgtgtaagaaacctccgagggtttacacatcggctttaggttaatcccgaagtaactttcggacgaagcatacatcgtgcaagccatcggtaatccaccgctatagtactccaacgtcgggatatactgagccattgctccagtaacaatcacgtcgaggtacttcgtgttaggccatatctttgtgattatcccttcccaattctcttgtgaacaaaccccaaccaaaaactcagccagttcttgatcaggtttggtcaaaatcttggacatgcggtttttaatggcaggatcgaagattcgagaacttagggttccggttgaaatatcacgagcaagttccttccaattgttctggaggaagcttatggcacggaggagaccggaagcaaacactgcgccgagtcggagaacttcatggcgcattaagagaccacatagcatttgagcatacatgctttgggacgagtcggagcagaggatggcttcgttaggactagtgtagacgttgtaaggatcgtacggtcgtctcttgaagtggtcgcttttgtagtaactcgtgagaaccggacgagccggtaacccacctgacgtctttgactccgacttcacaaataaaaagtataagcctttgcctttgtctaatccgggcacgtagctgttgttaaacattttttggttaatattaataaatcgttacaaaaatagatttaattaaatacttaaagtatatatactaacagattcatcacaggcatgagaagactgtataaaagctgacgtcggtctaagtcttcttcaattgtcggcattagtttcctctcaccagcagatgttcctgagctggatgcttcacaagattaatccgcaattatagatgattaactctgtctaagagtctaagataacataatatacattttgggttaagtatataccttgtgaggaactctgtgatggggtaagaagacaagatcattgaccggtcaccattggcaatacgttgaatctccggtttaagatcatcgtaggtaaccaccggaactttggtcttaaatgttttacggtcagtgaatcccttgagaccaaaccgtttcaggtactcagtgtccgagttacgactaagtatctctctaatcactttcttctgaacgaaatcgacgttacgtgtcatctcctcaatgaaccttagagccttcacgtccttagtggacggtgagtgcatcatcggagatcgcagagctgaatcaacggtcatgattaaaatggtatttgtaagtgataatattagactttgtgtttgatgatgaggagatattgaaactcgacgagtatggggttgtatttatagtggcaagaaggagaaaaccaacgtcagccaaattccacgttgacataaaagtgggctcgttttgttatcgttagaccgagacaggggacaagagggaccgcggtcacgtaatctttggctagttttgggcagacatgtgggactcatatg

SEQ ID NO: 20907 - DNA, 3513 bp, Arabidopsis thaliana landsberg
taactcgaaaacctcctgattgaactaagaggagccacagaagagcggttggttaaacccttgagtggattaatcttaagaggggttttaggagaagggataggggaaggagaggaagaagaagaagaagaaccaatagatttctccgggcggcggaggtcaggaggactctcagaaggttctggtggttgcggtggtggttgcttaagggagaaagatatggaagccatcggagagtgacgtcggagaatggtggcggagtaagggaagtgtggagcagagagcgacaacacgctccctccattatccattctctatctttcccttctctctagtatctcttctctctggttataacgaaacataatccttataacttttgaaattttaccaaattgcccttctcaaagtccaaataagtattaacccaactttcgagaaagtttcaggtgaatttcgatattttctcccccatgaatcaactcggatctgataagcaaaagatattgttactatcgaaagttttaactccaattttggttccacataactcaaaacccattaatacgaaagagtctcactctgagtttaagacataaaaacttgaatcaaaagaaacaataaactttccaagaacacacatgtctttcttatccctaactgtgaaaaaagagagccagtcgtttgccttgattggctgatgataacaaagccatctcagtatcttctgggtgccctgccgcccccgaaagcagcgattggtgccatagcttgttgtggctcgactgcagagatgccgggagtgtcagacattcctagagaagcaagcatctcaagagtctctttgtccaccttgatctcatcagtcttgatggcagactcatcgggaacaaagtccatgcggcgttcacgctcctcttcttgaagcttgagtgagattccacggactggtcccttctggatacgtttcatcaagtgggtggagaatccagcaatcttgttgcggagtctctttgaagggatgatggcaacctcttcaaggattttcttgttagtgtggaagtcaagagtcatgcgagagtagtacttctcgatgacttgacgagaagatttcttcacggtcttggttctaacacgccccatctttcagttacctgtgtgacttacctgctgaaaggggaaaaaccaaagaaattccatgtctttagttagggttcaaaatccgtgattcaattacatcatgaaattaaaaccatttatgtatcaagaaatgcacctaaagcatcgattgttataatcatagttcaaggaaacatatgaacagcaatgtcaaatagaaacaatagagatccataagcatatgacaaatgaagaaacaaccaagtgtatagttgatttgtgtcttaaacatcaacattcaggtgtaacactaaacaaacacaggaatcacatgtaaatgcaatgtcaaataatgtctagagaattgcaaatgaatcaagaaatatacatcaacataacactgaacttgacagaggcctaatgtgattataaaaacaacgaagccattgatacaataaaactaaaagaatgaagatgcagcggcagtatccggtaataaaaatcaacccatttcataacttttccattatcttattaacgaatctaaccaaacctaagattcaaaagctacagagacaaaaaaaaaaacaacaaatcgaaacctacagcacaagcttttgcagtttccgacaacgacgcaatccctaagttacccagaacgtacctgcgaggaagaagaagaagcggcggcgtcaaaaatcgaagaagcggcgacggaactgatcccccttttttcagacgaagctaagcggcaacgcaatccctaattgcttatctatataaatataggttttccattaatgggccctaacattcgtcgcattttgttgggcctatttccaattcagtaaacaagaatatgaaggagaacacagcgacatgtattggaatagagagtacgcagatggtgaagatggtgagatgtcgtggttcaacgctggtgtgggaattggtcttggtgtctgtgtaggtttttggcattggggttggcctgctggttcgcgcctatcaatcaaccaccaaaaaaatcagaaggaggattatctagtttcattcaaattgcctactctctctctctccctctaggctctaactccaatccgttgcacatcacttttgactgcagaactctaagctatatagtctaagctaatactgctgtgtagtgtaatttttgttttatgtacttttttttatctctttgtgccttcaaattttgaaagaaatcattttcccttcttcttgtgtttggtgagattcagattgaaagaaacaaagcttgttgctggtaatgtgaatcttgttttctgcttcctgtaaataaaatgcttatgagtgtaaagagtttttggattcacttacaagccttgcaagagttactaatacacacaaaccctctttattttaatcaatgctatgtctaaatcatacaacctctctacttagcatcaagagctaaggttagtccatttcaaaagggttggttttaataatacattgccttcagaaccagtcaagggtggttttggattggctcaggggcaatctcagctccagaaaacccgttgctcgcgtgcagctggttattgttactgtgacccaatccccaaaagttagcagttttaacatcgtcttggttcatttgcttggagaactcttcatagttatactgcaacaaagctttccctccaaattcggttgggagattttcctcgtcgaaaaatgtgctcataagctccacgctttccgagttctttgggtaaacaaacttcaccttgacgaatgtctttgcatcaatgaagtacttcacaatctgtggaacaacacataattaaagaaaaaatgaaaatgccatcatgttcctgcacatacagacgaacaaaacacaaacaaagttgtcttgttgtctaactatgagatagaagtattgttttgtctaaccttccagaacgcctcaaagagtcttggaggattatagaggaaagctacagctagtctctcagggtagtgattttgcagaatattaatagtttctctggcagatttaataggcacactaatgctcattgaccaacccgtgaagtcaataagccaagacatctgttcttgatcctctggcagattcagaatagcattcgcaatgagatacaatgattttgtgttctacaaaaaatgtcaatgaaaatggaagttttagcttgtgctttgaagttaactcattaactaagaaaaatgatcattagattcctgcaagccgggtctcagtataagaaccgttcttccatgcctgtcatggaatccagctttgtaaactttaccagtctcaccttcacctgaaacttcattatagtaataagcaaaacgcaacgggtaagttttggttagataggaagt

SEQ ID NO: 20908 - DNA, 621 bp, Arabidopsis thaliana landsberg
ttaagtgattttataggctgtacgttaaagtgcagaaatttaccagtggtggtgatggtcttttatcttctgatgctgtttcataccgtggaggagatgaattcacatattgtatactatgaagtggccatgcaatgttctcatttagtacatctcccataacaaactttcctggacttggtctccacaaatatgcggctttgttaaacagtttctcaaacttaacaactccagcagaaggaccaagaggcatattgttcacaagttctagtcggtctgttgaacacaaccgaccctcaccaaccacagaatcagccatattccaatcaattatgatgattttaccggctgatgaatctttagcctaaggcatgatgcataaataaaaagtgactagagtcagtgtttaggttcagctagataattgacaagtgatgagaaaaagacattatcgaagatcctacagtctgattctcagaaggtgatgatacatcactgtctagaatgatcttatcgaaaggccaaggcatcttgttccctaaagcttcacctaatgtgaaaactgattgtgtaggcctccagaaagaagttgtggcgtctgacactgacttcacaacaaca

SEQ ID NO: 20909 - DNA, 2299 bp, Arabidopsis thaliana landsberg
tgcattgttatttttgccttccaaatatttttctatcgctcaaaacttcacaatgcacgtgaacttcgattacattaaaacataaacgagtttagtttgtaaactattcaagtttcattagattgacgataatttttgttgttgttatattacacacacaaaacattaagaaaagaaaaacaagtttgtatcctcgagacctcataaaaatcaagtttgtatatcctcagacctcataatttaattaaatcatcgttacgttttaaaaacaaatcactaaataatgggcttttaaacactaatgtatataatagatatgagccgtccaaaaaaacaaaaatcaacggtctagaaataatagctgcaaaacaaaacaaataaataaagaagaaaaaaacaaaaaccctagctagagaattgtctcagaacatgaggtcttcgttgctcggcaatcttcggaagaagttgaggctcccatcgggtaaattattgcggaaccacggtagttgcacccagtagcaaataaatacgaaaatcaaacacttacgaacatgtagatcccaaccaaggcaaacgacgagcatggagcaataacagagggccaataagataatcaaaacgaatggccgctcaagcaacgtaaaagccgctagtaaccgttcgccttgtgtagcagcatcccccattaataacatgacgttctccataatcttcctcaacctatcgtacctcatcctaagaatgttcaaatcgttctccgacgacggaaacgagtcaaactcttcggctaactcgtctaggttgatcgagtcaagtttccgtagcttcaaatcgacgagaatcaaaggaggcggagtgacgttccgataaaacaaccagttatatgtttgcctcggggacttgaggatttccgtaaaagtataccacaatgcaaagccaatgcaatacgcaactagccacgaagtcacaaccaatatatgtagtactcccaaaaaagaaacacaaaactgactccaagcgcaatgaatttcggagtacaggctgtcgtggatctgaccgatgcaatgaccgaaacacaccacaagaccatcttaacgactgtataaagcctatcaaaattatctttggatattcttatactgaagttcctactctttggtttcaacatatctgacacaacttcgcttctcaaagccggctctgttctcgcaagattcgcacaattaatctcaacagcttgtgctctcaacttgtcgatctgatacatggacaatggagatttgtaatgagctttcggtaacatccaacggaaaggagctgaataccgtgcatacccttgcgcaacataaacaaaacgaactgctagctgaagctctcccatcttcttcagtccgctgcttcccaacttcagaataggatacgagcaagtgtaaatccagtcactttgtacccggttcaatggaatcctcactttcccgatcggaacatcgttcgccttattcttgtcctccaagatttgtcgattatcgtagattccaagggttaacaccgtacacttctcgtaaacatcccacgaatactgctcgttccacttgggtgagacactattaaccacggttcgagtcctggcccatttattcccgtatttagccactacgtaactgtcgatagtctgttttttctcgtcgcttccctttaaaccggttgctcccaagatcccgatttctaatttcccgagcagaccgggccataacccttttacaaaagctctattgtcgctcgagtattgggtgcattcctcggcgacgtgataagcttgatcagtggctagtttcatcttgagtctgctagcgaacctcctcgaatcgccagccggtttgacttcagtcggcatttcaatgtcgtagaacaaagccggtgcggaacttggaactttgagcggagtcatctctgtcagcttcttcttcaacgtccctatgcatccttcgtgttgttcgtcttctctgtcgattaacctaatgtagacagttccttctaacggctctgatgcaacaaagattagatcttggttccatgacgggtttgtaccggaagaaactttcgtttttagagcgactttacctagagtagctgtcacataaaccgaaggagtcttgtttttatccttggaaatcaaatcatgacctgaaacaatggtaaccctaacataacagagccatggggccaagtagcccttaggtcgcgtgttgatcacgaaagaggcacacacttcacaggcgtctgaaaaccaagcctctgg

SEQ ID NO: 20910 - DNA, 748 bp, Arabidopsis thaliana landsberg
gatttatgaacaaaccacttttactgtaaaaaatttaaaccaattgttaaaccgtgaaagactagagaatatttggggtgggcttttggtcattagtccgatccggttcactgatttaatcagattttaaaccgggtgttgtgagtctttttaataccggtttttggtgataactcaaatcggatagctattcgattcacagtcaaactggttcaaccggtttgaaaacactggagaaaactaatcaaatggttttctcttcagtttataaaaatgaataaatgtacaatttggtttatatacaagcagatccagtattgagaagatagcattctatgcgttttgaatggaaaagaaggttttgtaggcttctctctctcttctctcatttgcatcttttagagagagaaagcatctgatcttctttttccggcaacaatagcttctttagtgtttgttggccagttctctgtccagaatcttatggcttttccagcatggatgtctggcttttgtccggcgatgtttagggcaacgtttgattgtcctggttcttctgacactgttcggttctttacgacgatggtcggtttgcgtttggcttccattggcttctttagcggcggtaggctagctaaggtctagagtttcaccgcctatcttcggtccttcgtctagctttcccccggattgattccggattagatttatgttaacttctctcgatttctttatattcagtgtgatt

SEQ ID NO: 20911 - DNA, 2275 bp, Arabidopsis thaliana landsberg
ttttgttatatttttgattctgatcgaaaataatgaaatattttgaacctttttgtcaaaaaaaaaacatcagaatatccgtgtaaaaattgtgagtttatattatttacttatataggtgcaaaattgtagaatagaccaacgaaataatcaaaacaaacaaccaaaaatgcaattgtagttacgcctatgaacagaggctttattttcaagttgtaagaatgaaaatattaaacttccgacacaactaaacaaattcttgtaactcattctccaactaaagacgtctgattcattcacgagcaaccactatgagctgtttgccgacgttcttaccatggaatagtcctagcaaagctgaaggtccgttctcaagtccttcaactacatcctcaacatacgttatcttcccttctcttatatacggaagcacaaaatccaggaactttaagtgtttgtcgaagtaatcagagaccacgaaccctttaatccgaatccgcttgtagatcacgtttgctaggttgtgtacaccttcttggtcctcaaggttgtactgtgagatcataccacatactgcgatacggccgtgtagtttcatgttcaggagcactgcgtctagcattttgcctcctacattctcaaagtatatgtcgattccttccgggaaacacctggtgagaaaaaagatatcatagttttgaatcagatctctatatcacattttgcctcctacattctcaaagtatactgaaccttttgagggcagcactaaggtctggttcttccttgtagttaaatgcatcatcaaacccaaacttggtcttcagaagatcaacctagcaaatcccgaaaaaggaagtaattgggcaagtcattctcctgaaggaaaaccaagaaataaaaggatacaaattgtccatcatctcaccttctctttactgctagcgcttccaacgacatagcatcccaccatcttcgcaaattgtcccacaagctgacctactgcgccagatgcagctgacacaaaaacagtctctcctttcttcggagaacatatctcgtaaaacccagcatacgcagtcatacccggaatacctgttccgatcaaatgaaacagttaaaaacattaccaaactaagcgtgataaatatatagagaaaaaaacatcacatagccaagcttttttcactaccaaactaattagagaggaataagatattataccaagaagtccagtgtagtaagataatggaacatcggtatgttcgattttgaagtgtgagtaagtagttaaagtaataacactgtactcctcccatccaactagtccccaaagtaagtctccctttttgtaatctggatgtcctgaatcaatcactttagacactccaagcccaatgattggctgcatagacaacatctttaacacgaagtatacaagaacaaaatatcccgaagaaatgttcaattttgctagaggtataatttcttcgagaacacaatattcaccagaaatgttgcaattaaaacaatttatccgtaatgaatattaattgtctaacatgcacatccgtttcatattagaatctcttgttgtattcttagcagcattatcgaaaattaaattcatacgagacaaccctacatactgtcatacacacggataataatatttcttaaacgagatataaattttaaaatccatcattggttccaaaacattattaagatgtatataaccaatgcaataaacaccatggtgacataagttgattccaatttcaatggagatttctaattttcagagaacaatggaaatatatgtattgtcccttgttcataccacgccggtcttgtaaggtggaacaagggaagaagacaagggatcgggctttcccatgcaaatacgcatgtaaggatcgcaagacaagtaaagattcttcaccagtactgaggtggatccctccggaagccttagatcaatggtagttgtggttattttaagatcagattcttttggaaatccagtaacatagtctgggaatatgatttgcttgttggtcaccgttactgcttctgcgttcgtcatttccgattttacgtacttttgatcactatgataatttcttctttcttacgtcgagatgtgtctgctttttgtagattgaatttctcaatgttgctttgatcataagaccatttgatatctttccttcattgatcgatccaatttcgtcgggagataaataaggtaaaaatggacaattatttttcg

SEQ ID NO: 20912 - DNA, 600 bp, Arabidopsis thaliana landsberg
  unsure (1)..(600): unsure at all n locations
attgtatcattattgcacagctcttgggtggaacaacttaaaaaagaaagacaaaaaatctaaaatatgtaaacttgcatatgtttgtttagtgagctggcggccgatcaattagctggagttcaaaggaagttactatatgaagacgagctcgcagacaaaaactgaaactcaaacttcttcttttttgacaagacaaaaattgaaactcaaacttcttcttcttctttgattttaaaaaatgtcttctactgatgaattcaaagtggacaccatgcctaacatcatggttccgtttcatcatcatcctttattaaggtatccttttaaagattcggaatcctgctctatgtgcgattatactcactttgcaaaaaaagaagagattctcctcggatatcactgtacggattgccgcttgagtttgcacgaccaatgcatcgaccccctttccctcaaccgaccatttctgtgcagtcacattctcaagatcttctggaactccactcgttcttacatatcatggagcccgctagatgactacatttgtcatttttgtcgacgtgagcttgggtggntatatgctcgttgcactatatg

SEQ ID NO: 20913 - DNA, 1796 bp, Arabidopsis thaliana landsberg
tttcttgattccttcctccattacacttacgagtctttcaccgggagcctccacattgcttatcgccacactaagctcacctctggtaaatgggttgcttgggctgtgaacccaacgtctacgggaatggtgggagctcaagccatcgttgcttatccacaatcagatggtactgtcagggtttacacttctcccatcagaagctaccagacgagtctactagagggtgatctgagtttcaatgtctctggtttgtctgcaacttaccagaacaatgagatcgttgtgttggcaagtctgaagcttgcacaggatcttgggaatggtggaaccattaacacagtgtggcaagatgggtcaatgtctgggaacagtcttctgcctcatccaacttctggcaacaatgttcgatcagtgtcaactctcaatctggtctccggtgtttcagcagctgcaggaggagctggaggaagttccaagcttcgcaaacgcaatgtgagttgaatcttttgtggacacacatctctttccctaattttttatttggcaacaacgaataatgattgattttggtaaaaaaatggttggcagattcatggaatattgaatggagtgagctggggaatcatgatgccactaggggcaatcattgctcgatacttgagagtagccaaatcagcagaccctgcttggttctacattcacgttttctgccaggcttctgcttacatcattggtgttgccggttgggcgaccggtctcaaactgggcaacgaatcagccgggattcagtttacctttcaccgtgctgttgggatcgctctcttctgcctcgcaacaattcaggtaggttttagttaacagtacagagagtattacacttgtcatgaatatgttgcaattactaagttgcttgtttcacacgttaggtgtttgcaatgtttttgagacccaaaccagagcacaagtacagagtctactggaacatttatcaccacactgtaggctattcagtgatcattcttgcggtggtaaacgtttttaaaggactagacatcttgagccctgagaagcagtggagaaacgcttacaccgccataatcgtagtactaggtatagtcgcggttgtgctcgaagggtttacttggtatgtagtcataaagagagggaaagcagaggcatctgcgaaaacaagtcaacgagtaggcaacgatggtcggtctctatacgtgtagactctgtaaagattagagtaaaatgttctggtttatttggtcattatgggcttgtggttgttaatttttgtttgttttcgagattaagttaatacatttgatgtttaatagttgttgaagttgaaagactcttgtgctcttttacaacattcatgatgtgagcttttgacaaaccattttatttcatcgacagtgaagtagtgtacatatgaatacatatatcgaatagatatctcgtatgtgtatgtgtgtgtgtgtgtgtgtgtgtgtgtggtgagaaagtgagaggaagattggttacctaatgtaaaaaaacaacaagatgcttcaaaaatgtcttttcgagtgttttaaaagggaaggaaggatgaattgcattagttggttcaagcaagatctcgaggttcaagggctgcgatttctctcaaaacctgacttttgtctgcttcaaacctctcatcctctgtcaaccaaatgaaccaaacaatgctttaataaggttaaggagcagaaggatcggatacaagcgtgtcacttaacaagattagtttcatacctttg

SEQ ID NO: 20914 - DNA, 1171 bp, Arabidopsis thaliana landsberg
cgttctggctattcacaagctgatgatccaacctagacaaagcaagtgtggaatttataaaccactcaactaaattcaaattaagatacaaaatccagtaatcaaccaaaccagtatcatgataaacttcaccctaatctccaactaacacatcaccaagaagaatttctatgtttagacactaaccacttaataacacctataatggcagagtcaaacatcaatctatgtaaaactcgatcacagaaccacaaaaattagagctttagaggtttatgtagtacctggttgcttgatttcgaaagatgttcgcttgctttgagagatgagcttgagttgaagaacccgtaagggaacagaacggcgcacacgcaaccgataaagataccgatgaggatggcgatcgcaattcgagatccacggagttgttggcttctatctctacgacccgccatggccgttgacttttctcttccttatagcgaaatcagaagccaaagacccagaagctcaaaatgaaaaaggactcctttttgatcacctagttgaagaaagttttggtaatgtggtggatcagagttaaaccctagaaatgttctgtttttcttcggaggtctcggtcatacctgccggcttttgaagttgttgagagaaagagagagcttgtgtgtttggcttcgtctccgaagacgacgacgatgaatcaaagctcgaaagtaatgttcctctacttcacacgatgtagattcctttctgaaattctttagttgaagatgaagtcttaaccgttagatgacatgactatttcgctgactcatctgacggtcaacataacacattataaatcgagattaaggagaaaaattaaactcaattatttacccacttgctagcacgatcacatgagacatgatagaccaaaacacatcttgactatgattgagattaagttgttttagctgtcaaacaattattctttgaccagagtttttgtattcgaaaatttcaagagacttgcgtttatataaagttaaaaaccgaacgaggaataataaaaccctttagcgtttatataaagttacaaagattacaatttttgaagtaagtggtgattaacgtgccagaatttgcaagtaatccaaagattctaactttcgttatccaaaacttt

SEQ ID NO: 20915 - DNA, 718 bp, Arabidopsis thaliana landsberg
taccgcggaaaaattaagctaacgttgaaatcctcgccactctttagaaacctgcgtgccgtttttagcttactgtgaaaactgcgtcccgttttgtaagatatttgtttttttaacgtacctttttgatttcactagcttggaccaagttcttttctcaagaagttattatgattctaaaagattgtattgagtgcaaatgtggtagaaatggaatgagtatacaaagttcacgagtatcactggcgtgaaaaaatttcattgatatgttctactttttgaccccatcaaattatgggttttaaactttgtaggcttctacaagtcgcactcgtctttcgtcttcttcaactaattcgcgaagaatcgcaaaattgtaattacttcactaacgccattagtttggatgttttgattgagtagatgaactagaatttgtgctataaattatgcttctatgttttaattattttgcattagacccagtgtcggtccaacgtttgcgggcactaatcgagattttttttctctttttttaaattactatttaaaatctcgcataagtattttttcctttaaacaaactaaaatccagaaatacaagaaacataaaaacatcaaaaccaaacaaaacataaaccaagagatatgaaaaacgttacataagtgataagtctcaagcacgagctaaagaaaactaattggttaagaagtctca

SEQ ID NO: 20916 - DNA, 943 bp, Arabidopsis thaliana landsberg
gttaccggatgggactcgaagtagtgtcgtagcttccgccttgtcaggatcacagcatacagcagcttttgaacttgtgggtagcggatcttagtctcggacagcacttcgctgatgaagtagaccggcctctgaatgggcaatgcatgcccttcctcctgcctttcgaccacaatcacggcgctaaccacctgagtggtcgcggcgacgtagaccaagagggtttccccgtccgctggcgcaccaagactggcgcctttgtaaggagcgccttcaggttgccgagggcttcctcggcctcaggggtccaaacgaaacattcggccttccttaagaggcggtacagaggcagacctctttcgccgaggcgtgagatgaaacggctcagggccgcgacgatccgcatgaccctctgtacgccttttaagtccttgatgggtcccatgctggtgatagttgcgatcttctccgggttggcttcgatgcctcgctcggagacgatgaaccccaggagcatgcatcggggcaccccgaagacacacttctcaggattgagcttgactcctttcgccttgagacatcggaatgtcacttcaaggtcggagaggaggtcggaagccttccttgtcttgactacaatgtcatcgacgtaggcctcgactatgcgaccgatgtgttcgccgaacacatggttcatgcaccgctggtacgtcgcgcccgcattcctcaaaccgaacggcatggtcacatagcagtacatgccgaacggtgtgatgaaagaagtcgcgagttggtcggactctttcatccggatttggtgatacctgagtaggcatcgaggaaggacagggtttcgcacccagcagtggaatccacgatttgatcgatgcgaggcagagggtagggaaccttcggatatgctttgttgagaccagtgtagtct

SEQ ID NO: 20917 - DNA, 707 bp, Arabidopsis thaliana landsberg
cttttggtttctccggtcatgttcatcggagatcggaggttttggttatcagtcacggcacgcacacggggagacggacatggcggtggacgaaagaggcttggactgcaaatctcattttcagcccatataatactcagaagcccatcaacaaattgaggttcatttcctatcccttcttatttacttttttttttttcctcccaaaaatcgattttctcacggatttttaatttgcataacgatgatatgaaaactaactggattttggatacagtcttgatcgttagcgattccaaatattcaacttgttttcatatcatttttatgtagatatattatccaagttttttattcggatttttaaaagttttaaacgtttttttgttttgttttgttttgatactaaatttacataaagatatatgaaactaaccggattttggatccagcctcggtcgttagcgattccaaatattcaacttgttttcatttttttatgtagattttagtatccaagtttttaagtcaatttttccggtttttttttttttttattataaatttacataaaaatatatgaaactaaccggattttggatccaacctcggtcgttagcgattccaaacattcaactggctttcttattttttatgaagattttagtatccaagtttttaagtcaatttttttcggacttttaaag

SEQ ID NO: 20918 - DNA, 1040 bp, Arabidopsis thaliana landsberg
catactccttgctagcttccaatgagttagaatacatataaaaaaagaatgtctcgttaaaattcagtttcattcagttaaacgtaccctccaaagagcggagcttcgttgcaaatcttgtaagaatttctagcttcttttcacgataaaattcagatgttccgctactaaagttaatagatacatccaaatccttttgtgaggaaaacgtattcatcgcaaaagagccatacgcctcaaggaccgggctgctctcttctgatttacctaataaacaaaaaataaataaaacctctactgaatatggatattggtcgagcttaataagataaaaaagactacaagacttatattaccaaaaatatctatagccatagcattgaggtttttgaccaattccttcctagtattgtaatcagcagaaaccggtcgaaaagagcagtaggcatcatctaataccttatcaaggtctagtaagatataactatcaatgttatatctcttagatgctatggacatagtgttcttcactttcttttgaatccctgacatccattaacagaagccacaaaaaacataaaagattgcacaatttgtagcgaacacaaacaatatctaggaaatttcagcccaagagctgtataaacctttactcgaaacattcttttccccagcttgattttttcgaaagtccatcgtacctctcaagcagagctattacacctccaataacatataaaaaatcgaagattcagtggggaagaataactgtgaacaactagagtcaaaatatgaacttgccaaattcgtgagaacctaaatctttttcttatcaaactaagatctaagggagttatagagtacttaggatgagatcaaacaatcttgggatatggagaaacggatatcgaccgaaatcgactgtcgagatgagaagatcctgatatggcacgaagatattattctagaacgctaatgttaatattcgaagttaagaaatttaacattatctctaaatatattatttacagttatgttta

SEQ ID NO: 20919 - DNA, 781 bp, Arabidopsis thaliana landsberg
ttcctaccacaaatatcatgaatataattttctcgccaaactttttccaccaagaaaatttcccgccaaaaaactttcgaaaaaacatttccagcaaagaaaattgtcagaaacatttttccttaaaacctttgtaaatctttttgaaaccttttgtaatggttcacaagtgttttaaaatggttaaaaaagagttacaaatgttttaaatatattttaaaaagttcaaaaatgatttactattatttataaagactttataagagttttaagagaattttaaatagatttacaaggtttttaaaatccttttaaaactcttgtagatcatttaaaaaccttttacaagtgtttttaacaactttgtacaatttttaaaaggctttaaaaaatatttacaaggactttttaagagtttttaaaaactttacaagggttttaaaaggttttaaaacctttgtagttcctataaaaaccctttctaaactctcagaaatcctttaaaaactcttaaaatgtctttgtaaatatgttttaaagtatttaaagccttttaaaaactttgtatatatattttaaagtcttttaaacccttataaatatatttaaaggtttttaaagccgttttgaaaactcttaaaatccttgtaaatatttttaaagccttttaaacccttaaaaaatctcttaaaatggtttaaaagatttaaaaggattttataatactttcaaaggttttgaagtatttacatgtgtacttaaaaactttattatgatttta

SEQ ID NO: 20920 - DNA, 597 bp, Arabidopsis thaliana landsberg
catactctgctttcttcttctactatgcttccttgtaaacagagacaagttataagaaaacaatgttagccaaatttaaacggcaaaaactttaattggtaaagaatagaaatcaatggagcttagagatcctcaagagggtgtcgatatcgttgaaccacttcacttttgaaatcactcttagtagtggtatctacatcttttgtcctttcgtttggagagaagtcaatagacacagcttggagcagaccatgaaaattcacataccaatcaagccgttgcttgctccactctaggctgaacaacgtaagattggattttgttcagaggcatattgtaagtcttctcctaagagcatcgttttaaagttccatcacaaaatcatctctccatatacatccatataaagatcaaaataaaacggagagatttgatcaaaatcttttcaatttcaacacatatatctcaaataaatataacaatcattcgtatggcaacaaatactaatcaaattaaagtatgaacttaccctattttacaaaaattgaatacacataattttcccaattcataaaccctacttataactaattttat

SEQ ID NO: 20921 - DNA, 812 bp, Arabidopsis thaliana landsberg
atcactgaagcaaagacgtaagtttcagcctcgatcaaaagtttgtatcttcttgggatacccgtttggttataaaggctataaacttatggatttcgagagtaatgccatctttatttccagaaatgtggtgtttcatgaggaggtgtttcctttggctggtactaagaagtcagaagattctctgaaattgtgtacgccattagttcatgtgccttcaggtattcaacaatcttctttctcttctcttccatcacaaatttctgatctaccaccacaaatttcttcacagagagttaggaaacctcctactcatctgtcagattatgtttgcaagaatacgcaatatgataaaaaaatatcctatatcttctactatctcttactctcaaatttctccatctcacatgtgttatatcgataatatcacaaaaattcctattcccaccaattttcttgaggcacagggcactaaagagtggtgtgatgctattgatacggaaattggtgcgacggaagagaaagacacttgggaggttacaagtttacctaaaggaaagaaggcagtgggttgtaagtggatttttactctgaagtttcatgctgatgggagtcttgagcggcataaggctaggctggttgctaaggggtacactcagaaagaaggtttggattatactgacaccttctctccggttgcaaaaatggctactgttaaaatgttgcttaagatttctgcatctaagaagtggtttttgactcaacttgatgtttctaatgcgtttttgaatggagatttggaggaggatata

SEQ ID NO: 20922 - DNA, 491 bp, Arabidopsis thaliana landsberg
aggataagcgatacactacccttttgcataaggacacatcctaatcccattattgatgcgtccgtgtacaccatgtatggctcatccacttgcggcaaggttagcaccggagcacttgttaacatcaacttcaagtcggcgaaactcttttcgtactcatccgaccattggaacttagtgtccttgctggtaagtctagtcatgggttgagccatgctcgcaaaccctttcacaaatcttcgatagtacccggccaaatccagaaaactcatcatctcggtcgcactctttggtcgaggctagtcctttatggacttatttttctcaggatccatggagactccctgctccgatacaatgtgctcgagaaatccaactcgcctttgccaaaagaaacatttggttagttttgcaaacagcttatgtcgtgttagtctctcctaaaatgcgcccttatatgcattgcgctggagttcgttcatcctttacaa

SEQ ID NO: 20923 - DNA, 586 bp, Arabidopsis thaliana landsberg
ataaacccaccacccttagatcagatgatcttgagaatggctagggaattcggtttatgctatttatctatgttataattaatgtgtgagcgatatatgatatgtgtgggagtaaacatggggagcatcctagcatatgcatgatcgctaagtgtaaaccattgcaatcttatcttttgttgattttaggagacaaccaagttcgtgggaaaatttggcttagcggcaatgatagttgtctggggaagtggatggtgtttaaattaaattattggatcgaatgattgtaatagcctaaagtgcaaactttcatgtcgtttgaaaccttatatttatgaatgaatttcgtttgtttatttactaatgtgtattcgtctctttttacttatgaatctcagaatattcgcagccaatttcacttagaaggaatacagttaagtcccaagaatacttaagttattttcgtatggaaacaaccttgtcggacttacagtccggaatgggacatttcatttttcttctgctcaacaatcttgtgtagcatatgttttgcttagtagttaccggaaatgttgataaactattt

SEQ ID NO: 20924 - DNA, 1051 bp, Arabidopsis thaliana landsberg
aaggcatacttgagtgctattgattatatatatgaatttatatcaattcaagaaatttgattacaagatgggctggtttttctcctttttaattcggttttgatatagggatctaagatgcaggtcactcttagaaagtattatattggcaagtttcacaggtcaatgaaggtcggtgattggaggatcattgataacttcactttgagtccttccactggcaagtacaagatatcgagtttgagcaatcgcatgggctttaaccacaacactgatgtgagtcaatgtgatcctgtattgaatagtgtttttcttgatcttgcagattttgaagggattaagaacgagagttatgatgagaatgttctaattggttagtattttcaaaattccctatcatgttttaactcaaacaaacaagtgatatgtattttaatattaacagagtaatctttacaatggcagacatattaggtcaagtggtcagtgtgggtaaagtggatgagattgttgctcagaacaaaccaaacaaaaaactagagtttcaaataagagatgccaggcaagtcttcaatattgttatacataattttgattcatagcagttatgtgttcaaacaagtaatattgatatcgtgaaactctatattgaagcaatgagcgtttgtcttgtactttgtggggtgtgtttgctgagaaagtattcagtgctttaaaaagtgtaaagcatgacgagaagacagtggttcttatacgctatgctaaaatcaataatttcaaaggtatccactcttcccttaactatgtctaaagttatcatattgaatgtatattggcatgtctaacaaatattgtctaattctgttaactaggtgagattagtattacaagtgtttttgatgtttcggatgtcaacatcaatccggttcatgttcttgaggtggagctgttcgtgaaatcgtaagtgttgatttaaattatgacttacattgttctgttaaattacaaacatgttactagcaaatgcttatttcagactccaagtgatggc

SEQ ID NO: 20925 - DNA, 539 bp, Arabidopsis thaliana landsberg
ttaatactatattgcccttaatgattttaaatagcaaagaccaaaatccaaaattgaaatcaaaattgttaccaaattagaaaaaaattcaatttgtacttcccttttaataataaagggatgattataattttgaattgtttttaaataaaaatattagtttataaaaaaagtaaaaacattaatatgactctattggtttaaaaattaatttttgaaaatgtaactgtagttatcgtaaaaaatgaatgttgatatatatgaaataacagtctatgatgtatttaattttgtataatttacttcaattttcaaaatatatatttagtatataatatggagattaatataatttaagttgtttgatataattaaaaattcaaaactatatcatatttttaaaatttatggctactaacaataataattgccttaacaatgaaaaattatgaacaataaaaataataaaaatattaatattaatttaaatatagttaagttgttaaactatttgataagtcaattaaatgaatgacata

SEQ ID NO: 20926 - DNA, 730 bp, Arabidopsis thaliana landsberg
tccgtctgcctaaatgcaaatgatttgttcttgcgatggtgcagaaagacgtcgcaacttggatattcaaataaggtggcctgataactgataaagtgatatgtccatcataggtgaggtgaataatatatatttctttctaatgatatataattactaatacatctctttttagagataaactaattaaagatttaaagcactatatattagttgcacacaaaaaaaaaaactctacatattaaaaaaatccaaaggtttgcatatatgtataggaaaaaaatcaaaaaaaatgatattaattaccaaatcaagtttcacattcagacatttattcctaatatcctaaatttagaagatttttttttggtaaattaaattaaagattaagatacatggttaagaataaattgatatgggaatatgtaatttgtagaaagacagagagagtgaggaaaaactgacgaggaagctgaaaccggtgacggaggcgaaagaggtggcgatggatgcggcggagagaggaagagagccaagatggccaacgaacatgacggagataacttgtagacaaaactgaagaagactcacggcgatgagtgggcctgaaagccatagctgcttcttcacttcttccttgacactacttttctctcccatcaaaggccatgacaaatcaccctctcctctttctctgtcgtccctcatttttttttgagaaatagcaaag

SEQ ID NO: 20927 - DNA, 544 bp, Arabidopsis thaliana landsberg
ttcaggggcgctctttttccctgctaggttctgtcccattgggttttccttagtaggtttttaatgaggcctaagtaacacttccaaatccccccttatcaatccggcccaagaccactaagaggaccacaaatttggaaaaccatgggtctattttgtgttcaaaatttcaattatgatttctccttttccgagttgtcttggagtttgttccaatactaactcctccccttctattcttctctatttaaactcttgtatttcctcattgtaaactcatctatctttttaatctcaaactcttttaagctagatcgaaggtatatcaaaggccatccgcatcctttgtgtgaccattcgctccacatcctttggtttgagtgatctcatgatctcttagatgcaaagtctatcccctactcaacctcaagagtgtcgatcttagggaagtcatattaagtggtatcagagcacattctgaagttgagtactctatcctttcatcacttcatcatttcgtttcattctattcatcatttcatca

SEQ ID NO: 20928 - DNA, 476 bp, Arabidopsis thaliana landsberg
ttataaattattttaaaataattaagataataaatgtttttgatcgttcagttataggttaaaaaagtctattttttttttgaatagaagaaaaagtgcctcatctctgaaaagtacctcaaaaaaaataaaattctttaaaagtgtgtaaactcaagataaagtttaccaaatcaaacttaaatcaaacttgtggatatatagaaaacagataaatactgtaatagaagactaaatttaaatccagtgttggactaatcgtctgagctaagtcgaataaatttggtggtcttaagactttttcgaagtggaagtataaaatcttattagtgtcacgtctaaattatataaaaatgttggatgtaataatgtaatgtttatttcgttgagattttagaaattttttgatttaatgtgaaattttatcttactctcaacaaaatattttggacataaaaaattgttttttttaataa

SEQ ID NO: 20929 - DNA, 1581 bp, Arabidopsis thaliana landsberg
gtttgttttttcagttggaattagtttttaagattaattataatattatgggctaattcaaattcataataataatagtttatttgcaaacacggcaaaccaacaatacgtattctggtctttctcatatctacaaaataattctatatatcataatcaaacgtctataacaaaatgatatttttttaataaatataattatttctaaatgttaaatatatactgcaacacgcaaagtatttatttttagtagtaacttcttttgttgaaatatttttagttgataccaccattttcctcttctgctttttggcttccttctctgtttttcttcttctgttcttcctcagccaacttcgtcgattgacgctcgcttcttcgacgtaatttaatactcaggacaatttgcatataaacccaacgatctcttcttacctagaaaaaaagagagttgttgacccgtacagtactaagtctatgagtcaatctcttttgtcttcatataattaaaaccactcgttaacttgttaaacataagactatttaatatggttccatccttccatgtacatagattcctctatattcacctagagagctaaacaactactttttaacaaaatgccgattgctgagcttgttgtaatcaaaacagtgggaccagataaattgctacatttacaaagttcatattgtttgaccagaatcaagaccaataagaacttttaagccaaaaaacgacattaaattgcatgtcattataacaataaattctttataatgtaaccggtaattatgatcatattagtgtacattcaaattcataaatggcactaaaaccaataaaacgtaaatattccattattacttaacaacaacataactaatttataatctcttagtaaataatttcttataaatagtaaaatatactcttcgttaaatatcatatttcaagttccacataatttataatttttttagtgtatcatttatgtaaaacgttttgaagagggaagacatacaaccaacaataacttcgtgtgtagtggtttctataagaaaatatgagcgaggtttcaaagtgcattgcatataataaggtgacttcgctctctatatatatatctccttgaattacacaatgtcgctaatgcatgtgttttcatttttatatctcttctcttgctaggctaaagcaatatttggcttttccagtgaagatcatattggaaaaatcaatttccatgcggagcaggtatctgaattctaaattggattccccatactctgcaggaagctccatcttttcctagctcattttcacatttaattggatcttttgaatggacttgcttcgatgcttgattccttgcgcaattgaccaggactgctggtaccttactctatatgttaaccgtgtgcggttacctaatgatgttcggtatactgtgagccaaatcaagggaagaacggtgcttcgtgaatcactaccctggggtctgtgacagtatatgtgaatgactgccagatattacttgcggatgaggattgagggaacagatcgcgctcctatcaaga

SEQ ID NO: 20930 - DNA, 608 bp, Arabidopsis thaliana landsberg
ggaacaaacatgagtgtgagatctattaaggcctatagttggagagtattgctttgctcactccaagtgcacaatgaattatcttcccacaataacttaaagtcaaattgctttctacttcccatccaatagccaacgacaatttgcaaataacctccagcctttctatttggcatttcatcgagcactgggagtgcgttcagcaaaaccagaagtttgcagccataaacccatcattatcaaacccgagacaatctgattgcattctagcttcatatgttccaaacctatagatttaaaccagcagctatccttctcaaattatgacaaatactccacattcagtcccaaatagaatagagagaaacagtaccttgaataccatggtttggttatgtctgaaattctttgaagatcttcaaagttgatacccttgtctctgaaaatctgactccttagatgtgaacctcacgctcaccgtcgctttatcagagaaggcacaaagcccctcgtttcaatattacggtatgagcggaggctagaagctagtgagaaataaaaaaaccaatgaactgtttggctccgataccatgttgacatttcttaac

SEQ ID NO: 20931 - DNA, 1015 bp, Arabidopsis thaliana landsberg
ttctatgtcctaacacacacacaaaaagtagccagtagaacaagactaagtcaactacagtataatacaaatatacatcagcagacagcaaagttcaaaaaatcattttctttgcagaccaataaaatggagcactgacactgtgaaattacaagtccgttggtgtcagcattctcagagcatataccaaacaattcactaagaactgaacagggaatgttgatatgcatctgtagcaatgtataatcgcactaagagtcactgaactctttagatacattacataatgcatcttttaccaaatgagattctggatcatcaacagaccaaacgcacttctacgaaaacatcaacagacccacaaaacggaaacttgacccaaaccatttcttctacaagacctaagtacttcaaggcaagaacaatgctcatttgcaatttacacagcattgttatagttatgagagcattatcaaaaacctttaagatagcaccaaatgctcacgagataactacacacaattcccctcatcggaatcacaagtcaaaggagataaaacattgactaagacgtagacaatcacaagcatttgtagtgaaagaaacaagtgatgcctacttagttctgttcttcattcccccaatttcagaaatcgaaaccaataacgagaagagaaactcaggagaaaagaggactggaatgtttagaagagatacgaaccaccattgtcacccttataccgatccgagcgattaaacgaaggccggtcacgagagacttctccgggctcatagtctccggcggcgttgcgaccgtcttctctgtcgttgcttccggagggacgtacgacgagactgctgatgtgaggcgggtgatgttgcgtcgtctgctctttttctgtcgaccccatttctctccgattgtcaaactcactcctggaatttctcgatgtccgtttcagagaaaaaaaaccctaggggagacttggcgatagatactggtaaactgtattat

SEQ ID NO: 20932 - DNA, 982 bp, Arabidopsis thaliana landsberg
ataaaacaaagaatgagaggttaaattgagaatcttaaggcgtgactctcggtagattcctgcgagaagaatttgggtgaaattaatttcggcgtgattatcactggtgtcctacgagtatagagacggtaatgtaacttcacatgaatcccaaccaattttcgccaaaaatttaaagtaaccgatgatttggttgtctacacccattttagctatcctttttctagtgtttttaagaggtatttggaatgatttcaaaattataaggataacttttgagtattttcagtgtcaaagaagcttttacatgtttagtagaaaaatggaccaaaaaatgacaaaaattggtttaaaggcagttttggaatttcctaagtttgacatccgttaaaaatgtttccgagcaacaaatcaaaagattttggaggcagtgaaaatcggaagagtcaagatctgcagcaaagttgaatcaaactcatacgataaacttgtgatttagtgcccgatgtattgaaggaagccctgtcgttacaggtcacaaggcatgtgacctgtcacgaacagcctcctgggaccgggcgcagctaacgtgactggtgtgaagcttacccgtgggaccgttcatagtcctcgtggccggttcagaagatttcgtctctacaacttaccaaaattctaagttttaatgttaaaaaactccatctccaatggtgagagccatccatgggctctcaccatttttttaagaataaaattttcaaatttatgagatgagagcttttgttaaatttttataattttgccaagtctaatggtaagctctctttgtggggttctcagaaaaaaaatatattatgtttttaattatttatttcataaaattgaaaaagattacaatttataacatattaaacatacaataaattcatacatttgaaataaatttgcaaaaaaaaaaaaaaatgattagttatcctgttga

SEQ ID NO: 20933 - DNA, 831 bp, Arabidopsis thaliana landsberg
atcataaacaacaaaaaacgctttaacctgagctatgtgtgaataacctaacttaatctacagtctggtttaactgtctgaagcaacactactatatcactcctctgttccggaaatgtttgattcaagcttcaacagagttgaaatccaactctgcttatcttcggtatagtcctcatggctggttaaaacaaacaaaaaccaaattaagatgagattgtgattctgaacaatgcaattaggaatctgaatatgcaagaaaaagttcaaaaaccgttttggttcccacaaaagctgatgataaccaacaagtatcttatgcatagctgtttctcaatgcagaaacaaggtaaagattcgagatccttttagagtaacccaactacaatcatacgtgcaaattctctgaaacccttttgcctttataagctaaatgcactaagaaactacataagaaaaggttaaacaatcactgaatcagtggtgttccacaatgcatcaggtccagtacggaccaagaaatatgccctaccactaacccaatccccccactattacaatctccaccaattggccaacaatggagtatttaactataaaggaaatcataaagcttctatcttttttgtttatgtaatgttatgagtgccaaaaaaaagccatacccagaaatggtaaaaacttcacatctgcttaaaagagtaaaaaaggcaaccccaccacgaacacaaagaatgaagattcctattgcacctttattgatgaacaacaaacacaaacatgacattgcaattgaacagagtttttgtatagagagtttcccatgaatat

SEQ ID NO: 20934 - DNA, 1574 bp, Arabidopsis thaliana landsberg
atattttctaattatttcgcaattagtaagaatcgagaatacttgcatcgttttattatgtcaccagaaatagattttattttaaaacaatttagaggttgcatcaattagatagacaaaaaaaaattgagtgctagagaaatcttttacctttttcgtaaatttagatgcttcttcatcactacaatttctctcctgtcactctcttcttctacgctcttgtctttatatccgatctacctcgttccctctcaaatccctaaatcgtctcctatatcctttcgcaaatggacaaacccaagatctgaaaaagtttttgtcttttctctcccaatcgcctgattcaagcctaaagctcggtttttttcttctgggtatttaggggttaagtgtattgtagaaaagcatggcgagtttgagtgggagttggagagatgcgtataaaggaatgtcatcggataatataaagggtttagtattggctttatcttcaagcttattcattggtgctagtttcattgttaagaagaaaggtctcaagagagctggtgcttctggtctcagagcaggttatttccattctctttactgatttggaggagatttgtgtttgtttcactatgcaaagattggaaatttattctgccagttttagatttctgcttcagggtagtttcaaattctagttgatcatttgttgtgtttttgtgagagtgaagtgaagcagcgccaatggctaattaagtgttatgttaatgattacagatgtagtaaaagtatatcacaaatcagatagatgttgctcttttgattctcgttgatgattctggtgatggtgttgtgtaggttctggaggttattcttacctgcttgagcctctctggtgggtaggcatgataacgagtgagttcccttcatatttaaaggtttgctccttttttggggtcttggtttacttgttgttagtactgcagattggttttgtttgttgttattggaagatggtgagggtataagtagttattggcgtttcagtgatgttaatgggatagacaatgtttcattgttttgcagtgattgtaggggaaattgccaattttgctgcttatgcctttgcgcctgccattttagtaactcctcttggtgctctcagcataattatcaggtttggatagtattaagtcagatttattatgtattgatctagctgtggaatcacaatcaacttttagtgttgtctatataaggaatatacaatgtggcctagtctaaattttttgattcacaatgatagtattgttgaaccattaggagttgtgcactggagtaattgaaatagaacatttcggatgtgaattttgcagtgctgctcttgctcatgtcatcctacacgaaaagttgcatactttcgggcttcttggttgtgtcttatgtgttgttggttcgattactattgtcttacatgctcctcaagaacaagagattgattctgtgttacaagtatggaatcttgcgacagaacctggtaccatttgatctcttttcaaatcttgttttatcccgtactaattgat

SEQ ID NO: 20935 - DNA, 2206 bp, Arabidopsis thaliana landsberg
  unsure (1)..(2206): unsure at all n locations
ggttgaggaacttgcaacgacgactagtaatactttggcgcttattacgaatctacgttactagcttactaataataaaaataaaagtgaagaaagttattattgatgaattattactactccttgcatgtgcatgcgataaattacttgtgtctattatatattattgtatcatgttaatgttagagctaatttaagttaagccaacttgtatgatatatatcacatatatgtttattatgctaaagtaaaatggtgaaagcattttcaaagaaattgtattcaataacgaatatatacatacaaacagaaaatgatttcaatagtatgaacataggcaaccatgtgatttctcctgttcttattccgcaattgttactannnnnnnnnnnnnnnnnnnnnnnnnnnnnnnnnttatgcagaaggctcttgtttgcttgttatatacatacatgataatgtgtagatgaacaaatgtagtttctaaaacaaatcctattatagaagagaggacacaacttcttttgaattggaacgtgtcattgttttatacttcaatgctgggtttctccatattgatacacttgttaagccatccatctcgcagcttcgtaaaaaagaatctctggtcgaaccttcttttctccacagaacctgaccacactcttccagttaccaatatcctatggcatcacaacacatagatcaacaatgtcaggcctatctaaagtcacaattcaactcaaggaaggcaaaaaatcaactgttttatcttacctctcctactaaagactcacgcttgagattgacccatcggttcttttcataagctatgcaaatgtgttcttcttctacttcactgcaaccaacctacatcacattcccatatatcccgacacattgtaaaagagaaatacagaagagcaataggacaatcatttgtgagactttttctaccattgacacaagccggtagttagtgtttggttctaagccttcgtacagcctgctgatatctatctcccactccaaagcctttgttgtttcagatatttctttttcagtttcactcttctcccattctaacactaatgttgcaaaaccacaaaacaccaactctgctttataaatgaaatgagtatatataagatcacaatcatgtttctcaaaccttaccgattgtgaagattggcgggcatctacttataatatgatgaacaatatttgtccttccacatcctcctgatctagtgtcacataacattttatattccatgcgggtcaccttaaggatatccacaaacttcatatttccgagagcacactgcatatatataaacacataacaactttataaggggaagcactagtttctgtaggaaagataaggaggaaaataaatgaaacataccttcaggtctctaattgaatctgcagccacaacaatgccatgagaacgttgctctggataatttggccgacttctgcattttatacaactcattctttcattttcctccaaggtgaaaaggcgagttaccaaactctctctttctcgatatttccagcaatgccaaaactcaaagatggctacaactacctcagcagcatcagcatcactcaactgaatagagtaaagatagagtgtcattaaaatagcagattattgacagaaagaaaaagaaaaacaccatgcctagaaggttaccttctccacacaaaccatggaaaacatttcttcaacggaaacaagtaagtcgcttaagaggcaactgtagactccctcgatttttatgtcctctgacacaaaagcagtaaataaagtttgtagcgcagaaggaactggttcttccaagtggtcttgaaacggttgcatattgtgcatcaaatactctttgagaatcttaatgttcaggagggcctgcaataccacatgtttctgtgaacttatcaacgagaataagaaagtaaagagatctagaatgagctgaatcagaagacgacaattaaaatacttaatcatatatttgttggtaactacttcaccttcagcgtcatgtcaagagctgaattgtatctggctgaagcttctccagatgctgactccatatgttctgacagtgaatcttctctaggcatgttttgcatatcttgaagatagcgaatgaataatattaagaattatacatctctaaacaaattattt

SEQ ID NO: 20936 - DNA, 575 bp, Arabidopsis thaliana landsberg
gtattttgccaagaggctgctacagaggcaaacaccttgctaaagtatcatccatctattggtgttcaagttgtgattggaggcactagacttggtttagagcaaaagcgtatgcaaacaaatccttgccaggtgaaaattgtttgtcattccttgtggatttattaataatgttcaagcgaatcctaaaagttccttcaatatatgcgtcttctatacgaattgttttatatcgaaattttcagattttagtggctacacctggaaggctcaaagaccatatcgagaacacgccaggctttgcaacgaggttaaagggtgtgaaagtccttgtgcttgatgaagctgatcatcttttagatatgggctttcgcaaggacattgagaggataatttccgctgttcctaaggagagacaaacttttctattttccgccacagtacctgaagaggtttgtctcattttcttgcataattcatttggttttggttttcgttgagataatccctttttgtaatgggtcttgatttgtgttatttttggtgtaaaggttcgccaaaatatgccttgttgc

SEQ ID NO: 20937 - DNA, 550 bp, Arabidopsis thaliana landsberg
accccacttttattgaataacccagtgttggcttcccattactccccatgtctaacctaaggattctttgcgttcgtttgacaaatccctaatcctaaacatgcaatcaaaacgactttgataaattcacttaagtaaatggctcgattcttattagacacctataaactcggttcatctataatggttctgatgacaaatgcctttctaggttcacgtattatctaagatcaagttcaaggtgatcaatctaaaactagcattaagaacaattttatatgaagaactctaaaaataagcctaaggacttgatcaacatgatgtaagtgcaggaattagcacctccgacaatactagtctaaaccaaaggaattaagaattaaagtaagaattcagtcaaaccggggtactctggtttagtctgttaatgggcaagagtaaagagatcagttgccgacatcaagccaaaataaggagattgcctggctgatattcgttcctcaaagaaaacaaaaatagttttacctagtcaaacgcatacctttgggga

SEQ ID NO: 20938 - DNA, 3281 bp, Arabidopsis thaliana landsberg
aatatccgaaaatgctattaaatttaaaactgacattttcacttggataatttctttttctgtacccagaagaatcaaaaattaagaatatgctaatgttttctatataattagttctctctctataatttataatttatgtaagttagacaaaaatgcccttattacatatatcaaattagttagcaatgtaataaaatagttatcgatatttttataatcaatttcttcagaaatattctattatgaattagatgattatctattagattaacgtgataataatatatatatgcatgtaagtaaaaaaaaattatgttaaaacatatgatatcgcgataagaagaatgttaagaaggtatacaattagtaatgtgttaaatttatttttaacatactaaattatacaatatattatataaacttgtcaatatattttactctttcattcattatgacataaaaatatggtaaaaataattgtaacgtactaatgtttcatttagcaaagtatctaacgtaataatatagcaaaaaaagtctaatcccattttattgtgttgaatatacataaataaaaaatatagatttattattttaaatcgataaatattttttaacaaagaatttgtaaacttatcgcgatatcatagtttttagcacgttaaacaaatagttatatacttatcatcaatatattacaattatttttattcaatgacatttttgtaattaatttaaaagaaaagaatattttgggtttatatattatttatctttcatacttacctaaataacaaatatttatgcatatcaattaatatagctcaagaaattacatatatatatatatatatatatatatatatatatatatatatatatgctactatgagaatcaatgtaagcaactttgagagttggaaagaactctccttcttcaccattttaagaaatcaaatctaaagtattattgttcttggtgacaaacctaaaacttcttcatttctattctttacatttcaataaagctcattgagctattgtattttccaatattagatttctatgtcaattagcttatttgagcatcagttctaaaatgtcaacatggtatcagagccaccattggcccaacaagaaaatttccacaaaaatggtttccacttttgtggcccgtacaagtggcatgtctcgttgtatttctgagatgttgggcttgggttgttttccgttggaccgtttcccacccacatctcgaaaaggtccattagaatgtcccacatcgcttgggattaagatctttggtcattatagaaaggatgtggcaatccttaactcttgagctagcttttgggttaagttatgtcacattcctaatatggtatcaaagcataagttaagaaatgtcaacatggtatcagagccaaacagttcatcaggtttttttattctctcgagcttctagacttctctcataccacaatattgaaacgatgagctttgtgccttctctgataaagcaatggtgaacgtgaggcttcacatctaaggagtcaaattttcagagacaagggaatcaacctggaaaatcttcaaagagctcgagacataaccaaaccatggtattcaaggtaccgtttctctctattctatttgggacacaacgtggagtatttgtcataggttgagaaagatagctgctggtttagatctataggtttggaaaataagaagcaaggttgcaatcacattgttttgggtttgataatgatgggtttatggctgcaaacttctaattttgttgaacgcactcccagtgctcgatgaaatgccaaatagaaaggctggaggttatttgcaaattgtcgttggctattggatgggaagtagaaagcaatttgactttaagttattgtgggaagataattctttgtgcacttggagtgagcaaagcaatactctccaactataggccttaatagatctcacactcatgtttgttctccttggtgaatagaaccatccatccacatcacaatgatcttgcttcaacgatgcatcctcacaccaaagtcatctttatttgaggttcaaacttgttatgttgcttttacaccacgtcaagtttgcgggagagtattagatgccacaaacaagcccaacgattagcctcattagaagcccattatcgtatgtcattaggatcgtctagtatcttagaatcatatatatatatatatatatatatatatatatatatgctactatgagaatcaatgtaagcaactttgagagttggaaacaactctccttcttcaccattttatgaaatcaaatctaaagtgttatagttcttggtgaaaacctaaagtttcttcatttctattttttacatttcaataaagctcatcgagctattgtattttccaatatttgatttctatgtcaataagctcatttgagcatcagtttagaaatgtcaacatggtatcagagccacagctgtcccaacaagaaaattcccacaaatatggttttccaccttgtggcccatacaagtggcacgtctagttgtatatccgatatattgggtttgagctgtttcccattggaccgtttcccacccacatctagaaaatatccgctagaatgtctcacattgcttgggattaagatctttagacattatataaaggatgtggcaatcttaactcttgagctagcttttgggttaagttatgtcacattcccaatatggtatcaaagcatacgttaagaaatgtcaacatggtatcagagccaaacagttcatcaggtttttttattctctcgagcttctagacttctctcataccacaatattgaaacgatgagctttgtgccttctctgataaagcaatggtgaacgtgaggcttcacatctaaggagtcaaattttcagagacaagggaatcaacctggaaaatcttcaaagagctcgagacataaccaaactatggtattcaaggtatcgtttctctctattctatatgggacagaacgtggagtatttgtaatagcttgagaaggatagctgctggtttagatctataggtttggaaaatatgaagcaagattgcaatcagattgtctcgggtttgataatgatgggtttatggctgcaaacttctggttttgctgaacgcactttaagtgttcgatgaaatgccaaatagaaaggctggaggtgatttgcaaattgtcgttggctattggatgggaaatagatagcaattagg

SEQ ID NO: 20939 - DNA, 628 bp, Arabidopsis thaliana landsberg
aatctattctgttaacgattaccaaagaaataagctaagtcatcattttcaactcttacatctttagccatttacgtacatctggacccatttgtttgttctgtttacaacaaccaaaagggaaaccgacaactgaaaaatgtcgcaatattagattagggatgatgagtaaggtaccttttgtctcctaacgttaagcccaccttgtcagaaacagactctaaagcttccttccatttcttgatttgttctccactcgaagtcttagccaacctccagaagttgcgaccaaactcagccttttgatatctcacagactctgccttcactttaaagaagatgggaaccactcgtagcttgcatttatcggctcttttcttgatccttgcaagctcgtccaggcaccagcttgactctgcgtaccttttggaaaatatagtgagagccatcctcgattgcttgatccttgcaaagagatgtttgaggtctttccctttttgttcgtctttgtctatgaagaagttgattccatgccttttaaatgcgtcaacgaggtggctcacaaagctgcagcgtagctcctctccccggaaattgatgaacacttggatcttcctattactactac

SEQ ID NO: 20940 - DNA, 477 bp, Arabidopsis thaliana landsberg
  unsure (1)..(477): unsure at all n locations
gattatctccggtaagcattgcaatcttaattcccaattttttttgttctttcatggcttgagctacacgagatcgacaagcatctgagagattgaaaacaccagctagtgtttctccaacatatacatatccaattgtctttcctcctttagtatcaacatcaatatctggaactgtatacatgcaccaaagcaaagaaccatcagagactaaagaaagaccaaaaaccttaatgcataaattttgatatgtacctgataaacacccagctctagaagcaatccttttgttaccgatatagacttctttaccatcaatcttcccatannnnnnnnnnnnnnnnnnnnnnngtagtctttgaccgcttcaggcttaggttcaacagagacagatcttgcatagtccacatctgcagcagccattggatggcttgcttgctttcagtgcttgataccctgatacaagtcatatttctc

SEQ ID NO: 20941 - DNA, 1543 bp, Arabidopsis thaliana landsberg
atcctctagtaacgaccgccagtgttttttttttgaacaagtcatttctatgcatggttccaactgcaaaacagctaggaaacttcttaaatctagaataaattaatataagctctggtcgtggctttatttatataggcatgcaaatccatttataattaaagatatatgaagtcatcgatagacttgttaaacttttttaaactgccaatttaaaacaatgtatatagaatatctttggaccacgtcaaatatgacatgcgcttttgccctataaatactgagctcaaatgcttcacaattcacaaacaacacacacacatataaaagtctttgacaagcattagcaatatccttttgtttgaaaatgagggtctccatgtctcttatcctgattaccttatgggctttggtcaccattgccaaagcatatgatccaagtccacttcaagacttctgtgttgccattgatgaccctaaaaatggtggtgcgtatataactcggtttcttaactctctactaattaattattattctcctttattaatgactaaatttgaagttgtaataaaagatttttcgaaacaatatttctacttgcagtttttgtgaatggtaagttttgcaaggacccaaagcaagcaaaggcagaagatttcttttcctcaggcctcaaccaagcaggaatcactaataacaaagtcaaatccaacgtgacaacagtcaatgtcgatcagattccagggttaaacactttgggaatatccttggtccgcatagactatgcgccatatggtcaaaacccgacttacacacaccctcgtgccactgagatccttgttcttgttgaaggaacattatatgttggttttgtctcttccaatcaagacaacaaccggttattcgccaaagtgctgaaccccggtgatgtttttgtgttccccataggaatgatccattttcagttaaatatcgggaaaattccagcaattgcttttgcgggattgagtagccagaacgctggtgttatcacaattgcaaacactgtgttcgggtcaaaccctccgatttatccagagcttcttgccagggcgttccagttggatgcaagtgttgtcaaagaacttcaggccaagtttgggtccatatgaactgatcatctatgtcgtttaagagtgtttatcagtgaaacacttaaattaaaggaatacactactatgaaatatttatgtaacaaagtaaaaatggcttatgtacctatttctatattataatataacaactttaatagtgctgtgaagccaaatttgcaatgaatcggtgaatttcgtcttaccccctccttgctaaatatgtgtcttaaaagttgcaatcagttgctctaaaaatggtctcaggcgttgaaggttgcatgttttttttcctcactttccaaagataaagtagatgagaaattgtacgacgtgttgtctaagagcagcaaaaactactcaatcggataaaattacaagaataatcgacacatgtaatctagtggtttgt

SEQ ID NO: 20942 - DNA, 540 bp, Arabidopsis thaliana landsberg
tatctcttccaagcaaaccaaagaccaatctccttcacccattgttatcgacaaaccctccttgaaactctctctttcatcatcttgttttcgcaaccccctcacaaagctttgaagtcttcattccaaacccttcaccaaaactctccctatcactccttaagaatctgttccccttcaccaatacttcaccaaagttactcgatcactccacagtctatcctcaagcattccatcggtttcaagctcgaaatttcatcaccaaagaaatcgattcccttcccctttgatacctcttagagaattgttcttgtttgccctctcgaagctcaccaccaatctccatggattcaagaaggaagagttcatctcgggcaagaagatcctctattgataatgaggaagttgaggcgtttgacatgagtggcatgactgaacgccaaattcgccaagctcgccgtactcaaagatcaagcttgatccaaggtggaagttcaagccactcagccatgcaaagagaagaagtagctccgggaaaga

SEQ ID NO: 20943 - DNA, 282 bp, Arabidopsis thaliana landsberg
  unsure (1)..(282): unsure at all n locations
ggttatttttctcgttcaangtttgcctaaaaaatattgacggttaacattgaccattatttttccgttagtgtctttttatcgcaacttttcatttgcattttttcattataatttttattaacatcgaaagttattttttcctttagtatctttttatcacagctttttatcaaaatattgacggttattttttctcacttgtatcttttattgcaactcttatattgcaattttccatgaaattctcgacacatctttatctcccatcgtaccttttta

SEQ ID NO: 20944 - DNA, 633 bp, Arabidopsis thaliana landsberg
ttcatgttcgttgctctcgtgtgttgaatgtgagtccttctataataggtaatttgaagattcactccttttttatgactattttctctgttttttattacccagacattttcgttttaacaaaaacgcccccaaaacagattttcatcatgtatcttactctttctccgaaaaagaaacacgatatttcataaagagaacaaatcgagatagatcttctgtatatctatttgacaaagaattgtctgattctctaattgcaagtagaaaaaaatgaagcctcaaaaccgaatgatcaacaaaagaattgtaccggactttgcaaagcttcttcaagaacaactttcttctgaggagctcttagtagagacccaaaaatttccaccagaaagtcccaactactccccagattatcgcattaatcgtcgccatcacgaatccaatcttgaatacatcaggcagatcaacataacccgctgcaaaaagaaacacaagcaaacgcaaaagttaaagagacttagctataaagagagagctctgtcatgttcatcaatcaatgggaatacctccatagtagacagcggcgatacacgctaaagtaatgagtcaaagcaccaaaaagattggtgttgt

SEQ ID NO: 20945 - DNA, 906 bp, Arabidopsis thaliana landsberg
tgaggagaagaaagaagagtctacgtcaagtaggctccccatcgacgcctccaagcttgacaacgaggaaatgacactcatcatcaagagcttccgccaaatcctcaagcaaaggagggggaaagattacaagccccgctccaagaaattttgctacaagtgtggtaagcccggtcattttattgcaaaatgtcctatgtcaagtgatagtgacaggggcgacgacaagaagggaagaaggaaagaaaagaagatgtactacaagaagaagggcggcgaaacccacgtgtgtcgggaatgggactccgatgagagctccaccgactcctcctccgacgaggacgccgccaacatcgccatcaacaaaggtctcctcttccccaacgtcggccacaagtgcctcatggcaaaggacggcaaaaagaaggtaaaatctagagcctccactaaatatgcgacgtctagtgatgaggataactctagtgatgatgaagatagtttgcttactctttttgccaaccttagcatgcaacaaaaggaaaaattaaatgaattgataggtgctattcatgagaaggatgaactcttggatagccaagaggaattccttattaaagaaaacaaaacacatgttaaagtgcaaaatgcttatgctcaggagatagaaaaatgtgaaaacctaaccaaagagcttagcatttgtcatgactctatccaaacctcagactgagaatgctagtttaattgctaaggttgaaaaattaaatgtttgtaatgagtcaatttctagccttagaaacgaaaatgctagcttaatttctaaggtcaaagatttaaatgtttgcaatgattccatttcctattttagaaatgaaaatgccatggcatcctctagagtcgacctgc

SEQ ID NO: 20946 - DNA, 1214 bp, Arabidopsis thaliana landsberg
  unsure (1)..(1214): unsure at all n locations
cgtatactaaaccgggtgggtcaaattgaaaaccggagggagatgagtgatctataagttctgaacttcagatccatcaatgggccatggctactgcaagtgatctataagttcagatccatcatgggccataaatactgcaatatgcgctttatgggcctactattctttttctcaaccagtatgtgtttttatttagaaaatgggattaggtactaatcaatactcacactgtttaaactttaatgcacttatggaaaaatttatacaattccgtttttgcatttttctaccaaatcttaaaactcaaagaaaaccatttgcaggaggctccttgtaataattctcttacatcaattataagtaatacaaatattcaaaacaagtgatataaaatgatttttttgtagtattggttctctataatctttattagttagatgatctccttcaactacgtaaactaaaattacgtagatgatctctaaatttacatgtttttttcaatatatggataagatgcctatagaaaaaatcataaaataggaaaaacgttgctcgaccgcaatagctatctaggcattcgctaagttagccaaatattaaataaaatctgtaaaaagtattgaactttcttaaaatcataaagtacgtaattaagtgacgacaataaagatgattgttacataaatcgtaagaatatacatatagaatagtacaattatatatccgttataaaaagtattgctaataaaaaaaaggttttgaagaagatcagataagcgatgaagagaatggaatgttcttctttataatctaagcttatattatttagattgatacttttttccaaattgaaaaacttatggagttctagtaagccaactcaacgttgcccaccacttcatcgtcatcttccattttctcttcgttactaccatatttattgtctgaccttttaaaacattgaacaaagttttatagttcacatcgactatttgacctaacaatattatccaacgccgacaaaaaaaaaaaaaagaagaggctgacaacttcacgttgacactaaccatatactttatcagcctaactatacttaattacatggtcttagttcctctctaacgaacttaaatattttactctataatgtatggtccaataagaagctatcanaccaaaaactgggtgtgttaaatgagaggtatcaa

SEQ ID NO: 20947 - DNA, 1506 bp, Arabidopsis thaliana landsberg
ctttcccaatatcgccgacgacaactgaaattagggttcccattatccgccgtcgccgactacaacaacaacatccaaggtatgatatagggtttctaaagggtttctagccgccgtaattagtagatctagggtttctagccgccgtaattagtagatctagggtttcttacgggtttctagccgccgtaattattagatctagggtttatagcgttcatgattcatatctctttctttctctcttctgtagatgccctatagttactctcaaccatccacatccgaagctagttggaatagtggagaggcgaatgccgatgcaaattggggggttccagaaaaatgtttttgtggtaagcctgtaaaacttgaagtgtgcaaaactggttacaggcaaggcgacagagtctacaaatgcccaatgcttaaagtaagttactgtgttttcatttcattggaacaacaaagtacaagtgaattatatttatgaagtcttctctctttcgcaggctgaagagtacgagtcccgaaaccaccttattcagtggtgggatcaggctgtaactgaggagcttgagaaggtaaatcacaaacttgattccgcactaagacatggacaactagcatgcaatcatgctttggagtccatccgggaaactgttcatctcatgcaaggcgaaattgaaacccttaaagaaaggttactcgccaaagaagtcgagattgataggcttagggcattactttctacatggtgattatgatgtgatttatgttattgaggatggtgtatggcatttgaacctaaatatgtaactcttgtattttaagttgtgtattgaccggccaactgggacaacttagctactcttgtattttaagttatgtgtacgaaaatgttgatgcacgaatcacacaagtacgaaaaatgggatcaagccacacgtagttcatattagaataagtgagctaggccgtcattggaggtaggtcggcaggtaggtaacgagccggcagatgtgcgacgagctggatgaaccatggtagagaggcgaattggacaaaccgagttgtctgctgaaggtatagacgagctgggcgacgagctgggtggactatgcagtcaatggacgaactgccgctaggcgaggaggtagatgagttttgcagttgagggatgagctgatagctagacgaggagtcggacgagctgactagctgacagctaggcgaggagatggtcgccgtgatgggaagagcttgaagacgagctgaggagctttgaggacgatctgaggagcttgaggacgagctaaggagcttgaagagctgacgagctactctgtctctgggtgtcccggccaactgggtcaacttagctactcttgtattttaagttgtgtattgaccggccaactgggacaacttagctactcttgtattttaagttatgtgtatagaccggccaactgggacaacttagctactcttgtattattgacc

SEQ ID NO: 20948 - DNA, 843 bp, Arabidopsis thaliana landsberg
gtagtgtttactacaacgctataatatcttataatattggtttttcctgtgctattgatactcacaattcctgtagtgaattctttgtcgcatagtctcattccgaatctagaacttgactgtcgtttcattgactgcaaaaacatcgatcagacttgttttgtctcccaatctccatattttattcacaatcatgtgaatgttacccacatgtggagcctttgtattgagaaatttgccaatcacaaaatctttccataacggtttagcttctacaaaaacctcttttgggacaacaactctcccttgaccatctacttcatcaaccacaaacttttgtttagtaaaaacatgtttttgagctgcttgaacgtatgactttttgactgttggacccaccaccctttgagtctacggagattctcgttggctagatgcatgcctccattgtgaagtttgatcattgagatcgatggccatgttctttgagatcctccttctgacttacctgaatccatgtagtttgtatgcctttaacctctgtcgccggagcttcctccagctgctctggagaagccgacagctgcagcatacatgctgaaactacaaaaaccctaatcgagttaagctttgttcatctttccacgtctacaaagcttttcagtcttactaatcgagttaacaatatcatatttgggttcagactttcgggtgacaagtaatagtataacaaacaaaaccaaaccaaaccgtttggtttgagacaaaggttaacaaaacgattgaacatatatttttttggttgggtcatttccctacctttaaataaaaaattaaatgaca

SEQ ID NO: 20949 - DNA, 1074 bp, Arabidopsis thaliana landsberg
ctttggtttttttaattttgacaaagtcttataagttattactagattcgtatatataacaaaaggttattagcattggggtcaatagatatttttaacagatttaaaggacacaatggaaagtttaaggaatgtcttgccaccgatgctaagggtatcctaagcttgtatgaagctgctcacatggggacgacaaccgattatatattggatgaagccttgagcttcacattgagttacttggagtcgttagctgcaaatgggacatgcaaacctaatctcgtgaggcgtatacgaaatgcattgggtctttcgcagaacaagaacgtggagatattagtcgcaaaggaatatatccggttctacgaacaagaagaagattgcgataagactatactcgagttttccatgcttaacctcaaattcctacagctacattaccttcaagaactcaaacttcttacaaagtatgtagctataatctcctcatgcaatactttacatgcatgtttgatatatccacattttggagcttgacatgtttttcacgtttggatgcaagatggtacaaggaacaagactttgaatccaagttgccaccttactacagagacagaatcgtggaactgcacctcgctacgctagcatacatcaatccgaaatactcacgtgtgaggattattctgactaagatttacactattcaaataattctagatgatacgtgtgacagatatgcttctcttcgtgaggtcgaaagcctcgctgcaaccatcgaaaggtacataccttatcaaattagctggagtccgcattaaaaaaagggtggatgaataatatcagagcctaaatttacataaaataaaaattgatgatgaatatacgtattgataatgtagatgggatcacaatgatcatgccatggagggactaccggattatttaaaatctgtggccaaatttatatttcataccttccaagagtttgaaagagaagtgtcgtcagaatcaggaggatcttacagcttgaaagctacaattgaagatgtgagaagtcaaattattcaatattaa

SEQ ID NO: 20950 - DNA, 3134 bp, Arabidopsis thaliana landsberg
agccggttttgctggtgctggtgctagctctttgaggtcatttacagtttcgtactgattgaaaaaaacaggggacagtatcaccttaaccagaatcagaccacatgacagaaggatcgcggaatgtaccaaaacgccaactaagcaacaacttgattcccaaatctagtctccctcaatggcatatatcttgctcatggtttcagaaatcacaaacaggcttaagcaaggcatacatgaggaatgcatcaaaatgtaaactaaaccacttgatattcaattcgtgtcttcctcaatggcttaacaaggcttatgatttcataaattaagcaacaaaacaggattaaacacatttgacaatcactaaaatcagaatatgaccaagagaatgcatcaaaatgtaaactaaactgtttgttttccatatctagacttccgcaatggcttaacaaggctcatggtttcagaaatcaagcaacaaaacaggcttaaatacatttgacaatcactaaaatcagaatcagagccagcagaatgcatccaaatgtaaactaaactgttttattacaaatcaagtctttcttaatggtttaattataggctaaaagtttcagagatcaagaaacaaaaacgttattcgttcatcaagcaacaaaaacaagcttataaggccaaaatataatacctagcaagattactaacacagttgacaatcaccaaaatcagaattagaccagaagaatgcatcaaataaacttgatatccaaatctaacttttctcaatgacttaattaggctcattgtttcacaattcaagcaacaaaatcaatcatacaggagccaatatataatacctgcatatcagaagtccagagagtgaggttatcacgaagaagctgcataatcaaagtactgtctttgtatgactcttcaccaagagtatccaattcagcaattgcttcatcaaacgcctaaataaatccataaacaaaaactcatcaaacacacacataaaccaacaatacataatcatataaaacatccctcagatgagatccaaacctgcttagcgagattacaagcacgatctggagaattgagaatctcatagtaaaacacagagaagttcaacgcaagaccaagacgaatcggatgcgttggagccaattcagaattagcaatatcctacacaacaaaccaaaatttcaaaaacctaaatcacacaaaaatcaaatcacagatcggagaaagagatcaaaaacctgagcagctttgtaagcagtaagagtatgttcagcagcatctttcctctcttgaccagatttgaactcagccaagtacctatgataatcacctttcatcttcagataaaacaccttcgaatctccagaagcagcagcgggaacgagaatcgtatcgagaagcttaagtattccgtcacagatatcagaaagttccgtttcgattttgcttctgtagtcacggatcaacgaaacgtggtcatcgttaccgcgagactcctccttttgttcgatcgatgaaatgattctccacgaagcacgacgagctccgatgacgtttttgtaagcgacggagaggagattacgttcttcgacggtgagttcgtctttgtcaacagctttcgcgactttctccatgaattcaaccatttcttcgtaacgctctgcttgttcggcgagtttcgccatgtatacgaattcatctcttgctgaggaagctcctggtgtcgccattgttgtttagatcggagaagaagatgatgaacaaagggaggaagaagaagaagaaatgattctcagatctgagagagtttttttttttttttatcggctccgtggatttttgtttttgtttataatgaatgagtggggagcgatgattacggattgtgagacgaaaggagagccgttggattgaaagctggcaaaaacacggattcgtaacgaaaaaaggcgctggcttttcagatactttttaggtcaagtttgaattttcaatgattggaaaagggtatttctggaaattacttatttaatgggcttttttctgcgaaacgggtttattgaatgggctttaaagcctattttacggattaactcatttgcgcgtgggtgaattaattattgaatggcccgaataggcccaataaatataacgcttgtattttggtatacttactgatttcatttttaatcggatatccgatatgaaatatgaaaaatagaaaatttgaaacccaaagatggcaatatttcattaagatttctttagctgttaatctttagtatttaaatatttaatttaatgaacgtaatttcataaaatttacaaacaaatacgtcaatcatcgtaaatctagtgagccgacatcgttaatttacaaatattattataaacatttaattatctctttttaaaaaaaaattaagaggaccaactgttataataagatattattataaacatctaattattttttttatttttttaatttaagaagaccaactgttttgttttggatacttataattacgatatttctaaggctataagtcctcatcactttagtaaaaataaattttgtggattggtttcatcccctctattacgaacatggacaacatccatttgcatgtcaagaaggctttgcatgtctatgtaagtaagttttatatttatttgaagatctcgtttgtttattttttttgtgagatcataattataatactcgtgtatttactaaaagttaatttctttatgaaaaaactatttgctgaaaataatatgcacaaaaagtacacacatatcgttgttaataaagcaaatatgtagagtatcgattaaacgacatatgtatatatgaaaagtttgctcataaccattcccttagctcagttagtttctgggctttgaaagaaagaaattctgactcatggttatggaaaagtttgctcaaactcaggcacttggctgacagattcatcaagtgcaacatgggaacaggtggaaatatttggttttggtatgataattggacacctatgggtcctcttattaggtacttgggagattcggggcctagttgccttaggattcttctttctgcccgggtt

SEQ ID NO: 20951 - DNA, 955 bp, Arabidopsis thaliana landsberg
acgctggcatattaatgtggacaaccgggaccacccttaaacacacaacaacgatgtgagatcgtgatctgaagaaatttgggacaatctccgtccgtgatccaatctacacgtgtcctctcaaaccattatcttcgtctgtactcacattgatgacggtttctaaaattatcttacaaattaaattattttttcgtgacatataagttctcatgcaatgcacaaaaataaaaatgatattatcatgcagtactgcacaatccgtttgaggaatcttattacgtattagaatattatcatgtatgtatattactaataaaaaaagagtaatttgtgggctataccctttgatcatgttttatttttatggattgtcaaagtcaaatgtggttttcagcatttgtcttttcgcctgcaaaatgatgattctgcccttgcgcttctctcttagtaactattgaaatgtacggtttagtttaacaggtttagttacgtacactgttccggtttagttgaagattttttggtttcacgttgacgcgattcagttccgttacaagtgagattatttccattattccgaagtgacatcaacatttaatgccccaaaaagtttagatgtgactattgtcacaattaatgcaaaatcatcattacatgttataatattaaaaaaattattgataataattgttgagctaaagaagatgaacccaggaacaaagaattattgcgaacgtacattgctgctgaagaagtgttgatcttgtttttgtaccaagtttggagccaaaaaaagcattgctcgtgtaagtaatgaagttcttttaagaagttttttgttatgtcatattaggatcttgattgtgttcgacctcaatgtttttttcagaaaacccaagaaaattataaagatctatatttgtttgttgaaaatagtcaaatgataagtggt

SEQ ID NO: 20952 - DNA, 1668 bp, Arabidopsis thaliana landsberg
tttgactagtagcttgtcttgaagtaataatgttgctcgtgggtaagcaacctctaatggttgggaaattcatcatctcgatgtcaatactgcgtttctacatggtgaactcaaagaagatgtatatgtgtctcaacccgaagggtttgaaaagaagggagaagagcagaaggttttcaaactctctaaagctttatatggcttgagacatgatccacgagcatggaacacaaaacttgatcagattttaaagagcttgaagttcaaaaagtgttcgaaagaaagtggtgtgtaccacaagtcaaaaggtacaaagctacttcttattgccatatacgttgacgatctctttgtaacagggaactctttgggaattatacaagaattcaaagaaggaatggcatccaagtttgatatgacaaatcttggaaaacttacttactatcttggaattgaggtttgacaagacaaagatggtattgagttaaaacaagaggcatacgcacgaagaatcctaaaagaagctggcctagacggttgtaacccaactcacattccaatggagtttggtctagtattgttcaaagcacaagaagaagaacccgaagtagatgctacattatatcgccgaagaattggctgcttacgatacttgttgcatacgagaccagatcttgcgttctcagttggagtggcaagtaaatatatgcaagacccgagaaaacaacatggagacgctttaaaacagatcttaagatacctacaaggaactttgtgttttggcttaaccttcaagcgtggaggaacaaagaagattgtaggatacaatgatagtagtcgcaaggtcgatccaattgatggtaaagcacaggcggtcatgttttttactttggagagtcaccaatcacttggtgctcacagaagcaaccaacggtcgccatgtcatcttgtgaagacgagttcatggctgcaacagaagctgcaaagaagctatttggctccaagatttgctaagcgaattgacgggtcagagttttgtgaagtcaaaaatatacattgataacaaatccgctattgagctcacgaagaatcccgtattccatggaagaagcaagcacatccatagaaggtatcatttcatccaagaatgcgttgagaatgaacaaatcgaagtggagtttgtaccgcgtgaagagctacgtgcggacattcaaacgaaggcccttccaagaatcaagttcaagtcaatgagaagtctatttggagttcaagacctctctaaagtcaacttgaagcttatgggggagaatgttgggtaaacttcaattgactaaaggcccagtaatctttaatgaggaggttaaagatttagatggatctagaattttctattaggtattaggagttatctaatcctaattgtattaggaataggaaaagttgtacccctatataaggatctctttggttgagttgtaaccataagagttgtgtgagaatattgagagagcttggtgcttagttttgagagagtttctaatcatcaataaaagaaacttattcttttaaaagcttgtcttgtgttcttaagaaattttatcaatgcaggttggattttacgtgatgtggaaggttattatatagaagcaacacagagcaaagctcaga

SEQ ID NO: 20953 - DNA, 2236 bp, Arabidopsis thaliana landsberg
gaaacaaggtttagacgattctttattttttgaaatcgaattttgaaaatcttatcttaggtttgatattgttggtgtgtgtagggattgttgagtataagcgatggcgggaagaagacggaattgttgacggatgaagcagacggtgttagatttaagctgacggatgcagttaccgttgctgataacggcgttttgtatttcacagatgcttcttcgaaatacgatttctatcaatttatctttgatttcttggaaggcaaaccacacggtcgtgtcatgagctttgatcctaccacacgtgccacacgtgttcttctcaaagacctctacttcgctaatggcatatcaatgttccctgatcaaacacatttcgtcttctgcgaaaccatcatgtatgtgcattacatttgttatgtttctaactcaaaaccaattggtaattagtttttatttatagattttgtatattactttaggagaagatgtagtaagtattacatcaatggagggcgtgtggagttatttattcaaggcttaccaggctatccagataacatccggtatgatggagatggacattactggattgcaatgccttcggtaactataaaaattgaaacccttcttagagtttattgagttggttttaggtctcggtcatattcagtatgtgtgtcatcttttatatcatcttttattgatcactattgtatcatcttttattgatcactatagttgaaaacagggagtaacaacgttgtggaagctttcaatgaaatacccattcttgaggaaaatcacagctatggcggctaagtacggctatgaacctatgtttatggagaatgcaggagttttgcaggtggatttggatgggaaccccatcgcatactaccatgatcaggcgctctctcacataaccaccggtgtcaagattgggaactatctctattgtggaagtctctggcattcacacattctccgacttgatctcctaaaataccctgcacaaaacaagaagctttgaaacttcatgtttataaaaaaaaaaaacttttacattttaggagtattcactgtcacaaaatgtaaactcattgtcctgagaatgaatcatgatgtttctctatctctaaggatattagtaacctgaaacaatggataccaaacgaaaaaaatacaatgaagacaaaccaaatcatacttaagatgcacaattcctaaacaaagcagatatttttctttgtttagaactcaaggcaacccattgtccatacaatattggccctactggtaacatagtaaaagcccacgagatttcgactaatagttggttacaacttacaagggactagagtcaaagattattatgagtcaacgatgatttgcgatttcatcattaaatacacgtgtttaatttagttgtttttctcttcaatcacaagttcacaactacaaaattggcatgttcaccatttttccacaaactcaaatttgctccaatgcctgtacttttctcctctcgttctctcatactctccattattgtccccttacttatatctatcgctctctacaaactcgacacattcgaccccgctattgttccttccgatgcattcacatcctctgctacttcactcccgccgcttataaacgacgaatttctcaccggagctgagtttatcggtgtcggtcttctcaatatacccgaagatatcgcctaccataaggaatctaatctcatctacactggttgtgttgatggatgggtgaaacgagtcaaggtcgccgactcggttaatgactcagtcgttgaggattgggtcaatactggtggtagaccgctcggaatcgcgttcggaatccacggcgaagtcattgtcgcagacgtacacaaggttggggttttgaaatcgaattttgaaaaatcacaatcttaggtttgactttgttgttatgtatagggactgttgaatataagcggtgacggaaagaagacggaattgttgacggacgaagcggacggtgtgaagtttaagctgacggatgcagttaccgttgcagataacggcgttttgtatttcacagatgcttcttacaagtacactctcaatcaattgagtttagacatgttagaagggaaaccttttggacgactcttgagctttgatcccaccacacgtgttacaaaagtacttctcaaagacctctacttcgctaatggcatcac

SEQ ID NO: 20954 - DNA, 653 bp, Arabidopsis thaliana landsberg
actcctttttatcttttgtggtctctttactaaaaactaatgaatcctgtttccttcttttcagtcttacaatataaactttgcactatgtgatttcagctggagtcgccgcggctgtgaggtatgaatatgatctcagttttatcattcagaacatcttcatcttattatagacaattctttcctaaacatttagtgattggtttcttgcagcacacgtgtatcaaacaatttgggagctgggaatcctcaagttgctagggtttcagtattagcagggctttgtctctggatagtagagtcagctttctttagcatacttctattcacctgcaggaacatcataggatacgcattcagcaacagcaaagaagttttggactatgtagctgacctaactcctttgctctgcctctcctttatcctcgacggcttcacagcagttctaaatggagttgctaggggaagtggttggcaacacattggagcttggaacaatactgtttcttattatcttgtaggagctcctgttggaatttacttagctttcagtcgtgagttgaacggaaaaggactgtggaaaggtgaagaggttggatgtactgtgcaagccactatactggctattgtcacagcttccataaattggaagg

SEQ ID NO: 20955 - DNA, 400 bp, Arabidopsis thaliana landsberg
  unsure (1)..(400): unsure at all n locations
cctataccaatggtttcaacaactatggacaacagcaaacccattacaagctctctgttccatacaatcaatgtcaagggtttgtttctatgcagcagtgtcaaggannnnnnnnnnnnnnnnnnnnnnnnnnnnnnnnnnnnnntcaacaacaaccaactcacaatgcacacgatgcagacatgaaaactatgcttcatcaaatactacaaggtcaatcttttggatctatggttttggagacaaaaattgttgagataaacactatggtggattccttttataatgatctgaatatcaagtttaaggctttgaactctaagatgagatacatggaaggacaagttgcttctacttgagcaccaatgcctccatgccaacttcctggaaacgccattca

SEQ ID NO: 20956 - DNA, 480 bp, Arabidopsis thaliana landsberg
aatgaataacattataccctaaacacaacctaataaagcttatcttgcgactcatagggatgatgtataccaacactcaaaagtttatacatcaatgaatagcacaaatttcacgagtagcgtccatcttttgtggaccattagttcacttgtttatagacactttaatcattatgtggattgatcattctagagtatattgtggatgctgcaaatctcaaaaaatcattagacatgagagaccaaacctaacaagctcaaacttatgtcaaacaaaataatcaagagtgcaaaatgaatcacaatctgaaggaaacctaggactctattatttttgatgattagagaacttcttaccaaatttctcagcgagccattgtgtcaaacaaatccttcggaatctcgacgactactgctcccaactcgccgaattcgatgtggcaaaccctaaagaattgctctgcctgtagaacagaacat

SEQ ID NO: 20957 - DNA, 556 bp, Arabidopsis thaliana landsberg
tgctctgttagctccaaggcatttgttcttgtcgggatggagcaatacagccatcttcttatactgtttcttcacttctcttttcccacatagtaatcaatttccccactgcgcctactctgagaagctatataaacttcatacgtagtgagcatttgagacaaaccctccaagtcaggaaacagtgacttcgccctcaacgcataactccttgcacctgcaaaatccttttctgcaaatcttctctcagcgaactgcttcgctttaagagcatcttgtgtgtatgcttccatctaaaatcagctcttcaccaccaacagttctacaaaaggaaactaagaccgttctggcaagctaaatctcacaaagttgtccattatctgcaaacatccaccagcgtaaaattattatcttcagtcactaaacaacataacccaatacaccaaagagctcaaacacaccacctttttaacaagaacccaaccccactcacttaaaaatcacaatctttggctcaactctggaatgccaagatcacccctcaaggcttaaaaac

SEQ ID NO: 20958 - DNA, 1364 bp, Arabidopsis thaliana landsberg
tcactggcaaataagaaaggatcaatagttctacccaatggaaaacttaaagcttaaaagaaggttcatacattcattcattaaagcatggatagatagatgtaaagcttaaaagaaagatcatacattcattcaattaaacatggatagatagatgtaaagcttaaaaggaagatcatacattcattcattaaaacatggatagattgataaaattgatagatgaaggcctaattggtagctctcccaaaaagcctcaccacgagctggaggctggagccatctttgatgaaatagtcccccatggctgctgcatcgtccgccatcatcttctctgcgaagtgaagcatttgctcctcagccaagaccaagatccccctgccttctcctctaaaacagtcttcaaatcccggactgtattcccctcacctagggtatggattgtcacagttttccctcctaaccgtttcacaaaaatctgcatgactacgaacataaaaacacaccataatcaaatcatataagcaaaggaaaacaaatacataaataatgatatgcatataaataatttctattctactgattcaaaagaatttaggaaaaattagtgagttagaaagtattgtgagctgtgagttagagagaaagagagatgtgagtttatatagaagtatttggggacgcggatgactctctcgcattaatggtgcattttatgatgtatctctcacacacacaacttgtcaaactaatgcatgtgtgcttaatttagcaaaacaaaatcactctcttgttaaagtatatattaaacttatatcctcttatttaatacaaaaccatcctaatgcacaagggcaaacaaataaaatcacaaataataatgcaaaaaagattaccaaaaacggttctcatcagaaacagaactcattactctcagtttcccccttaccatgcaagacaccttttgcaacaatacatttttctcttggccatttttaaaaaatatccattttcttgaacaaaatgaccaaattactcattttctaatgagaacatgtaattaaaaaattatattttttatgccaaaaattatttttacggcaaaaaaaaatatttccgccaaaacattttttattgccaaaacttgttttctcctccaaaaaatattagaaatccttgtaaattattttaaaaccttttaaaatccttatgaactctttaaatacatatgtaaatactttaaaaccgttttaaaaacctttgtaagtattttaaaatccttgtaaatgttttaaatacaatggttttaaaagatttataagagtttttaaaggagttacaaaggttgtaaagtccttaaaaac

SEQ ID NO: 20959 - DNA, 1133 bp, Arabidopsis thaliana landsberg
acctcgagacctcaacttctttacctaaagacgcgtctgtatacggatttggtgaaaactctcaagccaatggaatcaaactggttcctaatgagccatacactctcttcactgaagacgtgtcggcgtttaatctcaacactgatctttacgggtcgcatccggtttacatggatttgagaaacgttagaggtaaagcctatgcacactctgttctgcttcttaacagtcatggtatggatgtgttttacagaggcgattccttgacgtacaaggtaattggaggtgtttttgatttctatttcttcgctggaccgtcgcctcttaatgtcgttgatcaatacacttcgttaataggacggccagcgccaatgccgtactggtctctaggtaatatatctcacttgtcttagtttaactgtaacttatattgattcaaactatatatcaaactcaagaataagaacaagattagaataaaagactctcttttattgctttaggaaaataactcaaaacctaaaaacacacaatcttaatctctcaactcataagttttgcaacactcttgcaactcctttatataagaaaagaactagacaatttcctaatcctattaggaaaacacacataagtatttaggcaacttcctaaacacaaagtctaattctaatttcctttttgcttgattgcttcttcgtcaagtaagcttcaagcttactccaacattttcccccttaagcttgaagctacactttgtcatatcttgaactcccacaagatctctcatctctttgaacttgattctcccgagtgcctttgttagaatgtcggctctctgttcggttccggggacgtgctccacctcaacttgttcattcgcaacgcactcacgaataaagtgatacctcttgtgaatgtgtttgcttcgtccatggaaaaccgggtttttcgtgagtgctatagccgacttgttgtcaattaatatcaacacttgcttacacgtttttccaacaatctcttcaagtaactcttgaagccaaaccacttgttttgctgcctctgtagccgccataaactcagcttcacaagacgatagagccacagtttcttgcttttgcgagcaccaagtg

SEQ ID NO: 20960 - DNA, 784 bp, Arabidopsis thaliana landsberg
  unsure (1)..(784): unsure at all n locations
gcgcagagttgcgcctgctccattatctgatcctcatcatggatgattatgtgatcatctagtctctgtccagtgacattataggcttgtccatcatcatctctcaaaactcattcttcattagctttgatttgtccgttaaccatagatgttaatctctgagctttgtggttggtgcattttagttatctcaaatcaagtgttgataggttgattaggtccttatctaatgttattcgagttgtaagtctagacatgcacctgaaacacaagagagagagaagaaacaaaaaacgcgttggtatcaaaagaaagaaaatttagacaaaaactctaaacaaaacctaatggtgattcccaagaacttctgcaacggcgccaaatttgatgtcagtcaaattaacctcaagcactctctcaaataaaagatctattgcagtattttatggtcgaatttcacaaagttcttttgttcacacagaaggttgtagtctcgaaattaagctaaatcaataggtattagaaagtaaaagaaaacaagaaagcaagcagcatgtttaattgatgtaaattcaaatgattaaagcttcggttttagggatattatcaggaaatagatgactaatagatctagctatgattaagattgttatcaaaccgttctaaaactcaaataactaatgtctggtcgaccaactctcgtttcatcaactaactatacctattaactagggatcccaaccctagttgtaaatcactagntcctaaacatgcactaagatca

SEQ ID NO: 20961 - DNA, 1734 bp, Arabidopsis thaliana landsberg
cataagcaacaacatgaactttgcagttgcaaatgagattggctatccaggaatgggacgcggcgatcgccaaccaggatgtgatcatggcaattgtccacccgatcaaccggcgaatccgtaccatcgaggatgtgaaaaatcaaagagatgtcgtggtccatctccaccagctcttcctcaaaagatgatattaatacaaaggaaataaaaaaaaacagtttcaattataacaatgtaaccaagccccatgaataaaaaaaaactaatgttttgcgttcgtttagtttaaactattttcttatgtctatttcctaaatcatacaaactatgaattcagttattggcttcacaaacatgaaacacgaatgacctaattatgtctgaaccaagttactgaaaatatttttaaaacgtgaatcttgtagtacaatgttactatctgatatacttgtttaaatgtctcataaagtagagtaatgagaagaacaagagatgatgtagatacttccatatattcaatacagttccaatatcaagaaaaaaaccattcttcaacgaggatctagaactgtgatcgatacatcattgttagaacaaggaatagacctgcttgtggattggtcattcatgtttgagaggcaaacggtaagtgtcaatgttactagtcaggatcacgacgattgctgcaggcaacattggtcgatctacaggatcttcttgaacgcataaaagtgcgatatggatgcatctaataatagcctcgttactccgagaactctctcccattgtcggatccacaagttcaaaaggtgaccctgttctccaaagcttccaagcctaacaaaagtgatcaaataaattaatatcctttggcttaatcatatacactcatataacttgaacgatcatatactcacatgagtgaccaaattgctaggagaaccatcaatgtagtagaagctgcgattcgttttaccacttataatctctagaatcattacaccaaagctatagaaatcagatttcatggagaaatgaccacgcattgcatattctggagacatataaccactgcaaattaaggaaacaccttttagcctacaagtaaccaccaaatatagttggtatgtgttttgtttattaagagaaaaaaatttactatgttccaacaattctattagtgttggcatgagttgccatgccaaaatctaagagaatgttgccatgcgattttggggttcatgtcggcatctaagagaatgttacttgctttcagataacggcgtatgattgtaagccgcaaatcatgatgaagatacataattcctcgagcaatcccggcaataatgttgtaccgagttcagttcgccttgctttgcagggtcgtacattgcataaatatagtaccattggaaacaataagtattgctcggaacttacaagtattgtttttggttttaaacttataagcatttaatttaagcgaccatatcataccgaataggaagtagtcgaggctattgttaggtacatactcgtagacgagtatttttttcttgtccttccaaacaaaatccgagaagcctaaccagatttctatgctgaagctttgtcacaagaacagcctcactcttgaactcttgggtgccttgacccgatgttttcgacagtctcttaacggctacttcagttccacttgaaagctttccctacaaaaatataagatgaatc

SEQ ID NO: 20962 - DNA, 903 bp, Arabidopsis thaliana landsberg
tgttttatctcttctgttatcagtgaccgtgtctcggggggggctacaaaccacattaaacaaaagttgcgttagaacggtcgctcaatagtcttacgccttaatcatccttgtccatccgctttgatcctgcagaactctgaattcacgttaatcaactctttacattctgtaaatgttttggcatggactttctcattagaaggtgtcatttggggtagacggcgcttggtatgaaaggggattttggtgtttaagaggtgtagttaaagtgtttagggttaccgtatagtattgaatgcaggatatgttgcaaaaccgcaagagagaacagatcggttgaggtccacaatttccaaccacttcttcttttaaacaccttcttctcctttacttctttcttactttcggttccccagacttagttttttccgagggggctctcttctgtaattggctcatcttccacttggccggctgagtttgcgttcgtccggaccggcaagcaaggtgttgcctaggccgcaaggtggggcaagtccggcgaaggtgtggcaaagtccgggggactacggccaatggtcggcgcggattggctggctccggccaatgtttgaaatggtcgggcagactttggtcaatggttgcacggtctggcggacttcagccaaaggttggcgcgcattggcgggctccagccaaggtttgttgcggccgggacaacttctcctggcggtgccggttactcgggcaagtagctgggccggttgtcacaaccttctcttcttttttgggttttctactttttatttttctatttttttttatatgtttttttataaaaatctgaaacaaatacttaaaaggtcaaaagcaaaagcaaaattaaattcttagggaaat

SEQ ID NO: 20963 - DNA, 1844 bp, Arabidopsis thaliana landsberg
agctgtcctcatgcaacagttttatttcctaaaacattatgtcttttttttaacgactgcttccattaaggaagttgaaattgattacaatgcagagcatttgttaaaaatgagggaacataaaaatgatattgaaataaactcctgttaggaagtcttgttgttgcaagaatatccgatggttgattagttgatctcgaggtccaagtgaaagtaacttccgagaatcgattttgccaagcctttccttcacgaatccaattaaaactcccaaagctgatagttttgttgttcataagctcttccacacgtttacagtctccttcaaaaatgactcgacgatacccttgactccacgtatgttgcatagccattatcaaagcctgaaattcactttccaaagcactattggttgaaacccccactgcttgtcctgcacctctataggttccttcatcatctctaagtacccaacccgcctttgatgcttgcgtgagaggattataagacccatcataattgcattttacccatccggttggtggtctcacccactcagcttgtgtttgattccttgtattatgtgtttcctgccccccgcattgttaaaagctcttgatataatcttgcgcactattccaaccttcgacgtcatgcttagctctctccaaagtattcagccaagccaagtgcttttgttcaaagacaagcaggctcctgctcttccatagtctccagagaatccagagagctaagtgaaagagttgcagattgtttttgcctagattacccaatagaatagcctccaattttgattccatcgacccactagcggtgattaccgcatgattaggaatccctgatgctctccaaacctgttgagcataataacaatcaaaaaacagatgtgtagttgattcttcctcctggcagcaccggtggcagattgactgatcattaatatgtcgtcgtcgcagattggcacccgtagccaaagccccagaacagaatttccatatgtagtgtttaatcttaggagcagtgtctagtttccagatttttgctttgatcgcattgtctcctggtggcggctgaatggtgtgatctagatacaattgatttgctaaccaatatgcagatttaactgaatatagtccatctttggtataatgccagcccatcatatcttgagttgcggtagagcatagcttaattgacataatcaggtttgcatcttcctcaatcaccatctctctgatggtggcttcattccaactattcctagttgtttgaatccaatccgataacagaataatttccggagggttgtttcttgctcgtggagggcacggtggattaacaggcagccacgggtccacccaagcatttacagtagagccattaccaacaacaatccgtagtcctcttttgattaggtcgcgcccctgaagcaaagatttccaaataaaggaggcgtgccttttttgcgtagcattgaggatatttgtatcattgaaatatcgtctttttaacatccttgccatgaggcagtctggtttctgcattattcgccaaacctgcttacctcataaagcaagattaaaattctcaatgtctctgaagcccatacctctctccttcttagacagtcccattcttttccaagcaaaccaatgcattccctttttatcttcaccagttactccgccatgaattttgctaggtatcccatattatctcgttcgtcaaacttcctgcttggcaatcttgaagaatgttcacttgagatatacgagtaagagctagtagctcacagtattccaagagagagaccgtgagttacc

SEQ ID NO: 20964 - DNA, 988 bp, Arabidopsis thaliana landsberg
aatctagttcacttatagtggtgcagccaatttaatttcgtaaagttgatatatgtcgaatatattctataaacactattattatttggcgccgtcaacgtcaacaaacacaataatttattacattattgtacatgtgcatgtgcatgcatgcacacatactttattgattttcatacaacataaagacttggacctccataaaacatacttatcacacagacagaataacataactaatcaaaagcccttatttcgtataccacatggtttttgataactttaaatcaccaaacattgtcgaaactcggaatcaagcgcacacattgaattatgcttcggagacggcacaataagcttgaagagtatattgaattttgcgaccagcttctgagtgatagaatgtaaacaagtcgcggtaatcaaaaggtctgaagagacgtggatgcttctcgtccacaagttcttttggtgcctctatgacatagtccggttttggacacgtgaaaattgctgctgtgtatcttgtcctctttttctcggtcactcttactcggtgatacggagccctgattctaccattcataagagcctacattatcaccaagtaaatgattatgaacaagaagattatgtacgagaaaacaatagtagtgcatcgaccaacattgaaagtgataagagcaaataaaatcataagaattgagatttggtatgaagttaaagcattataaagtgattgctagagaaatgggtttgtctatattatttatttaaattttgagttatatatgcctctaatcaaaataagttatagatccatgcacatatgtaatttttgtaaaaggccaaagacccttagctcgactttttgagactgtttgccacatgaccgaactagactagtatgaaccttgaagaatgaataaaggttaatatttgtgtgccatagaaagtaaaaaacgaaatgaaaaaacttacacatagg

SEQ ID NO: 20965 - DNA, 1331 bp, Arabidopsis thaliana landsberg
agggtttgcaaaagtgttatttttctactacctttttgcaacattaaccttttttgttggccatttttaaaaaatattctttctcttgaacaaaatgacaaaattatcctcgtctagtgagaacatgtaattagaaattgaaactaattcttagggccaaaatttattttctccgccaaaaaaaaagtttccgtcaattttttttttcccgtcaaaatattttcccccgtaacaaacttttttttccgccaaaaaaaaaatttgaaaaaccttgtaaatattttaaggactctttaaaaactcttcaaaaatctttgtaaagttttttaaaaacttgataaagttgttaaaaacccttgtaaatcattttaaaacctcttaaaatcgttataaagtctttaaatatatatgtaaatactttaaaacccactttaaaaaactttgtaattattttaaaatctttgtaaatcattttaaaaccatttacaatggttttaaaagatttagaatagtttttaaagagttttaaaaggattaacaaggatattaaaaaccgttgtaagtctttttaaaattcttttaaaactcttataaagtctttgaaacaattagtaaatcattttttaactcttaaaacaaaatttgtaaatattttaaaacattgtaactctttttgaaccaatttaaaactcttgtgaacccttataaaaggttttaaaaagatttacaagtgtttttaaagggtttttaaacccttgtaaatcttttaaaaatcttttaaaaccccttgtaaatcctttaaaacccttgtaaaccatttaaaaatcttttaaaaaatccttgtaaaccctttcataattttgaaccattttaataatcttgtgtacccttacaaaagattttaaaaagatttataaaagtttttaaagggttttaaatcttttttaaaatccttaaaaacccttgttaaccatataaaaatctttcaaaatcacttgtatatcattttaaaactcttgtaaagtggttttaaaatctttttataaacccattgtaaatattttcttcctcctaaatttgttttttttcctatatatttttcttttttaaataaatcttattttaagtacactctctaattttttatttttttatccttattatttaaaatatatttcacttttttttttctttatcttcattttcccttttccttttccttatcttcgcatttattattatttatttttttaaatatttcttctttcactttctatattatttttttttatatttttgttttattggggggggcccccaccccccccccc

SEQ ID NO: 20966 - DNA, 753 bp, Arabidopsis thaliana landsberg
aggccattgtgtaactagtgacgactgcatcaacgtatgcaaaagtggggaggatccgttcttgtgcgttcgttcaggcccacataaaggcatgtgttgttgtttgaagacaaatggttctgtactagaatgatatattcatatttgtatcatcacctatcataagatttaaaattaataataataaaaattaatatcaatttaaattttcttatataagtttgatatattcgatgaccatcatatacaaaaggttgaaaataaagaaaatatcattgattcattgtaatgcaatataagctattctatatagaattcaaataaattttgttgatttattaaaagtgtctatgacattgagattgaaaagagtattctaataagggctatattaatatctatgctcagatgatcagaatattaagtatctatgtatgaaaactgagttattaatcctctgtcttccccaacataatttctgacaaaaaagcccctataaaaccaaaatatagtttataacatagtttcaacatgctaaagatatcctagaagatatctcccactggcattaaaaacataaagatattgtaaatcattattgatatgtatagggttgtaggtatatcgaatatatacgatactagtttccgttggcttttagaaataatcctcaaacaataaactgcgagtttaaatagaacctatgtggtctcgctgactataagcaacgttctgataacaaatagtatcgca

SEQ ID NO: 20967 - DNA, 628 bp, Arabidopsis thaliana landsberg
aaaaagattttaaatggatttacaaaggtttaaaaatccttgtaaattcttttaaaactcttaaaaaaactcttataaagaaaaaactcttttaaaactcttaatacgataaaactcgtattaaaaaaaaaatctaaataaaaattggagaactgattaaaagagatcgtataaactcattttctgataaactaatccaaaacaaccttttttttggaatcatccgtctattacaaaatcaaccgatttcaagaaatacttggagtcacggcactatcgcggggcaagcacaaaccagcacgaaaggagaacccaccggaactttttaacgtcttccagtaacccctttcctttgtctaccatcatagctaataatctgtattatgcaaaaaaacacaatcgatcaagactcgtccagatataaaagtttatattttaaaattactaaataagtcatgcatcggattcaaattggaaaatcctacgttctcctatatcttatataaagaaaaaaattcacaaaaacgttttagtctgacgtatttttaaaatctatttccatttctatgacgaaatcatttatatgtaaaaataaatcgggtttacatgaaaaaattgttttggatta

SEQ ID NO: 20968 - DNA, 726 bp, Arabidopsis thaliana landsberg
tcttgctgtgaaaatttacaattaaaatatactccttcggttcttagaagattgataatttagtgtaggtctgggcgttcggatatccgttgtaggttcggatcaggtttttcggattttcggatttttagatttagaagtataaaacctattcgggtattttaagatttgagattcggatcgggttcggatcggatatttcgggtttggattcggattacccgaagtttccaaaaatcaatgtttataaccaaagatgttatgcatcagtaaacaagatcaaaactaacgctcaaaaattttcaggactcttgttcttgcatattttttctttttttcttttttatatataaacttcagtgctctttattgggtttgctattttctaatttgagcctaaactcttaatataatatgttgaatttccctgtggggaaaaaaatatatatgtgggatcttttcctagtttaaggcaattttgactcaatatttcttcctactgaggcaatcgtacacatgaggcagctacgttagcatgtgcttttatgagcatgacgcatatatacggacagatttgttatggcactagactctggtattcttttctttcttgacatcattatgggtctagtattcttttagctcaattaaaagggccaggattgttgaaatttcaattcttaaccttaaaaaagcaaagttcccactaagaacgcattttttttg

SEQ ID NO: 20969 - DNA, 1138 bp, Arabidopsis thaliana landsberg
aaaataaagggtaaaaccgtcatttcaagttgttattgttttgggggactggatttgaaatgatatatagaaccggaaaacaaggtgagccgaagtcgaagcctctggacccgtttttatatttactcctaccattcccttctgcttcaatccttccttactcctccttctactcccttattcttcttcccctctttcattttccagccactacaaacttttctatctctactttttttcctctcgatttcaggtactttttgagaccctttgatgtgattttagaacacaccccccaattacgtttgatttttgattccgcatcgatttcaattcatccgtttctgagtttcttttggatctgggtgtcttgagctaatcttttcgatctgttgtttatcgattttactcatgcgtatgttcattacaccatttgttatttgtttaatcaaccaaaagactcatgtttttcaaatgtctttaatataatttttctgattgaattttataatatttacatgattctggatccagaatatccttcttcttcttccattttgtcctgtattgatttgtctttgaaaaaggattgttctttgtatctgtattggtgaaaaaggattgttatttgttgataaaaatttgatctttaaacaatgtttggatttgcataaaggtagaagaaaatggctgatggtgaagacattcaacctcttgtttgcgacaatggaactggaatggttaaggtgtgtcattctttctctctgttttttttgacaaaagttttcatctttttttcaatttttgattgatgatcctatgaacaatgtagcatttgtttttttttttgtttaagatgatgatgttcttttgtattggaataggctggttttgctggggatgatgcacctagagctgtgtatactagtattgtgggtcgtcctcgtcacaccggtgtgatggttgggatggggcaaaaggatgcttatgttggcgatgaagctcaatccaaacgaggtattttaactctcaagtaccctattgagcatggaattgtcaacaattgggatgacatggagaagatttggcatcacactttctacaatgagctccgtgttgctcctgaggaacaacctat

SEQ ID NO: 20970 - DNA, 863 bp, Arabidopsis thaliana landsberg
atgtaggaagactgttggagtaagctcaaagacttgagaaagaagaaagactaaaccgagactaaaccgagttatggttaaaccgagatatggtttaaggtgaagataaggttagatagatttaggagatatctaaatcttgtaatcctattaggtttaggattagaaatcttcttatataaggacatgttggtttgtaacatagttcttaagaggtttataagatattgagagtttaggttttgaggaattttcctagactaataaaagacagtaattcttttgatcttgtgttcttaatctcttcattcaaatctataaagactactacccggaactttttaagaacgacattgctcaaccaggaatgttgaattcggagacgaattctccttaagtgggggagaattgtgagacccaactccatactttagcccatcaaaggcccatctctcctaataacttaaaaccctaaacgtgtgagtatatattggtgtatgtataaccttcttcatgaaagccgtcaaaaggaaacgcaaaacctaaatttgaaggagatcatgagacacatctagcaaagaggacgtgatatgaccaaggagaagagaattagttgcaaagaagaaaaagaaaccggagaaaaggtgagacgtgacggagagatgggatcaacataaccggaaaggaaaaacattgagaagggaagatatggttcataacagtaagggggatttgcgaagaagaagatcaaagcatcctaggctgaggcaaagcaaaacagaatcaaagaaggaaaagatataagtaaggggaaagcgcgcagtctcaatgttgagggagacgagcgtgacacttaaacgtaa

SEQ ID NO: 20971 - DNA, 974 bp, Arabidopsis thaliana landsberg
  unsure (1)..(974): unsure at all n locations
gctttcatgacagcttcggtagatgagctagaggcggccttgtatacggcagccgccggaaacaacaagacggtgataataacgatggtgaacaaagcgtacgtgaaggaggttggaagagggagtacgatgcttgatctgtttttggagagtttttgggaaggagaagggactctaccacttttggaccatctaatggtggtggcagtggatcaaacggcctatgatcgctgccgtttcaagaggcttcactgctacaagatggagactgaagatggggttgacttagagggagagaaagtattcatgtcaaaagatttcattgagatgatgtggagaaggactcgcttgatcctagacgttcttcgtcgtggctacaatgttattttcacggttagttccctcagattttggaacatataacaatataaaacattttagattgttgctcaattagtatattatatgtacaatgtcatcaggacacggacgtgatgtggctaaggagtccattgtctcggttaaacgtgagcttggatatgcaaataagcgtggacagaattaacgtgggaggacagttgatcaacacgggattctaccacgtccggtctaacaacaagaccatctcactcttccaaaaatggtacgacatgaggctaaactcgacggggatgaaggaacaagacgttctcaagaatctcctagactccggcttcttcaaccagttaggtctcaacgttggcttccttagtaccaccgaattcagcggtttttgccaagacagtcctcacatgggcgttgtcactaccgtccatgctaactgctgcctccacatccctgccaaagtctttgatctcattcgtgttcttcgggattggaaacgctacanagcgtcacatgtcaacagcaaatggagccctcatcttaagtgttggcgttcatggaatgacactcactatatccctaggctctga

SEQ ID NO: 20972 - DNA, 864 bp, Arabidopsis thaliana landsberg
aattcatcggttggaatgccgcggcaaccgatttaatcatcacttctttctttcctttcgataagaactttgccgaccacgcatttattctagtctgtaatctatctctaacaaaagaaaaaatctttgtcttagagccccctaaactctcaggtaacccgagataagaacccatacctccaatattatgaatgcccaaggtcgatttaatctctgcctttatagcatcatccactttatgcccgaactggatcgatgattttgtgaaatttatcatttgtcctgataccgattcatattgttttaggacacccaatattactctgcattgttctttatcagctttacaaaaaaaaaaactatcgtcctcaaacaacaaatgaaacacggaagggctcgttgttgctactttactacccgtgatcaatttatcttgttctgctttccgtatattcgctatacggacctctgtgcaaaggatgaataagtaaggagagagaggatccccttatcttaaacctcgatcaggtattattagtcctctaggttgtccattaataaggaccctatattggactgaagtaatacaccacattttccatgttatccatatttcacaaaatcccattttccttaataattctttaacaaaattccattcaaccctatcataagctttgctcatatctgttttgattgccatgtattttcctttacatgacgggttagatcttaacccatgaaacatttcatgtgcaataagaatgttatcagaaatcaaccgtccttctacaaacgcagatggtgttttcgaaatagagttggtacaccgtcatagtctttggcaaagaattttgaataatt

SEQ ID NO: 20973 - DNA, 739 bp, Arabidopsis thaliana landsberg
ggtctaactctcacaagtactacgttataaagtgtttatgatttttctattgactttaaagcctctgtgttaactagaatgtcttctttagaacactactaatttagttataaattaatgtgtaaactaattcaaatgaaaatttgggaaacattagaggatgataatggattcattagagagtcgacacgtgtaggatctgtaggaatgggccaagtaaataaagcgaagctgatgatgaaaacaagaggagaatcgcgggccatgcgatgcatatagtgattaaggatgtactaaccatgaaatcattatgcatcatcatcattatcattcactatctaatacgaatcccaacgttgttccttcgagaaacacaagaaagaaaaacatcaatattaacgaaaagctattttactttcactgttattaccatatccttgttaaaagtaaggaattttgaaaattattttatactttttctagttatttatacagttgtttttgataaaaaaaaaatgttttacaatataacttatttttaaatttttatgcaaattatatattaatttactattttatgtttatttatattatgtagcctctcttatgaatgattgattttttttaaaaataaatatttttaatctgcttgcttttaactaaaataatatacattatgaaacggagaaagtatttttagtgtttgattaattttgaaaaatgaatatattctaaaata

SEQ ID NO: 20974 - DNA, 1616 bp, Arabidopsis thaliana landsberg
tttatactctaccatggtttgtttaataaaattcaacaccctaccccacaaaattttttttcattatttttctttttttttatgtttggaatggataattaatagaattttgggtgttaaatgagttattgttgggatgttttcttttatgttttatcggctaatgaattttttttagtgaaaatagatgtaattttttctgtgtccaaaaaaaatgaaacaagtctctatttataaagtttggaaaatgatgaattttagtataaaaataatttaaaataaataaatattttataagataattgatctccaataattcagaggaaaataaaatataagaaatttcagtagcaaataaaagaacaacacatgtcctctctttatttaactctcccccacaatttctgtctccaattatttaatgacaagtggcaatgaagggtccatttttaaagattcaacattgttgaatagattcaacactatttaatccacataggattcatttctttattcaataccccattataatcattcaactattgaataaattttttcaataagccattgtagatagtctaagaaaacattattccgccattatacatgtaaacctactggaaccttaattgcttttgttttttttttgtctaaaatcttaattgtttttcacacttttcttgtcagcaaagacaaaaaataaaataaaaagcaaaaccattggttaacaagtcagaaccgaaacgaatttaatcaatcgggttaacccatttgcttccctgtcccagccttaattaatggtctgctctgctcgtctcagctaagttgacgattccagaccaaaaattcttcacaaaaaatatctgaaaaatccagccaagatatttcagattgtacggaaaatttcagagcaaataattttcagattaatcggtatgtattagctcagtgatcggaatttgtgacggcgatggataaagagacggagattctctcccgtctcgcggcgaaccaccttcatctggctcaattcgagccattgaaggctacgttactcgctctcagggttcgtaaccctgacctcgcactcaccattctccaaaccatcgtctccaacgctggaagattcgataatgtcctctggtcacgctcttgtccttccccgtctcttctctcgttcctctccacgattgagcttctgagattcgaaaatcctacttctccttggggatttgattcagaaactctaagtttgcgtgccgatttcttgttgatggttcaggttttgatcgatagagttacaaagaggattaaggaagatgaggagagtgaggatgaaaattctggattagggaattgtttaagggtgttgcaaggtgttttggagttaggtgttgagaggttgaagtttgttgttgatactagtagtagtgaaggaagtaataagattgaggaagatgcagttgggtctttgaggagtatagtattggattactctgatgttttcgatgctttatgttggaatattcagaggcaacttgcgggttgggagagttaccgatcatgtttgggttgaggaagttcacaggagaagaacagagaaaggagatgaatga

SEQ ID NO: 20975 - DNA, 659 bp, Arabidopsis thaliana landsberg
atcggaaactggactcggctccttaggctgtgagcttacttcttctcaagaaaaaagaaaactgttggtaaagactgatttgttgttaatttgcagagacctccaaggcacatcaatggaaggtcctattccagcttcgatttcaaacttgaaaaacctgactgaattgtaagcaacccgtacttaacatttaacatcttttccaaacttttgagcttaaaaaatctctctctgtttatcaggaggataacagatttgcgtggaccaacttctccttttccagaccttcaaaatatgacgaatatggaaagattgtaagtttttaagttttaactttgacttgaagttaaagaaactctgtttccatcaaaccaacatttgaatatcttctttgcttattatgaacttcatcagggtactaagaaactgtttgataagggaacctataccggagtacatcggtacttccatgactatgttgaagttactgtaagtcaaaattctcttgctagttcttactgcctaaaggctaaattttttgatcaagttctcacattaaagtatgtatgtgtgttcagagatttaagctcaaacatgttaaatggtacaatttcagacacatttctgagtctgaacgcattcaactttatgtaagttta

SEQ ID NO: 20976 - DNA, 1039 bp, Arabidopsis thaliana landsberg
gaggaaaatctagcaagagcaaaaagaatgttgaatttggttcaccgtcaacgccaggtcaaatcaagataaactcagagtacacagagcatttaagctcatacgaaagagcttgtagtgaagatccaaagcttgaatcttttgactctgcgcttcacgaaagaactaacagagtcatcaacaagcttgcttcaggagttgagatcaagtctttgtcgtttgattcacttagggaagtgacacaatgtcttttagatatgaatcaagatgtggtcaaagttatattgcaggataaagaagatatatggaacaatcaagatttgttctctcttgtgaatttgtattttgaaagtactgcaaagactatggatttctgttctgagcttgagaattgtcttaaccgcgcgaggcggagtcaagtgattattcagtttgctgttaaccagtttgaggaagagaatggggataaggagaatagaaagtatgagaagactcttgaggagcttaagaggtttaaaatagctggtgaaccgtttacgaaagagttctttgctcttttcgatttggtttacaagcaacaggttatgatgcttgaggagcttcataagttaaagagaaaactcgataagaggcttaggaatatcaaaacatggcgaagggtatcgaatatggtgtttgtgactgcgtttgtctctgtgcttatcttctctgttgttgcagccgctgtggctgcaccgcctgttgtggcggctatagctggtgcattggctgttcctgtaggttctgttgggaaatggtgcaacactttgtggaccaagtatgagaaagtggttagagggcaaatggagattattacatcgattagaattgggacttatatctcggttaaggagatggataatataagtattcttgtgcgtaaagtggaagtagagattgaatctttgttgaagaaagctgagtttgctattactgaggagaaagaagtgaggcttgctatagatgagatcaaagagaagctcgatgtgtttactgaaac

SEQ ID NO: 20977 - DNA, 538 bp, Arabidopsis thaliana landsberg
aaattagccttgagttttttatagcttttttcccaacattaaacagttgaatcttttattcaacatgttcattgcacatagtctaaaaataatattttcaaaaactacaatcccatctaatcaatcctctatttttatcttaattcgactaaaaccaaaaacatgcatttaattatttctttttttttaaaccacaataggataattttataaatctcaatacaatgtcagccctggacagagcgaagagaaacattggtatgaggcccccattaaggggctcccatttaatttttgtttttatatatacatatatttataaatcgtacatgtcctatgctatatgctagagcaaaaatattcacagaataaacgtgatatgaagaaagatattttaaaaacagaataaaaaatcaatttatgtggtgtcacgtgtcagtcactcagcccgacaacctattaaacagaaacttaactttaatacataaaaaaaacctacaataaggtctgtggttggggaatataccccaggcccctt

SEQ ID NO: 20978 - DNA, 665 bp, Arabidopsis thaliana landsberg
  unsure (1)..(665): unsure at all n locations
aaaagaanaataatcctctctatattcaaatttatagattttagaacattaaaaacggtaataccattagtactcctatctttaatgacacatcatactcctaatctagtttgacaatttacatttcacatctaaccattaaattataaccaaaaaaagattaaaacaaaatattaaaatataaaaacccaaaataagagtacactgcactcacttcatttctcctaataaattaaagcccatcttaaaaaagataacgaagtagcaactttgcatcatcatcatcatcatctctctctctctctctccctctcattctgaaatagatgaagtagagaagttaatgttcaccaaacttactgtaaagcctgaaactttcttccttcttcttctttgcttcattcaagtaagtctctgatttgcattctctgtttctcttttgcatatttgtcttccatggcaaatacccaataactaaagagacttctttcttctgttttctcagataatgtatgatatgtctgtgttcacagttatgtttgcttctgacttctaaatctatttctttaataatagtttttgggtttgatgttgcagattaatctttcaagaaccagcggagttggctcagatctagtgattaaagtgagatagatttgaatttc

SEQ ID NO: 20979 - DNA, 1779 bp, Arabidopsis thaliana landsberg
ttttacaaatatgtacctttataatctttagtgagtaagtctaattcttattgattgtttacctagcgtatggttgtgttggtgtccttgctttctcaaaagcttgcgaccacacttacaaaccagcgtgccgcttttgttcaaccatggttcgcaaaccatctacaaggaaaattaaaaagcttcaaagctgccaaaatgaagtcacgcgtcaagtggtccgaacccatgaaacagttcatcgtagggcccaacattgaatggttcgcagacattgataccatttacttgcctatgatatgggattcaaaacactgggtaggacttgcaataaatctgggagtctggtccgttgaaattctcgatccaaatacagatctttacgaggaagatgaggttcgacgtttcattgaacatgttgttacaatcttgccatacctcatccaaaggtattgtaagcctgaatgttcttagaatcatggtcttcagcctttttattggaagcgattagatggcttatataagaatatgcaatctagtgactgtggcccggtggcaatgaagttccttgagattcaggcaagtgataatcccccagagaacatggcgaaaataacagataaacacgttgacttttttaggcgtaaatattccatggacatttatgaagagtttgtctgccccctctatgcatctgactttagtaacaagtgatcactttctctgctttttgtaatattaaccatcttaactttccttttgaatattatcactctgtaagctattttctgaacgtgtgtgttctttttttactttgttgaatagtaaacataatctaattgttgttgtatgaattatgtctatccttttttttcattactcccaaaaggaacaatctctattttatatgttatacatggatttaatgtgatatgcagtgtattattgtgttccatccatatttttatatccataaaatatacgatatgtggactattattctatactaattatataataaaggtttgttacttacttagtagaatggtccaaatcttaaatggtaatgtagcataattagaaactaaaaccagaaaaaagaaaggagctaatacatgaaaaacaaaggttcttaatggttcaaaaaaaggaattgttgttgtatgaattatgtctatccttttttttcattactcccaaaaggaacaatctctattttatatgttatacatagatttaatgtgatatgcggtatattattgtgttccatccatatttttatatccataaggtatacgatatgtggattattattctatactaattataaaataaaggtttgttacttacttagtagaaatgtccaaatcttaaatggtaatgtagcataattggaaaactaaaaccagaaaaaagaaaggagctaatacatgaaaaacaaaggttcttaacggttcaaaaaaaaagacaacattaaaatcgaacttcatatatttggacaagttttgtgtgctgcacttttgcatcggcagcaccttgcattcattgctcgcacttggggctgagcccagtaagctccatcgatttgtacccatcctccgtcctcttcataaggctccacccataaaggtgccttgtagcattcttcaacgaaattctcatatgctattcctttgtacaatacatcagtcaaagcatggggattgtttgcttgaagacatttattgaagaaatgataataaatcgagtgtggcattgaccaccacatggaattcccag

SEQ ID NO: 20980 - DNA, 2642 bp, Arabidopsis thaliana landsberg
gtttcaaaccaactgtcttcttgccttagcatctaacacagactcatctttaagtatctagctttcattattcgtgcaaacaaggagttaggattttgaattatccgccatgcttgttttgccaatagagcatcattgaattggagaggtctctgaatcctaagtcgccttcttttttagagtattgtaatcttttccaaccaatccatggaattcctttctttttcgcattcttctcccaccaatagttcataaggatagactctatttcacagataacttccgccgggagtttgaaacatgacattgcataaatcggcattgccatgaccacaaattttagcattatttccttttcagctggtgatagaaactttgcactccaactagacgtacgttttttaacccaatcaataatattctcaagatttctctttttttccttctgaactgttccggtagtcctaaatatttgcctccgcctccatgattttgaatgcctaaaatgtgcttaagacgattttgtgttgtaccatggacttttgatctgaacgtaatcatcaatcttgtcatgtttatcttttgcccagagtagtaatcatagacatcaaagacatcctttaacgcttgacaatttcggacatttgcttggcaaaaaaacagagaatcgtctacgaattgagatgagttatacttgaatctccaagccctatacgaatgcctctactatctccatcggagactcttgatttgatgaggtgacttaacacatccgcacaaagtataaaaagataaggtgaaagaggatctccttgtcggattccacgttccggtttgatagtaccatgtggtactccattaattaaaacggagtaacggtctgtgcatactgcccccataatccaaccaatccatctctcacaaaaaccaaacaacctcattgtcgtctccaaaaagttccactccactctgtcgtaagctttgctaacatcagttttaatagccatatatgattttgctacacgctttctcaccattaaagaatgcataatctcatgtgctatcatgacattatcattaattagtctccctgggatgaaagcagcttgagagtcataaacaatagaatccagatgagtctttagccttgctactaaacatttagagattatcttatagagcacattacataaagcaatttgtttataatcagaaagtgtttctggattgtttattttgggaatcatacaaatatttatgtggtttattgatggtttcatatgggaagtcctaaaataatttttgacttcttttatcacgttaggaccagcgacatcccaacatgatttgtagaaccttgttgttagaccgtctggtcccggtgctctgtcatcacctaccgcactcacaacattaaagatttcctcatcgctaaactctcgatttaaattatcatttttcgttgatgtcactgttggtgtaaaatctgcaaaatctattacggataccggtcggccattactcttataaattttggtgaagaattgttgagcatgtcgtccaatggtttgatctcctctatagatttcaccatggtcatcactaatggagtttattctatgttttgagaacctggttttggcgcaggcgttaaaaaactctgtcttacgatctccttctctcatccattgattgcgacttttctgctgccaataaatctcctcatctttgtaaattttggttagatctctctgaatttgtggaatcaattgtcgttcggaatgtacgaggcttgatatagctctatttagcactgcttgtagatgttggattcttgtttctgcattcaaatttgttttatgttttaatcttgacatggcttgtcgacacgttcttacttgatccataattgtaacatctcgcttcgtcttttctctattcgaaccttctttaacgtgatgtttgaagtttggtatctcaatcagccgcttgtcaaaccggaaaggtttcatcttaggtggctctgaaattcctaaggttaataacaaaggcttatgatccgaagcagtaaattccagaaactctaattccgagagtggaaaagaggcagcgccttcagtattgatgaatgctctatctaagcagctttttactgtatgagtatgtcgttctcccacccaagagaacttgtcaccacttgattgaatgtcaaccaaatcacacattgaaactatgttgcaaaaatctctgaaagtccattcatctcttggtggtccgcctatcttttcagagtttgataatatctcattgaagtctcctatgagaacccatgagtcattacgcgtaagtgaaatattttcaaagtgtttccaaagatgatgtctttcactttgagaagggtgaccatacacgcaagacaaatagaaacttatgttattaatagatatatgtacatcgatatggcgttcataatcgccctcagagagaaacgacatgtttgttttttaaacaaatatatatatatatatatatatatatatatatatatatatataaacatagtacattgaaatatatatttaaaatataaaaacttttaaccattttcagtattttaatacctaataatataaagaataata

SEQ ID NO: 20981 - DNA, 890 bp, Arabidopsis thaliana landsberg
catcataaacgttaccagtcaattgtttaagacaaatgttaacttatatttctacagcaattttattatatcagattttaccacatattttttactggaagttacatcaaattacagcatctactccaactcaattttgctaacgcgtgctacgagtcagagcctatattaactcagccataacattagattaacatggccgaacacacagtaccatttcattacaagccaattctaaaaataaaacgaattaaccctagaagcaagataaacatcaaacacataatggaatccaacatcaaacacatcatccaaacatcaaacaaactaatagccaagaagaagcttttgttcgttggtttttgggaacattaggataccaagtacagtgacaatgataataaagccaagacaaaagcagcaaagtttgatcatcaattcccatttctggttttccctttcgctcctcattacttcttcattcagttctttcaccatcacctataacgcttctagcttaactgcaacctcagacttggctgcgtttatctcactgtccatggtggacaatttcggccaactgtctacaaccactttgtatgtaccatcttcgacccatttaaacaaatggtcctgcgttttcaatcacaaaccaattaacaacgaaaccaataaaacccaaaatcaattatacttacatctttacgcgtaggacaacagaagtatggttctttgctgacgtcgatgtatagatgaccacgtctaatccgcaatgatacttcgatggtaacccacgtccctaacgctaacggattgcatactcaaatcgagttctcggattgctactcattttcttattatagatgggaaattggagacgaaagcaagag

SEQ ID NO: 20982 - DNA, 511 bp, Arabidopsis thaliana landsberg
tgaggtggaatctgcgaaacgtatattcgaaagacactcagacatggcactggagtttcgagcaaagaaccaatatgtgaggacatcatgtatgaatgtactcctcagcctaatcgatacactgtgccagtcactgcaagatttttccattgatgacctcggccaagcagagagagcactaacatacctgaaagattcagactttaaggtggattggttggagcgtaaactggaagaagtaaaggaaaagaagatagaagagcagattggtaagactgggatgcaagaattagaggaagacctgaaggtcctcaagcagaagtgctctgacatagaagctttgctggagaaagagaatcaaaagtgctcagacattaaagcgttgctggagaaagagaagacaaaggtgttggctgctgccagagctcctcctctaacattggatgatgttgtctgatgacttaggctcccctaggtgttactgttatgtttgtttgagtctaagtttcaa

SEQ ID NO: 20983 - DNA, 1486 bp, Arabidopsis thaliana landsberg
tcaacccgtttcaagtgatccgatgatcaacttgaataccacagtttttccattcttagtctttctcccgtttgcgaggaatctccacaacttggagcctctcgcccttacaatgatgatcacaaaagaagcatagaagtaagggaggggatagcaacacacacaagactcaaatcatagcacaatcacgcacacaagtcacaacttgagctcaaaacacaacccacagagttcacaactcaaatggagctcaagtcactatctcaaagaatcaaatgcgcgaagttggagtctcgaagtctttgaatgtttcttgtaagcttgggtgactcctccatgcgcctaagggtcccttttatagccccaaggcagctaggagccgttggaggccaacaaggaaggctatccttgccttctgtcgggtggcgcattggatagtccggtgcgccacggacagtcactgtagacagtccagtgtcgatctccttttttttggcatagacaactgttgcatctccgggccggttggcgcaccggacagtccggtgcccctaccaactgttggcacgggccacgcgtctcccgcggattgcatagccgaccgttgcgctggcgaccgttggctcaccggacagtctggtgcaccactggacagtccggtgaattatagccgtacgccgccggattttcccgagagcggccttttcaccgaagtccagcctggtgcaccggacactacccggtgcacaggctgagctggactttggctgcacacagccaagtcttttgcaattctttcttttcctatttctagcacttagacaaaatatgttagtactcaaaacaatgtactaagtctagaaacatacctcatgtcttgatttgcacttttctcttcatttagcacataagaacttaattacatgtgttgggcacttaatcaccagaacacaataggaattgccaagggacatttccgttcaatctccccctttttggtgatttatgccaacacaacataaagcaagtagaacaagtacaaaatcaattcaaataagaactcaaatttgttttgattcaattttggcatatatggatcatcctttgccaccacttggtttgtttttgcaaatcaaactcaaatttctatctctaagtcaaacacacatgttgaaacataaagagagtcattacaagagaaattgattcaagatttcaaaaactccccctttttcccataatcaacatttctccccacaagaagccaacttttgacaagagagacaataaagagttttgacaaaccaaaagctctattctatattttcaaaatctctcaagtggtagctgatccatttatcgctttggcctttattttctccccctttggcatcaagcaccaaaacgggatcaatcttggccccttaatcccattgcctcacaaaaatcttcaactaagagcataaaggcaataagagtacaaaga

SEQ ID NO: 20984 - DNA, 276 bp, Arabidopsis thaliana landsberg
cttttatattaactaaaatgttggtttgtttctttgtagtgtcgacagaagactcttgactttgctgcaccgtgctaggcaatgaggaggaagaagctatgtcccataaagttttgttacaaatgcttatcaatcaggtccgttttttgtgtttttttcgattctttaatttattttttctgagactatgtattcttattatgtgttttttatttgaatcataggtatggtgaaaatgcagaagaagtagcaaagttggatgattggatatgtcct

SEQ ID NO: 20985 - DNA, 3076 bp, Arabidopsis thaliana landsberg
tgaaacccgagggtgtcgatcgacaggagtagtggtgttgatcgacaccgttgctctgcaactctcattggcgagctgagcggatgggagcgttgtgtgtagctctgttttgggatcccgagtagtctaaagaggggtgtttgtgctggaggcaatgttgctgatgggcttagtaagctctgaaccatccatgctaaactccatctccaaatcacaaacctttagagagatcctacctctcttcacatcaaacctagcaccagttgtagctaggaatgctcttctaaggataagaggatccttgggttccttctcatagtcccgtaccacgaaaccagcagggattatgcagttatcaaccttaacaggaacatctttaaggattctttgagggattcgtctagaacgatctgcaaagaggagagtgatgcgagtcggcctgtagtgagtcatgcctagtctctcagcaacagacttgggcatgaggtagatagttgatcccaaatcacacaaagggcggttgaacctgcttgtggagatagagcaatcaagaacaaagctttctttatctaaaagcttcttagtggtctgaccaggagtgatgatacggatgtactcggcaatgtctactctctgcgccttctctttcttggccttaggcagcatgattgcactgatgtccctggtaagcagcttagcttcatctgagctaattccattatcaacaagtcgcttgacatacctgttgagtgaagcagaagatgtcctagaagcatccttaggaagagtatggaggatcttctccattatggctgtccacttagaatcatgaatctcctgcttagaatgacgcttcctcggataagggactggagggctggaccttgaaatcgagtagcatagaacaggtcaggcttgttaaaatttccaagagtacgacgtggtttcgcagctggaggaataattacaggaatttggtgttgttgtcgatcgacacctttgttgtgtcgttcgacaccaatcgcgtcctcattctgctcctaaaggtatcgcttgacaccaagccctgctgcatctctggcagctaattgcgcattgaggtgcgcctggttctcatcgacgtcctcagggaggatgagtccatgatcatccaatttctgatcagcctcattgtaggcatgcctatcctcatctctcaaaattccttctacatcagctctgatgactctgtcagccattgctaatctttgagtttttcagttggtgcgttcaagttttcccaagtccagaacagacaagttgataagctgcttcagttgtgtgctccttatttgcctaggcatacacctgaaacacaaaaaagaagaaaaaataagaaacacgtgagtaacaaaagaaaagtaaaaactagacggaatctctaaacaaaactcaatggtgattcccaagaactttggcaaaggcgcaaaatttgataaggttcaaattaccctaagaactactctctcaaataagagatcaattgctgtatttaaggatcgattttcacaaaattcttttgttcaaacaatgagttacatgtcgagactaatctagaagagattataagaaaataaaagtaaacaaagtaaaaaaatagaagattgattggttgtaaacgatgaaataaagagctaggaacatggtattctcagaaattattggttactaaacctaatgaaagataggttgttatcgaaccattcttaaactcaaactctaattatggaataaccggcggtgttctgcgaaactccctatgcctatagctaagaataaccggagaagccgagagatttttaacctaaacatgcattctaaaaaagttcaagtgttcaccttagtagatagaccgattcttattacacacctataaaccaggctcatcaaataatagatccaactacagatacctatcgcgggtatatctattgtctggattcaagatctagttaattactctagatttagcattaagaataatcaaagatgaggaattctaaagataacctagcaaagggggcgatgtactaaaccatatgaatccctaatgagaagccctattcttaagaagcaaactactctgacatattgattgaaacaagcaacacaattgagatagaaagcataaacacagcaaataagattagagtatgaaaggatctcttcactgtatggaaaactggatgaatctctgaaaatagggatgaatagcttatgtctctctgaaaacttggtaggaaagaacttaatagggataaacaatgacctctaaaactatatatatgccgtataaaagggtcatggactaataatgcaaatagagaagtcttttggggcaaatttccacttttgtaaacttgaaagcgtcatggacttttctgggccaaaactggtatcgattgacaccatgactgtgtcgatcgacaccaggagtgtgtcgatcgacactctctctgaatctggaactgaaatcgtccttagcttccttttccttagctcttgctccaaaatgtctctacatctccattgtcgtcccactgcatagaatacctgaaaagactcgggaaataacataaagactcgaaatcctaaatctaaaacatagataaaatcagtaaaaacagggttatatagaccacctcaagacatcaactcgatcgcaccactcgatcgcaaggtcgctagaccattccatctcatcttcactccttaccactcgatcgcaagatagaatccctaaagcccagtttgattcatgacatactcgatcacagggaggcccatttcagcccatcaaatgctcgatcgcagggtcccaacgtgaagattactatctatctagtttccttattgtttaatttttcttttataaatagcctctaggggttttccctaaggtatccatccattatcttaataccatcttttcgcaaacttttgtagccgcaacactctcctgcgattttgtattcactttcaagtatttgatttttcagttttcgtttcatcctttatcatttctgttatcatgtta

SEQ ID NO: 20986 - DNA, 1294 bp, Arabidopsis thaliana landsberg
aaagggcgagatatcaaatcgttttaaactctcttatctttgcatctcttttgtaacccttataagttattctctccatcaaccccaccaccatagcaaccttccattaatcacatctccggtactcggagagcccttaaccataccttccaaagtttcttcactccgtcgatctattccagcagccactttcgacgactattaccccgccctagtgctgacgagatctcttaccaccaaatctgcagatcctcaaccgaagtggtaccacaactcgccgatcttgagtctctggatcactccggtgccacaacctccggcgaagcttcattccattctgatcttcaattcaccgaggtcctgccgccacagtcaccaaagcttcagcgcagccacagagacactagggttcccgttattgggcctcccccaattcagcccattttggttgctctctcggcccaatctcataagtgacggcccaacttctttatccactaggcccaatttttgtctaaactttcccttgttttttctctgccaacgattgtgtcgatcactgaaaatatttgttagaggtcaattaatccataatcaatcatcgttgctctgttggtacaaatcttctttgagagcctggctactagaatcacctttggattgtacccatgtttctagatccctttatcgaaaccatttacaaaggttaagaaaggacggcattatgatcccgtcaccaaggtgcggtgattaccgcaactttctcaccttccaatctccatctcctttgttcactgagttatttattgggaaatctatcaatggtagtgataagctccttatgttcatgaaaaccttgaagcttaggtctggtaattttctatttgtgttaaaccaaagacaaactttgtgtgacattcttaatctccatagtcaaggacattatgcgagagagaatccacctgttttgttgcagtttcacacatatctcttgcgaatcctgattattctttcagcgatttttttgagtttgactacagacccttactccttctcaacgtcattatgtcttgtgacaatgaccaattgtcattatgtcttgtgacaatgaccaattttccacttcccggatcgaccgaagttgtgtctccgatttaccttcttctcgtatgtggcattgtgttctacaacttttgtctccgagtcagcatgcctctatcatcggactattgtatttttatctttaaaacttttatctttgttgtactaaagtctgagaatgatatgttcttaa

SEQ ID NO: 20987 - DNA, 1416 bp, Arabidopsis thaliana landsberg
  unsure (1)..(1416): unsure at all n locations
ttaagtataaatcaagagcagtgtgtgactactggttttatgatgcgttttcccgatggaccataaggaattagatcacgattaagatgtctatggaaagatcttgattcaaggaactcatagtagctgacagcttgtccatcggatttaagctccatccggaattgatcttggaagtttgtccagaatcatctcaagttgcggaaacctaaatatcagttctgatgcatcatcttcagaagaacgtgggatattgtgaaatctgatcgggatgaaacttcgtgggattattcatgatactactggctacatattcaacggtgggatagcatttgtaatggttagttcctgacttatgcgtatgttttcgagacagatttatataaagaaaatcctaacgattgttattgtttgattgggaaaatgaactcngcttgagctgaagctttgcaggagctttcatgactcatgaattcaggtcctggttgaaggagaactaagttagagcttatgagcatatggttccagtaaagatcgtctaataagtgaaaagaaaggagtcttcatcttcactaggctaaggtgagggttgtatttgcgaagcatggtatcattttctttttttatacttcttgacgcatgatatgtaggcttagatctgattgtataggataagattacatgatgatatgactttatgaatgttgagtatgatgtttgataatgtgagtattatatgtatgatattataagtatgtgtatgttaagtatgattatgagtatgtatgtatgatgaatgtatgagtgggagaatcgagctatgggccgtggtctccctagtgatgtggatagtgatggaccgacagtttaacatctggtcaagaacagctgacgagcctggaatgggagtgtctgagccacgagggccagcctccaccacgagggccagcctccacctacgaagatgactggacctaacgatgtgtatgtttatattaatataaataagatgattgttatgaatgtgttattagaagttaaaacatgttaggttgattgcttgtgtctatgtttatatgttatgatgatggttgtatagctttagaaagtgttctatgtttcagtgggcagagttgattctcctcactgagtattctttactcacccccttataatatgctcattgatttgtataagaaatcaattgtgctatgttttatgaactatgtttattttcatatgttgtaagttggatttcttgtgactactttagtaaagtttgcttatgtatccttttgtttaacaacacctagcatgaaatgtattacaacccgtgattactttaatgacaagagtaatagaagattcatctacccttatgcattggctttcttctcgacttaaattcctaaattt

SEQ ID NO: 20988 - DNA, 532 bp, Arabidopsis thaliana landsberg
tgccttgtgcgaggagagacaccagcaacagcattatagttgcatgtgttatgaatttatgatgcatttagttcattagactataaagcagaacataagtcagtttttctttgttttgcttttatgcaatgccacttcccaagtttttatgtaatgatacatttttgttgtttaacagtggaataagtcatatcttcttttctactattctaaaaaaattccatgaaaatttatgatatccagattccagtggtgttaacttttaacttatgatagtaatcctgatattgagttctggttaatggctataacatgtaaataaacaaaacaaaatgatttctatcaggataaggaatcttcctacggtataggtattagtactataactgacagtatctctagtgtcatgtatttggctacgatatattctaaaccttgtgtttctatatgctcctgtttcagaatgattagaccaagacactggtggcattcttacaaccatgcgcaatcaatgcttcaatggttcatgtct

SEQ ID NO: 20989 - DNA, 1900 bp, Arabidopsis thaliana landsberg
atgacgcatagagtagatcaggaatatgattatttgtttaagattgtgttgattggtgattctggtgttgttaaatttaatatcttgtcgagattcaccaggaatgagttttgcttggaatctaaatccactattggtgttgaattcgccaccagaactactcaggtgagattcgaatttttctctgtttctctctttaagtactttaggagtgaaattcagaatatttgctgttagaatcagagtaatacgaagagatagtaatttaggtttggtatataatgttaagaggcttaaagatgggattttgggataggttttttcttcttattagcttgtctctgttttgatttatctttagctataatccgtgaaggtttttactttcactgctatacatagatttaccgtcttcagttatgtattttggttttgcttgtagcttcatgaccacattagtgtagtgtatatttcaattatgtaatttggttttgcttgtagcttcatgacctcattagtgtagtgtagaattcaggtattcgatggttaatttcaagtgatggctctagagcttttagtctgttttgtttcgtttaaagttgcttcttcgttagtttctttgatttggatagcaattaagtgataggtcttaaggtttttggttgcgttggtttcttaagattgaagaatacagtgttttgagagagtagacggcggattttttctcagctactgaatcttttgttcaagagaaaaaatcttagttgtgctggctatgagttatgacagatgcttttctcattttaagactataaatggatggtcgtgaaggccaatttaaaaaaataagaagattctcacagcttgtctcaataattcattctatttcctgatcatttgtcatgcttgaccttgtccacctttatactttcgtaaagtcaaccgataaattttttgacaagaggaattctatgatacacttatgtagttgaatgcggaaagatgcatttaaaatgttgattgttaataatgttactaacctggttttaacaactgagaagatatatgttctttacttttgattgttgaattagcattcttattcataaacctgggaatgcttcaatacctaagatctaactggttgttacggtgaatctctcatgcatacacaggttgaaggaaagaccattaaggcccagatctgggacactgcaggtcaggagaggtacagggcgatcacaagcgcgtattacagaggcgcagtgggtgcacttcttgtctacgacattactaagagacagacctttgacaatgttttaaggtggctgcgcgaactgagagaccatgcagattccaacattgtgatcatgatggctgggaacaaatccgatctgaaccacttgagatccgttgctgaggaagatggtcaaagtttggctgagaaggaaggtctctctttcctggagacatctgctcttgaagcaacaaacgtcgagaaagcgtttcagaccatcttaggtgagatctaccatatcataagcaaaaaggcactggctgcacaagaagcagcagcagctaattctgcaatccctgggcaaggaactacgattaacgtcgatgacacatctggaggcgcgaaacgagcatgttgctcttcttaaactaaaggtaaactgtttatttcggttgctccttgttcagagattcaaacttttgttttcactggcttctcttcttttcaagttttggctgatgaaacgtaactatgcaagactatgtagaatactctgtttttattctcttcggtttggggtttgtgttcagtttaaagcttgttagtagtatacttagaatcttctggtgcttgcttgctttcccttcttcttcccttggtgtg

SEQ ID NO: 20990 - DNA, 413 bp, Arabidopsis thaliana landsberg
tacgagttattcccgcctgctatgattattctaaaactttcaattttttaaaataaaaaatcggagtaaaccgggtaatgcttttaattttagacgactattaattcaagctttttctcattcgtattcgaaaccatttcaattcttttgatagtgattttgaaccattttctattttttaaagcaatgtgggacattgcatacatctatatttgttctctagacgaagtaatgtaatttgagcttgaatttgattgatcttgtcaaaagtttgagtggcattgtcagttgaacttggaggaatagttaaatcagcagtaaaattgcggcatcgattgtattttgattcttatgtgaatggttggattgccagaggttggttttaccctgagttttggatttgatggtgagaa

SEQ ID NO: 20991 - DNA, 778 bp, Arabidopsis thaliana landsberg
gtctattatcgagaggacatttggagtttggaaaaaattatggaggactctttgtgattttccaaaatatagtattcatgttcaaaagagaatggtaatggcgacaatgagattacacaatttcatcaagatttcaaatttttctgatgcagattttgcagaagtaataatagagcctgaaataaacaacactgattgggagcatgatttagatgacatggaagtagctgaagaagcagacggagaacatatgacataaataacagataatactgcagatatcttgtgggaaaatcaatatttacgatagtactattttgcattgtattattttgatgttgttatatgtattatttaaccagattttaataatattttaaatctaaaataatatacgaaaggctttttaatcaatataaaataaaatataacaattttaatttttagttacattatattagttttatttataaaatatttatacagaactgcttacaatattttcaccattcaaacatttgtattgaaccgcatgttgtttttcactattctaaattatctgcattagtagatccgcttgatccgcacatgttccgcatattgcgttttttcttaataaaccgtagttaaaccgcaccgcactagtatatccgcttgctccgcaccactcaatctgttgtttccattcgtagccttaataaaacatcaataatgtatgtgtcttgggttctattatcgccttgaatgtttgaggcgtttaacaaaaacacatagtgtg

SEQ ID NO: 20992 - DNA, 251 bp, Arabidopsis thaliana landsberg
ccgatcgacgggtaccaacagccatctgttgattttggtgataccctctggaataagggaaaccagaagtcatgttggatccccctaggattccaggaaatggtccttgatgagtggattgatgaaaagcttgattagatccccacggagcaaacctggactgactcgctcctcctttttcagggccagtatgaaatgaatacaatggctgcaaagaattccccaaaaaccgcatgttatcatgtgaggga

SEQ ID NO: 20993 - DNA, 748 bp, Arabidopsis thaliana landsberg
tcttttccaataactagtgaatagtgatgatataggcatacagctatgtttgttaatttattgaattatttattgttaggactttacttactgtgtatgtgattcaacctacatgtacagtacgcccatcttttctcgctcactgcggaagctgttgccaattactagtttattatatatcacgttttgcattattgtttttgccaagtactctatcaattatttatcaaaaaaataaaaagtttactctataaattatttccgcaaactcaagttatacacgcaaacatcatcatatccacattcatttttctactaatgtggaataataacttcacagtaattgaaaccctgatccaaaatcaacaagcacaaaagcgaacgataataatagaacttaaacaacgacacgccaaattctaatttagcacagtctcaacgtgctctaaaaacgagtggtgtaagtgaaaatatctgggagggtacaagcattatgggaccaacaagcatttgcatcactcgaagccatacgtacacttatctcagcattttcccatcggtctttataagtaatcatacctaacccaccttagtatataataccaccctttgtgtcacacaaataaacaccataaactaaacaatataccatacaaaaaaatatgaaaatcctctcactttcactactcttgctcttggccgatacagtctaccacgtccagtctttcgcatccgttccagggctcat

SEQ ID NO: 20994 - DNA, 640 bp, Arabidopsis thaliana landsberg
tagttgtctctgtttgcttttgacatggtcttttctttgtttaatttatttttagctgagagttatatcacaaaatctttaatcgtcatcagttttggacttttgaatcgcactatgttttttttcgttatgcaaaataaagttacaaaagttaatgttaaaaatcgcgaaaaaacaaacttgttttgacctatgtcaatcgcaaaagtgtatatgtagatttgatcctttaacggatccctcttgttacaacgacatggattctttttgggcgatcgtgtgtttaaaaagaggcccaaattaatttcactaaaaaagcccataataaccaagatttgggcatcaaacaggttcaagttgctgacgagttaataatttgaaacgtcagggcccacaatagtctcactcccacgtgggaacataacgcggtttactgtctttttctttagttcacgcgccgttgcacgtgcggcctctgtcatgggccaacggtttctcgccaggtcatggccgtgatttgcagtcgcctctggttgaaacgcggatttgcttttctcctttccttctataccgaacatttgaacttttttaatgaaagaatattcggacactagaaagtagagatcataatcacacttca

SEQ ID NO: 20995 - DNA, 411 bp, Arabidopsis thaliana landsberg
gccccggaccgagaaacgaagctgtagcagccaaagttgttatggtactgttctttgccccaaggctttgtttcatataataattcatgaacattacagaagcttcttgcgtcaggcttcagaccttggctcctcgcggcccacacgaagatgtttaaccttataattgcctcgggagtaagttgatgaagatagacttcgaagattttcaacacctccacgacgaagctgctcaaggggaatcgcaatccagctttcaaaaagcttcggtacaccacaacttcattttcttcagggtgtggacaagttttttccccttcgtccgccctcacaatggacagatcccggaaataccttcctctcatattaacaagatgattctctttgatagttgatttaccataaactgaa

SEQ ID NO: 20996 - DNA, 1527 bp, Arabidopsis thaliana landsberg
  unsure (1)..(1527): unsure at all n locations
tccatcacgacctctgaaaaataccctttacattcgatcctttcctgctatgacatctttatacttagaatctgacacattcgttaatgaaaactgtaaaactttttactattacctgattgaatgaagcactgcttcaatgtatgaggttagatactccaccctcgttgtgtcttcaagagatgagctgtgcatagtcatttgacgtgtatatgaagaatcaatcaccacacagagagagagcttaaaatacatggagaagaagcaaagtaaagtctaacgagnnnnnnnnnnnnnnnnnnnnnnnnnnnnnnnnnnnnnnnnnnnnnnnnnnnntccacaaaattcttcaacatacaaaagtatttgtcgcagactccatggtgaacactcgagcaactgtaacacttgcagtcatttagttttaacccttgaaaacccaaaaaggctaaaataagaaacaatgaattaaaagacaatctaaaataggtaaaagaaaacatattaaagcccttttatgagctaaacccacaatacattacaatgtctatgtaggatcaaaagtctctttgataagtttagtctgcgccattgtttcattaattgtttcaagcaacaaagtgaaaaaatcaagtgatcatcaaacaaaacaaaaattgcatagattcatagatagtagaattctcaattgcaatttctacaatcaaactgtaaaaaaaattgcattgattcatagattctatttgaaatttctacaaccaaactctataaattaattctccaaaacctgcaatctataactaagacaaaccaaacctgacaattaatttatcaaatattccttacggcataaccaacttaacaataacaacaatgataattattaacttatcttttagaccaagttttgaggatttacttaccaaagtttccaaggtaatgatctttattcccggtaacacggccaatccatgcttgccaaagtcctttttgatgatcttggcacacattggtatataagctcctgtagagaaaccgctactcttcatgtattagatcgatttttacctctagttactatcaaagacacatatttagactattaattagattctgtaaagttcttgcatttggacttacctcctgaaggaggcaatgaactcttgcttggtcatgtgcttcatttcctccaattctttccagtaattggtaatctaaaaacgcattggaatggattagtaaagagttgtataaattaaccacaaacggataaaatcataagaggattcgaaagagtgatagaagagccacacatggccaagaaaaacaacaccactcccatctgcaaaacatcatcgcttcttcatttaaggtcaaggaaaaagagaaaacgatggagagaaagggagaagaagaagacttaccttgagggtggtggatggatcgccagagaagagagctctgagttgttgatgcagtgactcattgaggtaaggcatgatgagtctgagcatcctctttacatct

SEQ ID NO: 20997 - DNA, 1714 bp, Arabidopsis thaliana landsberg
  unsure (1)..(1714): unsure at all n locations
actcgagcagttgctgtcctaagagagataggacgagttctcttcgaactgatcgctctcctcgatcatctcccgcagctcgatcaatgggtccccctcctccagtcatcgcatcttcttcttctagatctgggggtgaaaagactggtcggagtgcagatcctcgacaggaagaggctgagccccgagatgccaaccctaagtctaaggccgttctagttcctcaaaccaaatcacttgcaggttagaaattaccatttatcctctttacttgctacatcgtttgattcatcggcctaacttctcatacacgggttcgaatctctttattactttgacagcgatggaaacagagggaaacttcttccaatgcttcaagactcggaaagacacaatcctgccaacctttgacaggtggcgtcctgcaattcgcgagcgattcctacttcacgcccatcactcatctcgggttagttccttttgtccgtaataaaccttttaatctttgtttctttaccctgtcgctaaacccttcttgttattatctgatccaggcgagcagtgagcgcaactgacatgattgagatgtatgaaaggatgctgcttcacagggaaaaagtatgttatggcgtggaaggataagtcttcatcccttgagtccgatctccactcttcaaaggataacagagctgatattggaggatcaattggacaacctctcaaccgaaatcatgaagtccaacggcgaactgcaggagcagtaccaaaggtacgacaagatccaagaagaactctcaacttctcgggacagactttcggaatccgaatccagtgcctacgagttgtccaaccagctatccgagttgcagcttaagtacaaagcggtggcaaactatcgggacgctgagttggcgaggtcggcatcaaaggccaggaaagaggtgaaaggtcgcgggatgaaattgatccaaggggcaattgtcttcatccaaaccgaaaaggctagaacggagctggaatcagacatcaaggagtaggagagtaatctcctccttttggaccaaactcatgaagatgacttttccgaggaacgagagagggacgagttggaagccgatttagcagagaagcgaagtcttttggtcgctcttccttcttcatcattcaaccctcaacagttcgaggaattctttaccgactcacctcctttgagcgagtctggtttagattgggccggtaagttttaaaagcctcaaaattttgaaataaaatcgcaataagttactcttgcgtctttcttgatttgagataattgtttcaggtcccagtgaccccgtggaacccgaggtgtccgttatcccggttgaaactcctgaaatggcagccatcccgccagtaattcccccacccacgaactctgaaacagtggtcatcgaggacgacgatggttcagaatttgggatgcctaccgaacagctcactgccaacgaaccggatcaaactgcaacggctgccgcggacccggtcgatcatgagccannnnnnnnnnnnnnnnnnnnnnnnnnnnnnnnntagtgactgtgaccacttaatggggattgtccctttttgttagcaaagtagaagtttatttgtgaaatattttaacgccataagcccgctttgatttcttgtcaagtatttaaaatgatcacagattttggatgtgataagt

SEQ ID NO: 20998 - DNA, 1399 bp, Arabidopsis thaliana landsberg
taactaatgattgtggaaacaagtttgagatagaaattggaaatcgtttattggagcggttttgttgctgctagaatactttggaactaatttaaccatatattttttctttttcaggctatgaatgtcaatatatttagatattgaaaatgtttggccaatcttgaccttgacaaaaaggaatatcgacaaagaatcaaatatttgggacgtcacttcgaatgagttcatgttatccgcagttgcatcagattgctcaagtcatttcaataacttaaccattattcatatgtgctttgtcaaccaataatttaaacattaagtaacccacaaaataaatacttggaactaataagtggtaagtaaatggctcatataccagtttgtttagaccctcatagcaaaatatatattggggttaatttgctaaataaaatctttagaaacgtggtagcgagtcgcaccgagccttttctagtcttatgctttaacggaaccgatagtttaccaatggttcagttatgataaggaaacacctacggacataccaattatgatgcatgtgttatatatatatatatatatatatatatatatatatatatatatatatatatatatatatatatattttttttacggggggaacttaataaatgtttaatttatttttcttttgtaaataaatgatacaggaaagaccaacggacatgccatctgtgggaaaaaaagaagaagatgcattatatggatggcaagtctggcacacgaacggcacaaaatgtccggagggatcaattccaattcgaaggctgatttcccttgggaacgagactatcatcacttctaacgccggggatagagtcaccggtggacacgaggtacgtatttgtttgtgttttaactaaatatttgccattaaggcagtttaacaataaatctattcatctaatgtgaaccaaacataaatctgaccatgaatgtcgatgcatatggaaatataggtttaagaatgatttttgaacacgcccaaatattttcccataggattatttgttccatctttggttggacttctcattttgttgggcttaagcaacaaatcattcgattgtttttggatatacagtatgcaatcggccgtatgtataatagggaacacaaaatctatggaactcatgcaacaatgaatgtgtggcagccaaatgtagaagtatttaacgagttcagcttgggtcaactctggctagtctcaggttcatgcaacgacagtaatatcaatagcatcgaggcgggctttagtagttcgatctctccatcttcatcttcatcttcgtattcaaaataactcataataataatattgaattttggctagtaaggttataacataggagaa

SEQ ID NO: 20999 - DNA, 1326 bp, Arabidopsis thaliana landsberg
cattattgcaccaagcccccctgtcatatcctattgggttttagtatagaaaaaaaaatcccccaaaatattaaatataacttttttttgtccacttgaaattttattataaaagcttgttgtgtaaccagaggaggaatacatatgcccaaacaaggaaaactcaagtcggcagacaactaaaagtctccgaagacattgccggagaaaaaaagaaattccccggaaaacaaatccctatctaagggaaccagggtaaaacgaaactggaaatacaatgcagaaatgatcaaaacacaatcgaaagaggacgactcctaaaactaaaagcagaggcaacaagacaaaaaccttaagaaaaatgatagaactaagagaacagagaaaccttttcttcttttgaaagaccagcaaatgcgacttatcacggctgcccacggccaaaccagaaataatatttactacctcctatcaaagttgaaaaccaatctctcgagaaccagagatatcagaatccggtaagcaaagagcattcatagaaactcatagaacctcgaacacacttccggatgcgacgaagaccgaagcgtcacttaacgtctagctagaatcctaaaaaaagcaacacaaacataatttatttataactaattaacaagaaaataaacactattagtgagccactttgaaccatgaacttcaacgaccaacagcaacacaaacttgtggacaagaataatttatttatatgtaatatgtggacgtgaattatttgttgaacctccaagactagtgataagaacattttactagtaattctgaccttaagaagttcatttcaccacaaacgacataaaatctaatataatttggttaaatgtaacatacagtatgtaactatgggttaggaatggtttacgcttgttattttgtaccaaaccaatttagtcaactgacagttctgtgaggtttattcccaataacttcactagaaccactcatttctcactagaaattctcttgttgcgggctataaaagggataatgctagagaaattaaagcacatatacaagaacaaaaataattctataaagaataaaacgtttagagtaagtaagcttgtagaagtaaacaaaaaagggaggtaatttccgccacctgaattcgagtagcattggccatcagagttcgagtaaaatgtttagagtaagtaagcttgtaaaagtaaatagaaagggaggtaattccgccatctaagtttgagtagcattggccatcagagttcgagtaatttaacatggtttctccagacttcaaaattagtc

SEQ ID NO: 21000 - DNA, 1613 bp, Arabidopsis thaliana landsberg
gatctcactgttaaatgatacaactttcagaatgatttttggatgctgtagaagggtgctctgttagtgtgcaataaaacatgtttttggatatgttggggtttccttgtccaagtcttggagattccatctttgttgaaatttaattcttaaggttctttcgtttttgaaacagaatcttcttctatccacaaatgaaaatgatgcagatctgaagattgctgattttggatttgcaaggtattgtcatcagcaccccttgttactagatcaaagagtgtaatatgaatgaattagagaaggtttcaaatgggctcaagctgcttttgaatgtatattgtcgaatttctaggtaatttcattgttttcttgggggattatacttattatacgcctcccccattttgaacatcgctcttttcttgacgcagatcgttgcaacctagggggctcgcagagactttatgcggttcaccattgtatatggccccagagatcatgcaactccagaagtatgatgcaaaggtcagacctttctcttactaagctacctaggcccttctcttgacattatctccttacaatcctagctgaatacacaggcagatctctggagtgttggtgctattttatttcaacttgtgacaggcagaaccccttttacaggaaacagccaaattcaggttttgtgttctgtctcattgacttctatattatgtatgtgtttgtattctggtgcattaaactaatacgttctccatcgtgtgtttacagttgctccaaaacattataagatcaaccgaattacattttccaggggactgtagagatttaagcttggactgcatagacctgtgtcagaagttactgcgccgtaatccaggtcagcactaattctgcttgaagtagtggagactactattcttttgcatgaaaccatatgccccaggttctattggcatgtgtgttgatctaaaaatgtgaaattatattgaattgtggccacgttggattggcgattcaagcattttataatttgtaccgtgttcagagttttttgtttgattagcacaattaaaaacacaaattgtactgttgccatttcagtctgtcctaactttccgagtaactcatatcaacgggagttgcggagttttccagaacttggaattgtgatttgaatagcggtttatactaaactctagtcatctcctacagttcaccgcgtattttattcgagagagcatggtcctactctgtgtgtatccaaatacgattacaaatcattcttgaatatattgtcttttgcagtggaacgtttgacatttgaagagttctttaatcaccctttcctttcggacaggcagtcatatgatttctccaggtagatgtgacaattgtgggggctaatgcttttctctattttatgcagaaatttgtactgattaaactatctgtgctacaggagtagattggggttaagaacaatggacggttttctttcgtctggaagcagtccctcgagaaacatggaagaaagttctcaagaagactgtttgccgttccttctagatgatgattctagtggacctgaggggagcccttcatattta

SEQ ID NO: 21001 - DNA, 1242 bp, Arabidopsis thaliana landsberg
cttttatttccttaaagccacatgtatacatatgttttgttgtttacgttaatgaagccagccatgacttgacacaaatatttagcaaactacattactttgtttagtgagatataaggtttgtttatgtgctaagaaaatgttatttattggctttatgtagtttaaatcagttgcttttgtatcaagtttgtaataagaaggttgggttaatccaacaacatacgctttattgtgaaaattcatgcttctatgattatataattttgcaactaaacacaacctttttttgttcaaaacctaaacataactttgaaccctagtcaatggagttgatggatttaataaagtcgtatttcgtctgatttgagaaacattgggacaagtcaaaagacaaacttaaatgatattgatgataacaaagatagcaaaatttgagtgcttaaatggagaaaaaatccactaataataatagcaacaaaagaaacaaaattgtctttaaaaaaaatcttgatcctacaaaagtcgggatactggaatttgaagtttaacccaacaagaagaaggctcatgacagcaaaagaaaatcaaatttcctaaagagtgatgataccttagagaaactttgtaataataataaccttagaaaactcggtttggtggacccattgtgctcttcaagtacaagcacctcacctgcagtcaaaggaacaactcaggttttagatactgataaatgtatggagaaagatcgagaagttcaagagggtgttgttactaacattttgccagtttttcttcaagagagaaacgaggaagttaacactcatctgaacattttgaaagatctgcttctcctccatggaaagattaccgacagcaactcccatacatagaaccttcttgagctggaacttcactgttgcctttgtctcattcactttggattccaaagactcttggtggctaacaagagttgggaattttcctgttcattgttcataagagtcaagatttaatgtagcatcatatagagaggatacaagaacatatgcaaagattaggtaaggttagagacatgcctgccttgttgagaccaggaccaagaagacgaggaatctgcttaatgacagattcagaagcaaggaaagcatggaattttttagcaagcttcttaacaagttttttgttcttgttcaacttttttaagagcttcaacatccatttattccaatccaattt

SEQ ID NO: 21002 - DNA, 2478 bp, Arabidopsis thaliana landsberg
  unsure (1)..(2478): unsure at all n locations
gctcgggacatccctcggtatgctgggcatgtccgaggactccacgcgaaaacgtcggcgtttgcgcggagaaagtcgacgagcactgcttcttatttgggatcgaacttgaagccgatccggatctgcttggaggcgtcgttgctggggtcgagagggacggacttaaccgtctccgctggctcgaagttgccggcatggcgcttcacgtctggcgcctccttggagaggctctccaggtcggcgatgagggcctcggattcggtgagggcctcggcgtactccacgcactctacgtcgcattcgtacgcgtgccggtacgtggggccgacgatgagacaccgttggggcccggcatcttgagcttgaggtaggtttagttggggacgaccatgaacttggcgtagcatggcctccccaatgactgcgtggtaggttccccggaacccaaccacctcgaacgtgagggtttcctttcggaagttgtagggattcccgaagcagacgggcagatcgagttgcccaaggggttggacgcgtttcctagggatgatcccgtgaaagggcgccgcgccagcccggatcgaggacagatcgatctgcaggagcccgagggtctcggcgtagatgatgttgaggctgctgcctccgtccatgaggaccttggtaagcctgacgttgccgatgacgggatcgacaacgagcgggtactttcccgggctcggcacgcagtcgtggtggtcgccccggtcgaaggtgatgggcttgtcggaccagtctaggtagactggcgccgcagccttcaccgagcagacctcccggcgctcttgcttgtggtgccgagccgaggtgttcgccacttgcccaccgtagatcatgaagcagtcgtggacctcggggaactcctctgccttgtgatcctccttcttgtcgttgttgtggccctgccacctttcgcaggtggcccggccttgtgaaagtggtgccgaagcatgacgcactcctcaannnnnnnnnnnnnnnnnnnnnnnnnnnnggggcacgactccttgagcatcttgtcgaacaggttggcgcctccggaagatttctgagggttcttgtactcagcggcggcgacaaggtcttcgttggcggcgtcgcgtttcgcttgtgacttcttcttgcccttcttcctcgtgccgcgctgagtggacgcctcggggacgtcttccggctggcggccctggggctgcttgtccttccggaagatagcctcaaccgcctcctgaccagaggcgaacttggtggcgatgtccatcaactcgctcgccctggtgggggtcttgcgacccagcttgctcaccaggtcgcggcaagtggtgccggcgaggaacgcgccgatgacatccgagtcggtgatgttgggcagctcggtgcgctgcttcgagaatcgccggatgtagtcccggagcgactcccccggctgttgccggcagcttcgaaggtcccaggaattcccggggcgcacgtatgtgccctggaaattgccagcgaaggcttggaccaagtcgtcccagttggagatctgccccggagggaggtgctccaaccaggcgcgagcagtgtcggagaggaacagggggaggttacggatgatgaggttgtcgtcgtccgttccacccagttggcaggcaaggcggtagtccgcgagccacggttccggtctcgtttcccccgagtacttcgtgatagtagtcgggggtcggaaccgggtcgggaatggcgcccgtcggatggcccgactgaaggcctgcggaccgggtggttcgggcgagggactccgatcctccccgctgtcgtagcgtcccccacgctcggggtggtagcctcggtgcaccctctcgtcgaggtgggttcgacggttgcggtgagggtgttcgttgccgaggcgacccggggcgcaggcgctgtgttcgcgtgcgcccggtatggaccgaggcttcccgcatgaatcgggaagtcgcagcgcgatgctccgaggggtagccctgcctgcgggaggcagagctttcggcctgtcggaccgcggcatcctccaggagattcttgagctctccctggatacgccgtccttcggtggttgatggctccggcatcgcgtggagaagtattgccgctgcagccaggttctggccgaccccactagaagtcgatggcggccttgccctgacgtcgtcggcaatttggtgctggatgccctggggtagatgacgcgcttctccggccggagcttggtctgcccattcctgcccgatgttccgccggaacgactcaagcgttcctgctccctcatcgagcctggcctgcatctcgcggatttgctcgagctgtgtgtcctgaccccccgcagggactaggaccacagctagctcccgaaggatgtcaacgtgaggcgtaggcctagggggatcaccgttttccggtataccaagatgg

SEQ ID NO: 21003 - DNA, 3060 bp, Arabidopsis thaliana landsberg
  unsure (1)..(3060): unsure at all n locations
tgtcaaaaacatatgacacattcctacctaagccactataatctagagtgagaatcgaggcccgagttgttttgctaagcaactacctctaaactggaaaattaagaatgcgtcacttttcgtacagatatgcacgatctatcatcactatgcaattcatgactttatcctctatccacaaattactcaatttaggattgaaaaataagcttgaggctcgtgagtcgactcgagttcggaatagctcgactcgggtggagcaacccacgagccactctgagctagttttttgggttcgttggtgtagtgagtcgagctaactcgttttggctcgcgagatgtatcaaaacaatcaatatgcagaataatgattcatattggataattctagaaatttgtcttgtttcttagcctttgacgaaggatatattgcatttataatttaaattattcgtaatgtttaatccacatatatattattattaatttactatgtaatacaataatatttatctgggtataattcatgatttgttggcaaactgaaagggaaatagggttaaccatttcctataaatagattttggtggttgacgaccaacacaaaccgcatgtactaactagtttgcctagttgatcatttctcaggtgcataacgttcatattcatctattctaagtccactctccggaataccgtagattattctggacaggagaagctttttggaaattcacctatgtgcgaaccgtccgggcccttgtggcggacggtccgcgacactagggtgagcctcggacaggaacactgcaaaacacgagttaacactatggactatccgaagangaagcgagcaccgttcgggaccaagctcggactgtcgggctcaggcgcggaccgtctggtcgttgaaaaaccagaaaaacccgaaggtgacaggttcagtaaaatgcattcttagcatcctcgcggaccgtccggggtgcacgaccggaccatccgcgactgctttatctgacatctaacgacgcattaaatgcactatagccattgatatagccgttactgctgacagttgcgatttcagccgttgatgtgcatgggcggaccgtctggaccaggggcacggaccgtcagcggttggtaggaagaagcaacagctaggaagtggttggtggctataaatacaaccccaaccacctccattcacttcatccaagcattccaaccttcaacattcaatacaagagctagcattccattccaagacacattcaaagcctccatctctccaagtttcacaattgagaaaagagatcattagtgattagtgacttgagagagaaagtgatccgtgtgttattcgtcgctcttgtcgcttggcctttttgcaatcgtgctttcttgattctttcattacgatcaagcactcacttgtaatcgaggcaagaggcaccaattgtgtggtggccnnnnnnnnnnnnnnnnnnnnnnnntgattgagaagagaaagctcactcgatccgtgggatcgtttgagagagggaagggttgaaagagacccgcccctttgtggcctcctcaacggggagtaggtttgcaagaaccgaacctcggtaagacaaatcaccgtgtcactctcttcatttgcttgtgatttgtttttgccctctctttcggacctgactttatttctaacgctaaccccggcttgtagttgtgctttaagtttataaatttcagattcgcctattcaccccccctctaggcgattttcaattggtgtccggagcccgatacttcattagagcctaatcgctctaagtgatgtcgggagctcacgccaaaaaggagatggtgaccggcgagaacccgccacaagccatgggaaagctccatcgggggagtccggcaataagaagagggaggaatcacctccccgcgtcaagtcgcaccggagtggtgataagaagaagaaaatgaagaaagtagtctactacgagaccgattcttcatcgccatccacctccggctccgacacactgtccgtaacttctaagcgccatgagcgcaagaagtttagtaagattcccctacgctatcctcgtatttccaaacgtactccattactttccgtcccattaggcaaaccacctatgtttgatggtgaagattataatatgtggagtgataaaatgaggcatcatctaacctcactccacactagcatttgggatgttgttgagattggagtacaagtaccatcaccgggggaggaagactatgattcggacgaggtcgcccaaatccgacacttcaactcccaagccaccaccatactcctcgcctctctaagtagggaggagtacaacaaggtgcaaggattaaagagcgccaaggaagtttgggatgtgctcaagaccgcgcacgagggagatgagctaaccaagatcaccaagtgggagacgatcgatggggagctcggtcgcttccgcgttcgcaaaggggaagagccacaagacatgtacaaccggctcaaaaccttggtgaaccaagtgcgcaacctcgggagcaaaaagtgggatgaccacgagatggttaaggttattcttagatcacttattttccttaaccctactcaagttcaattaattcatggtaatcctagatatacactaatgactcccgaggaagtaatcgggaattttgtgagctttgagtatatgatcaagggctcaaagtaaatcaatgagctcgacggtccttccacgtccgaagctcaaccggtcgcattcaaagcgacggaggaaaaggaggagtctacaccgagtagaacacccatcgacgcctccaagctcgacaacgaggagatggcgcttgtcatcaaanagtttcgccaaatcctcaagcaaaggagggggaaggattacaaaccccgctccaagaaggtttgctacaagtgtggtaagcccggtcactttattgcaaaatgtcatatttctagtgacagtgacaatggcgatgacaagaaggggagaagaaaggagaagaagaggtact

SEQ ID NO: 21004 - DNA, 478 bp, Arabidopsis thaliana landsberg
tttcggcttctactaaaagttgaaaattgcgctgctttattatttgcgttatcagaatacaaaacctcatggaagtacctccctatagcaacctatcttgctgatattcttaaaatttcaaagctctgtcgcttcaattttattcatatctctcgtaaagcgaatgatattgtggataggttagcaaagcaagctagatgtaatgctctcgattatgtaatccgttggactctacattgtacttgaaagttaaataatgaaatagtttgacgacaaaaaacagaaaaaataaaatttgcgctgctttattttattttattgattttcttataataaaaaaaaaaatatatcctagtatatatctatatcagtttaagaaatattaccaccgagtcaatgaatacaatcacgaagagcgcatctttatgcccatcacagttaatgaggaggcacaatatacgaagccattatacaaaac

SEQ ID NO: 21005 - DNA, 1084 bp, Arabidopsis thaliana landsberg
caggttttgcacgtcctctggtagccccaactgggttaaagtctcatagcaggggtacctcgttccctagaaatctttcagctcaaagagtctgatatactcttcgactggaacctcgtcgggtttgttcagtagctttgtctccttgcgccatgactctggctcatactcagtctcaatgtcctaatcaatcaactcatacctactcaagatcgctctctttcctctaccgatttcagctcttctctgacttgtcaagctgctgagcgttgaatttctgctctgaaactttcgtaaacatgttcctctctctttggtctagtggaccaagattcagcttcatccacattagaatctggatccatagaagactcaccactgtagttactcatgttgatttcctgtaaacagatggaactcaaagagaaacgttaatacgttagttccaacaaaaccaaaaacacaaactggtcgagtaaaatgatcgagtaacagggtagagtaaaccgaaacaggtcgagtgaaattgttgaaatttgatgtattggatcatagttggttttcttgtccggtttggtgacgcggtcgagtgttgagaagagagagatggtggtggttttggtgagagatagcaaagaggttcacgacggtcgagtaatggtagaggcgatgatttcttggttgcaagtgtgagaagtgaagaagcgttcgagtggtgagcttttgttgagaagagagcagcggcggtggaagtgatgaagagatgatgagtttgaagactaaatcgttttcgtggtcgaatacttctcttctcttccttctttggctatgtatcaagtgattaacggtggtgagactagctcgatggtttgcgagagagagaagtgaacggatgagcgatgagcattgcgatcgagtgaacgaagaccatctttgttctcttttttccgttgagttcgtcgagtgataaggcgatggagagatggtgtggtttggtcaagcgtcggtgaggaagatgatgatgagaggtcaagtgaaattgttgaagttggagagtgatgaagtcgaatgtgatgtccagcac

SEQ ID NO: 21006 - DNA, 2685 bp, Arabidopsis thaliana landsberg
  unsure (1)..(2685): unsure at all n locations
aaatgtgtgtggttcattgctaacaaggcattaacccccctctttttagatgatagttatctctcattataatttatggttatgaagaaatttgatatttctggcttcctaggaagagcttagactggcgctgttccaagctccatatggtgagaacctctttcttgatagggtgagtggcttctcatggtttcttggacttgttgagatgaaagttttttttactttatattgattggtgttttgcaggtttttgatttgttcgatgaaaagaagaatggggttattgagtttgaggaattcatccatgcactcagtgtctttcatccctatgcatcaatccaggagaagaccgattgtaaggatcaatattactactaatataactccttggatgatctcaagcatatgcttttattatctgtgacagttgcatttaggctctatgatctaagacaaactggattcattgagcgagaagaggtaaataataatctgccattgcaagttgcaacccttcttttcagcttcataataagttggacttgttaggtgcaacaaatggtttctgctattctcttggaatctgatatgatgctatccgatgaacttctgaccatgattattgataaagtgagttcttgaaatcccatctctcttagtgtgatgtataatattttggtaaatttagttagcacatgcttcttttctttctctactttgtttttgctagacatttgctgatgcagattctgacaaagacggtaaaattagtaaggatgaatggaatgtctatgtgcataaacatcctagcttgttgaagaatatgactcttccttacctaaagtaccaaatcctctctcttttttagattagcccttccatttaggatttcctttactttatcatcaaccatatctgtatttgaatttgaagggatgtgacgacagcattcccaagttttatattcaacactgaggttgaagactgaggcacaactgtccatgcaacaccgggtcatcttttttctgcttggtcctgtaattcgagtgagattgtcatagcgcaagagcagaacgaggaaagaaggttttccttattttattttaagccaacgtagttgatgattattagctgtaagtaaaattgtcaagcactttgctttgttttgatgactttactgtaattgttccattgaaagtaatgaagcatttttcttttcatcttgcgtctatggcagtatagttgatttaagtcttgattctaccaaagtttgtgttttgttttcggtcaattgtggaatatataatttatagaagatgtattcgaatgaaataatagagtaagagacagaaagcgtataatgagaacactatggacagaatgtgaaagagaagagtgcgtggtgagagaaagggacacaacacaatgggacagagcagtaatcaagcagacactgcagctgcgacttgttcttcctctgggaggagagtgcacaccagtttcctgtctccatatacattgtccacacgccctgttccacatttcaatcatttgtcacatatcagaattccgaaaccagaataaactgaatcgaaaaccaaatgtgcaatctatatcttggatggtctaatacctgtggtgggccagaacttggaggagcggagccaaggcgcagggaaagcagcatactctcgagaatacggctttttccatgtgtctgccattagcaacgatgggggatgtggagctccctgagaaaacaaacaaccaccaacgtatgaatctcaacttctccgaacaatattattattggatataattatgataagtctttgttttcctaattaccttgagaacgttgttctggacatctgcatttcctttttcaatctgtgcaatttcttccctgattgaaatgagagcatcgcagaacctgtctagctccgcctgcaaacgaatattatttagtttcatcaagttgatacactgagagaagaaagagtcaatgagagatctgcatatatccatatttaccttgctttcactctcggttggctcaatcataagagttccagggacaggccaagacattgtgggtccatggaatccatagtccattagccgtttcgccacatcctctggctctattccagcagtgttctacaaattcatatttgaatcggtcagtgatatgcatacccaaaacaactactttaatttcagttcacaacattttcataccttgaagcctctcaagtctatgatgaattcgtgtgctactgttccgttaacaccacggaaaagaactgggtagtgtttctgtaaaaacaaatcaagaggaaaattagactcctttcattctcaaaagatgaataggtaaatagaagacaaagatgttctactacctctaggcgctttgccatgtaattggcattcaaaattgcaatcttagaggcatcagtgagcccaccagatcccatcatggcaatgtaagtataagatataggcaagataagcgcagatccccatggtgcagcggatattgcacccaaaggtgctgtctttcgggttgtgggataccaccagtcggtatctgtatacatggaaatggcagaaacataaaattaaggaattaatcatcaatcaccaagaaacatanaagtgatgaaggataaaagacta

SEQ ID NO: 21007 - DNA, 608 bp, Arabidopsis thaliana landsberg
gagttgctgaaaacatacgtctaaaaagatgattctccaagcttccttttggcatgaattcatatacaagaagccggttttcgccttccgcgcaatacccaactagtaatacaagatttgggtgactaagttgaccaagatagtttacttcagtctgaaaaaaaaaaaaaaaaacaatatctcaaaatgtcagcaaacacacactcattaatcacggtgaaccgaaaaagggcgagaaaccgaacttaccaaccactctttatgaccttgaaaaccttcaggcttaagctgcttaacagcaacaacgattccagaaccgggacgtgaagcagtgagagatgtttgatcaatccatcctttgaatacacaaccgaaacctccttcccctagtagattatcttgacgaaagttcttagtcgcgttcttgagttcgttgaaagtgaaagcttttaggttaggcgatgaaagtatctctccttctgtcctaagtgttggtaatggcccaaaactactatctgtgctgtaagaagttgtgcttagtcctgaaggacccgttgaacggcttgtcttgcttgaaactttagagcccgaagagctattaaatgatc

SEQ ID NO: 21008 - DNA, 564 bp, Arabidopsis thaliana landsberg
gggttttattattatcttacgaattgatatttttcctctctttctatcatttacttgtcaattatattgcttatattttgcttatgatttacttatgttttgattatcttttgctttttaattttgtaaatttgttttttatactccaatttttcaatttttcaaaatcttattaacaatatagtcaatggagaggtagagtttatctctctattgagtttccaatggcgatggtgagatacaaacacattgcaaaggatctcaaatacataggtgacatcaattatacattggactgatgcaggagagccattcaacaaatcatatgcgatgcaaaggtgagtcactttggaatctctacattttgggtggtatccaatctttgctaaaaaccttttcctaggaaaattatacgttttaagcttatgtttttcatttctttcttaaaaccatttccaggaaatttttctcatttttctttcttctactaaccattcgttcattttccaactaactattacattcttctcctaaacccaatcatttcttctctggtttttttgc

SEQ ID NO: 21009 - DNA, 1827 bp, Arabidopsis thaliana landsberg
tctatggatgttctttatccctcttttgtatggattcttatctattcttatgttatgcatcgattcacattagacaaagacacataagacataacatagatagattcacaaaccctccatcgtttaatctcgacacttacacaatccaaaacaaagacaaacatagccaaacccctacaagcttcaaaacagagactaatccaatactacaatttcactccaaaacctcaacaacacctgcactcttccccaaagccatacaatagatgcaacaatcacaacagcaacccctacagtcttcaaagctgactttgccataacatgtcctacctagctcttccacattctccttcatggtcaagagttcaccctccatcttcttaatcagctcttcctccatctgcttagcgtttttattaaggagctccatattaaccatcacgttcattctgaggtcactaatattctctgcaactctcttacacttctcatttaccatcttaatttcgtccaagagagcttcatcaacccatttgaacaagtgctcttcattttctctctataaaacagaatttccaatcatttactccttcaatcaatcaaatatatcacaaaatcgaaaggtgtaccttcattgctatcgcacaacggtagaatctccggtatggattctcctttgttttcgatgtgaatgtaatgatctcttctccacaccaacatttcgaggggacaccaggaggacagacacgaaatcctgaactggaagcggatgagtagtagctgttggtgctcattttcttataaaattgtcgaatgaagaaccctaatcgactaaatcgattttgcagaagaagaagaatgaaaacgacgtcgttttctttctctttttgatgagttaaacgaaatgaaaacgacgtcgttttcttaacaggtctgagtattagtcgggttaatcgcaatcgcggtacagtaaacgcggatttgtggttaatctcggttaaatgaatggttcaattggaaatgtatgtttaagcatgaattcgaaagtagatgatgtaattttgaggaatatgaaagttgatggtggaaatttaagggcccaaaagtccgggagtgaaaactgagaatcaaatagtttatacctcaaaaatcagccaatccaaagaaaataagcatggtaattaatagtcttgtaaattttttgtcaattatgcgaaatgaaaaaacaaaaaatctatatagcttctctaatttactttcgagacgttgacaaaaatataattagtttcagacaaaagatcccgagattgatactatactgtactacttgttgtattttgtttgttttatttaattgaatctaccttaaatgttgttagttaacaaatgatttttattaaacatcttaacgttaaacacttttcagaaaaaaaaaagaaacaaaaaaaatatattgaaaacaaaaacaaataagaaaagaggaacgaggaagctcgtcgtcgatcaaagaaatttcttagcgattctcttgccggatcgacgaactaaaccctagaatgatttcgtgattcgtggtgctctcctttggtatttctcattatttctgggaaaatttcacgagattcagtctcgtattctgttcgattcgggtctataaatcttattgttgaatttttcttaatttaatttagaggacatttcgcttttgaggatctattcttcctgaccgtgatgaagtctgggagtgctgcgaaattgatagtagaagcgcttcttcagcgtttcctgcctctcgcaagacgaggaatggagacagaacaggaacag

SEQ ID NO: 21010 - DNA, 711 bp, Arabidopsis thaliana landsberg
aagactataattttgttttttctttttgctcatttttttcttacaaaatgcttataatttttttttaaatgttctataaagttttagtatatcttttatattattattatttgtgattataccaaaaaaatagagggcataaacatttcatatagtcatacactcgagagttgcttttcatcttctccctcacattccatcaacactggagaattcacctattaaaggatggtggtgcacagttaaccacatgcagatttacaatttttttcagataaaattgctagtaaatcccatccaggcaagaactttatttactaattgatctaagaatgtcaaaaaaaaaaagctcatccaacagacacatttagacctttgtatgctccaagagaagagatggagaaaacgtacagagataatggtggtaaaagcagagatagataccagcttttcgagtaatggtgatctcgagcgagacaccaacttcttcaaaccatataacccaagttgatatctgtttaacctcatcaatggccacagcattgacatcaatgcccaatcatttaagcatagcttctgtaacattgtgtctttggcttgctcttgagaatgattctctgcgacattgtgtataaagcacaaggtgaaggacgtgggacgtttcactagtcctcatcaacgttatgttctctttatcatgtgggtgcgtct

SEQ ID NO: 21011 - DNA, 324 bp, Arabidopsis thaliana landsberg
atatctagatctaagctttgtctcttccacataacactaaattaataatttaagaaaccgagaagaatattcattaggtgaagagtaaaaatgacgcaacatcttaagcgtctgtgagaatctggtgttacctgagaggcaaagaatcgtaatgctttcggagattggagacgagtttatcaggcaactggcttccaggatacattttagcaaggtttctcactacagtagcccatacgagctttctacctcctccggtagctgcattttggttgtctcgactcgaatcgaggttgagagagttcttgagcgacgcgatcgcgt

SEQ ID NO: 21012 - DNA, 1079 bp, Arabidopsis thaliana landsberg
tagtcagcttccctacatagattgtcgtggactggacccggactagagtaacggctaaagcggtttgagctaactggttttcgttgcggcgaattttgtccgcgaaagcggcgaggcatttgacgcagagagtttggtaacgcgtgacgcggcatgatgagacaatgaagttgatgctgttgctagggtttggtgatgatgaaggtttggctatggtggattggcagagtagtggaagaaaaagtagaaggcaataacaaagatgagttagctttggttccattggtgtgtgtgtggggttctttgttctatttgtggtgcgtttcaattaaaaggcatatgtgtgtatacacgagtgaggtcttatttataggagagcttcatttattgtatattgtttacaaaaagacaatctctattaaaaaaaaaaaaactccaaatggttttcaatttagtgattagaaaacaatcatttgaaaaaaaattatagtagaaactataacacaatttggaattcagatacaacaataattcactagtagaaaccactgtttataatcttacatatatgcttgttcaagtttgagaggatatatatgtattattatatagcatagattagtgtttatctctccaccatataaatatgttaaagggggatatggtggtcacatgtcttctttttggtcctttgattagcttttgcatgtttttaccatcttttcatatattattttatttttatttgttttaataacagctttattatttgagagaaaaaatctgatactgtttcccagatccatcacttataaaaataaacaaaacacttccatagtttccgttgatatgtgatttatgtcaaacttgtccaagttttatatataattattttccaccaaatatgcaggttaggcaatgaaaattggggcttacaaaaaattagaccaatacagtagagcacaaaccagagaattcaatatgcgattctaagtggagccacagttgcatcaatcttgagtaactgcacatgcgtcttgttgctgagatggaactacagttttgtaacaacaatcaaa

SEQ ID NO: 21013 - DNA, 386 bp, Arabidopsis thaliana landsberg
ctaagtggctgtaagaagctccatgattatatcggaagctttgtcgggtataggacaatctttgaaacttagagtgagtttttttagtactgctgaattctcaagaaagtaattcgctagattaatcccagtttcctctcttatattcaggtttttaatcttaacatattccagagtcgatgttaaacatcgaggcacacttgtaagggcgactcgcccttgcaccggttcctgctgaagtctacgaacaaactgagtttacaatctttttcaacaccgttcttaggggtaaccgggatgcacttttagtctataggctgcgaactttttcttcaaataaattatgttaagaattttactgtaaaatacatgactgtgaaatttta

SEQ ID NO: 21014 - DNA, 1172 bp, Arabidopsis thaliana landsberg
ttaattaaattagtatttgactttttaatcattaaagagataaattaatttactttttaaaattttatttctaatggcatacctatgtaattatttacaaaaattaaggttagatttaaaatgtacttcccaaataatatagtaagatatttaattattaagcattattaaaacgaataatacgtataatataatcgtagccgttggatatgattacacgtgcgactatctttcgatcgcactaaaagcaaaggaaaggctaaaaagaagctcgagagtcgagatcgatcaaaattgtaaatcaatcataacacattttaactagctctaacacaaactctaaaattttagattaattcagacttggtaacaattttgacttaactacgagcgtcattaccattctatgcatcgttttacacgaattacactcacatctcaaatatacatgtccacatgctacgtaccgagtatcgaccacacccgataaacaacgggacaagccctagaatcccgaaaaggcaaaaaggtcccttgttttctctcttttttcatgttaaacacatacttttaaaattaacaagaaagcccagatatttttggtgttttcttactgaatctagacttgaagagaattttaggaaaactccaaaaagctcgtacgctaattcttatcttcacttccattttccctgtggtgatggtgagagttcaagtgttccaacgatggcgaaatccccggtagaggtgaaactgatcccgatcgaagctactccggagaacttcgcagagtatggtcaagtcatcgaagcctctcgtgacggtgcaggtttcggtcccaacgacgctcaactggatctctccagaggaatcccacggtactctttatccagtttactaaaatttcgttaatacctaagattattgattaaaacacatgcttcttctaatcatattcgttgttgattaatgtctaaattcctcatctttgatgctaatttatcaatcaagctatgtgatttgtattggttcctagatagtcgtgttgatcagttcctaataacaaaagacttatagattttgtaggaacgtacttatttactacaaaattcaacaaaacgaaagaccaattcaaactagactcttcttactacttcaagtaattaactgac

SEQ ID NO: 21015 - DNA, 584 bp, Arabidopsis thaliana landsberg
tatatcataattatagtttagtccatgtttgtcgattcgggaaatcaattttctactattttgtttcgttcgtctctttttgtggttcggccaaaattatgagatttactaaaaccttgaggcataagagtttttcttacccttatttcaggattttttttctctcattatgagagagtttgtatgagctgagctatttggtattctatgtgggatgtatttactagtagatacttgaacatttcttctcaataactcaagttcacaaaaaaaaacaaaaatcccaaagaggaaagtacatttattcgctcaattaagttcacgtactaaaatgcaacacagtgtatattataagactgtttatctctagaaccctttcatttaatatggagctctcattgtactgttgttgttagtttctaagaaaaggatataactcatacctaaagttacagctcgtacccaaaactctcccttcttgtttaccgtcacaacactctggaaacttcctcaaaatcccttccaaacactcaaagcactttgtaaatattaagtctttcgtacactgcaccattgcagacacc

SEQ ID NO: 21016 - DNA, 596 bp, Arabidopsis thaliana landsberg
aaataaaaagtaaaatttcttacttatgccagataattcagactgtttattcataacattgccactttccataagctcgtatccaaagattggtatagaaaatatgttatctcaacagttattatacaactttctccttttcttcaacttctcgcgctaccatgaaagcgcataatatcacatttataggtgagaaatatcaaaatacattaaaatacttccttagatttgaatactaaatttaataaggttaccaaaaattaataaatgtaatttagagaaatgtcattaatattttgactacatgtaagaaaatcaaatttcttatatgtttatgattaacttaccaaaattaatatattcattattcatatataagttgagtaatataatacagttttaatacttacagcaaaaaaaaatcaaatttttttttatagatagccatataaatttaaatagggagttctttcttgatcatgattgcatgaatatgaattctttagtgtcgtggtcatgcctttcatataggaactatggtacgtctcatgttagctttttcttttcacatctgcattattcatatataaaaacat

SEQ ID NO: 21017 - DNA, 707 bp, Arabidopsis thaliana landsberg
aacaacagaggataagagtgaaatacctaaattgagccggagatgaagaatgtgaagaacaagactgagattgaaccggagatgagactgagagagctagatattgtcttctcgtcttcctaaatcgagccggagatgagattaatgtgactgagcgagctagatttggttggaagagaatactgagagggaagaaatcgagagaaatcgagcaaaattgatagagagggaaacaaatcgagagaaattgatagagagggaagaaaattaggtctgcaaattttgggcatttttcgatgccaaagagaatgaaatttttctaagtgcgggatctaattttttaggttaccgcctaactttaacatagcgtttttattaaaatctgctattgaaaacctgattaataaacacgtgacttaaagtttattatatcatagcgtttcattgtacacaaacgctatttaaaataaagtggttacataacaatagcattactgacataaacgctatattatagtgctattaaaacccaatattcttgtagtgatgtttcagataaagctattcaacggcatggtttacataaagaggactatagcttgtttggtaactatatcggacttgagagagagagagagagagagagagagagagagagagagagagagagagagagagagagagagagagcatgtgagtgatagaga

SEQ ID NO: 21018 - DNA, 1331 bp, Arabidopsis thaliana landsberg
cttttgattttaattaggctttttgatttttagttttccggcttagtccggatcgtttatctcgtctatgtgcgagttttctttagtcgttttgggtacttgttttattttagtttgtttgttttttcatctttttttgcagtgaaatatatctcttccgttaaagaggagacaaaagccaagtgtttgaatggaatttcctaattcattggttgctcggttcctttcatggattgattaaatccttcataccccttgttggggcctataatggcgttgggatgaaggtttattttcagatcgcaaattgtgatgatgggatttctgtggtgaagaacggatcaggagagggtgttttgcgactgtttggacctctttccatgtcgcgatctctggtgcttcaagaagctgattcgtcgtggatagtgaatccctacacttggagatttttgcagaagatataatattggtgacccttggagttggcagctgaatcccgtaggaattctcggtggattatggagaatctgatggacggagaatatatactacaagacaacctgcaatttgggacggattattgtgaccttttattcagtcgcaaaatatagggactacgttgtgacgattttgtgactgtacaacgaccacggtaaaagtagatgcaaaacagtcgctaattaacgacgaaacaaaatagtcgggaaacggtcacaatttaacgactcttttcggacgctgtcgcgtctgaaagattatggtcgcaaattcatcgcaaagagcgactacttactgactgtcatgttggtcagaaagtttagtcgcaacttactctcaaacacgtcgcggaaagtaggtaaaaaacgttgaaaatatgaaaataattaggtgtactaactttatgtgactcttatagacggtcgcaaaatggtttcaatattttcgaaaacttttaaaattattagatatttaggtgtaccaacttttgtgactccacataatcggtcgcaaaagcgtcacaaatatttcattaaatataactaacttcttcatttgaattcttcaaaacaaacttcttcatttgagatcgatcagtaaaaaaaaaaaaagaaaaaaagagagaaaaaaagtgagaacaaaaaatcaaaattgaaaggacgtggaataatccatcacgtgaatggatgtataatcgaatcgatccatttactaacaatatcgcaacggattatttggccggggtggaagagttcattgaatatgcaagctctcatgttcaagataaaaaatgtcagttttaatgtccctgtggtgtttgtcaaaattcaaaa

SEQ ID NO: 21019 - DNA, 771 bp, Arabidopsis thaliana landsberg
gataaagtattcgggcctcggcggccgcaaaagacacatatgcattcaaaataaactactccggcagaatcaggcgtcgccggagaaggagccgcgccctcggcctcgtccccaccctcggcgagatccgtcccggcctcagacgacggcgcaacgtggaggatctccgcttcgaaggtggtcgccagcaccgcgcttgggcccgcgacggccgcatcgagcctccggacttctgccagggcggcttcatcttcgtcaggaaggcaataccgcctcgctgacccgctccaggtccacgacgtagtgggaagcgagcacggcgaaggcccgcctgacgccgtggtgtagcgcctcacggagtctgccgcgcgcatgatcgccaaggctgtagcgactttgaggggagcttcctgagggaacgtcgccggagccaaggactcggcagaagtccgagacggcctcggacatggccacgtggtcggcctccctctgcttggccgccctggcaagcgccttggtggactcatcaagggcggactcgagttctgcgaatagacagaacgaaagatctcaaacacagggggaggaaacaagctgaaacgaaaaccgaaaatggccaaggcgtaccttcggctcgggcacgctgctccgaggctgcgacatgggctacggctaggtcggctgcaagggctatagccaggctttcggcctcggcagcccggccccgaagattggtccgctcatcgacgatccggtcgaactccgactgtt

SEQ ID NO: 21020 - DNA, 1255 bp, Arabidopsis thaliana landsberg
taattagtgacggttttacaggttacatgttgattaatctgaaagaattgcagaataatttcactattatgcatgcatgttactatttcacttattaatcagaatctaaatctcttaagaaaataaattaacaaatattatttctttataaggtggaacaaaaaggagagggtccagggccaagatgctcacatgacatagcacaggtagggaacaagatttactcttttggtggcgagctcacaccaaatcagcccatagacaaacacctttatgtctttgacctcgagaccaggacttggtccatttctccagccaccggagacgttccaaacctctcttgcttaggcgtccgtatggtgtcaattggatcaaacctctatgtctttggaggccgagacgcttcacgcaaatacaacggcttctactcgtttgacacgaccaagaacgagtggaaactgctaaatccggtcgaacaaggacccactcctcgtagcttccactcgatgacagccgatgagaacaacgtttacgttttcggtggagtgagtgctacggttcggctcaagacactagacgcttacaacatcgttgatcacaagtgggtgcagtgttcgaccccgggaggttcgtgtagcgtaagaggaggagccgggctcgaagtggttcaagggaaagtatgggttgtgtatggattcaacggatgtgaagtagatgatgttcattgctacgatccagctcaagacaagtggacacaagtggacacgttcggtgagaagccttgcgctaggagtgtgttcgctagtgcggctcttgggaaacacattgtgatttttggaggtgagatagcgatggacccgctagctcacgtgggtccaggtcaattgaccgatggaacttttgcattggacacagagacgttgcaatgggagaggctggataagtttggtggagaggaagagactccgagtagcagaggatggaccgcgtccacaactgcgaccattggtggcaagaaaggacttgtgatgcatggtggtaaagctccaaccaatgaccggtttgatgatctcttcttttacgggattgactctgcctaattaaggcagatttggtgatcatgaacgtttgtgaatgtgtgtgtgtgtgtgtgggtctgtgtttgtgtgtcgaataagggaagggtataccaccatatgatccttccccagcttgaccattgttttttatttaatatggttttctttctacatgt

SEQ ID NO: 21021 - DNA, 342 bp, Arabidopsis thaliana landsberg
cgcccttgataatgttaaagcagtgaaaagttttcttggacatgctattttctacaggagattcatcaaagacttgagtagaatcgcaagaccattgactgctttactctgtaaagaagtcaaattcgagtttacacaagagtgtcatgatgcctttcagcagataaaacaagccttgatcagcgcacgaattgttcagccaccagattgggatttaccttttgaggtaatgtgtgatgcgagtgattttgcagatggaactattctaggacagaggaaggataagaagcttcatgccatctactatgcaagtagaactcttgatgatgctcaaaggaatta

SEQ ID NO: 21022 - DNA, 648 bp, Arabidopsis thaliana landsberg
tctattcattgacttgtgatgatctctcacagagaaaaagaaacagatttcaccaaacaaacaccaagtgacgcaaagaaaacgctgcaagcaatcaagcacattacagatggaaaattattaccaaaagggtcacttagaagaaagaacaagtcgagaggctgaagtaggatttggatcacttagaagcagtacttgatacccaggatttggatcacttagaagcagtacttgatacccaatcaacacacaatggcagctcctattaaaagattttcaatcacctgcctttatcaaatcaatgatatgtcatcaaacatagacaaatactaaaataatgtacaagaatcagatagaattagctcaaatgatgaaaccaatcaaatttgataaggatgaagtcgattagtatttagaaaagaccaatcggattcattaaaaacagaacctgcaaccaaaaatgccaacaacatcctttatattataaagcacaagtcacttgtccaataaaaatacaccacataaatttctattttataatttaatttttataaaaataattcaaaacaaaattgagatcgtacaaaacagaaaaaaggaattaaaaacaaaataattattgaccaaaaattatgggcttcgtaatgg

SEQ ID NO: 21023 - DNA, 637 bp, Arabidopsis thaliana landsberg
tgaattagcggaacccgctattgggcttgtggactaggtcaaatgacaggatccaacatccgggtaggttccatatcattttgtaaatttaatatccaaattaaaatttaaaaacaatgcgaaaacaaaaatcacctttgaaaaaaatatattaataacttgtatattaaatctactaaacgatgcgaaaacaagttgaatttgtgaaatcggctaacgatcaaatgactaggtcaaatgacaggattcaaaatccggtcagctttcatatcattttataaatttaatatccaaattaaatttgaaaaccgttagatgggaaaaaatcaaaattttaaaaccttataaaaaaaatattcataacttctatctcagtttgtaaatctaagtaatttaagggctaaaaaaaaaatagggctaagaattgacctttatggcgggctgaaattgatattgttgggctttgaagaattgcaccttagtcctgagcccaaacgacaccatctctaatcttacggcaaagcagtcctccaccaccggtatcggaaaccaaatccccagtctctccgtcgcgatctccgtcgctgattgtcacgaattacgattcacgaaaccgaattttttttttgaaataacc

SEQ ID NO: 21024 - DNA, 1340 bp, Arabidopsis thaliana landsberg
caaatatcttttagacgtggaaatcatgaaatcatatttccgcggaaaatgcggaatcatgtttttgacggacaaacaaaatacggaaacacatttttgacagagaaacaaaatacggaaaataaaagcaatcaatataaaacatagagcaaaatgcttggatgacattcgggttgaaagacagcaagaaacccttgtacatttttgatggaactcatcattataagttgtacccccttgtaaggccaaaccaccaccaccacgggtaatccaccccaaatgccaaggacattcctaatatctatgggatacatgcaaattcacatcatagctaaatggaaagaggaacatgtccttggagatttctccaaagagcgacaatatatgagaaaaccagtttataagggaaaagaaaaagctaccatgagatataccatatatagatcccatattaaaggtctgatcacggcgctagagaattcctattcatgcaatcagaatcaagcaaaaactcatatttaaaattatttggctacttttaaacaaatatcgtagaaaaaatgttttgttgtaagtactaaaattttcctatattactcaacttatatgtgaatattgcatatgttggaaaaaaaaagctaacatgagacgtaccataaatcacatatgaaaggcatgatcacgacactaaataattcctattcatgcaatcatgatcaagcaagaactcctatttaaatttatatagctatctataaataaatgtcaaaggctttttttttactataaatattaaaactgtattatattatttaacttatatatgaataatgcatatgtagattttgctaagttaatcaataaacatataagaaatttgattttcttatatgtagtcaaaatattaatgacatttctctaaattacctttattaatttttggtaaccttcttaaatttagtattcaaatctaaggaagtattttaatgtattttgatacttcttatctataaatgtgatattacgcgctctcatggtagcgagagaagttgaggaaagagagaaaattgtataataactgttgagataacatattttggtataccgatctttaggtacgagcttatggaaagtggcaacgttgtgaatacacaacctgaattatcaggcataagtaagaaattttgatttttttattttattgaaaacttgttttggttataatgttttgatttttgttcggcagttgatggatccaagagttatatgtacgagcagttatggaaactctgtgcgggacctttgtgtgatattccaaaactggagaaaaggtttattac

SEQ ID NO: 21025 - DNA, 470 bp, Arabidopsis thaliana landsberg
cttgtggggtcttctttgatgctaatgctgtgtatgttattgatttacaaactcagaaggttgtgtcaaagggaccacgtcgtgaagggctctatgtgttgaagaatttggggtttacagctttctattctaaccggcaagttgcagcaagtgatttggtttggcatcaacggctcggtcatgcaaacttccagattcttcaacttttacaaaacagcaaggcaattctagttaataagagcagcactacttccgtttgtgaaccttgccaaatgggaaagagcactaagcttccgttttcttcttctatttctagtgttaaggaaccattagatcgtttacattgtgatctatggggtccatctccggttgtatcggttcaaggtttcaaatattatgcagttattgtggatgatttctcttcgtattcatggatatttcctctcaagtccaagtcagatttttgtgat

SEQ ID NO: 21026 - DNA, 742 bp, Arabidopsis thaliana landsberg
taccattttatcccttacttccttgcattcacgtcagcttcataatagtatcttcatctaaatctttgtgtgtcttttcttttgcattcacctcgattctctaactgatttccatccctttgggacattgcaggttctatttctgatgtatcattattttgcggcagttgagttttacaatgcaatcagggtcttcatcgctggctatgtgtggatgaccggttttgggaacttctcttattactatatccgaaaggatttctcccttgcacgattcactcaggtcagatcaactattttcgatcaccatagtttgttcagtttaccatgtgatattcttttagagagcactatgtctttcaaagctcaagatttttatgaaagcttttacttaatccagatgatgtggcggcttaacttttttgtggcgttttgttgcattattctcaacaatgactatatgctgtactacatctgtccaatgcacactctattcacgctgatggtctatggagcccttggtatttacagtcagtataacgaaatagcatcagtgatggctctgaagattgcttcatgctttctcgtggttatccttatgtgggagattcctggagtttttgagattttctggagtcctctggcattcttactgggtcagtaacaaatttctctcatttttcataccatttttgtcatgtggctgatctgtagttctgtcttctacacaaatattttggat

SEQ ID NO: 21027 - DNA, 647 bp, Arabidopsis thaliana landsberg
gagataaattcataattgaacatatatgattagtaagttaatttaattacgaaaagaaaaatatctatgaatgaagcaattaacagtaatgattcttttaaaaaatatttatctatatcatggatacattaatacacctatgctttcaacacaaaaagtcattaatcatgaactcacaaattaggatcaattcaatagaataatcttcatctttctctcttcacgtcgacaatgacatacttacgcagttaaaaaaaacagaacagacaaaaacaaaaacaaaaacgaaaaagaaaaagaaaaagaaaaagactgcccaaaaaagaaagacatttgaattatttttgtcttaataatcatgctatagcttccatttaaaaatcccaaaacctcttataaatattctgcgaaacctaccaaactaagaacaccaagtaagacaaaaaagcatgcaatacaaaaaaagcaaataatagaaaacaaagagcaatggtttcctcagtttccctatttgcttctcttacaccatacttagtctcagcattacttctattccttctgctcgagcaactcttttaccgtgcccagcacgtacctccctagacctctctttgtctgtccgatcattggaaatgttgttagactta

SEQ ID NO: 21028 - DNA, 1232 bp, Arabidopsis thaliana landsberg
actatccttgcgtactagctcacttgtgtatcatggaccatcgcggcttgggagtgaagatcttcattaattgggacattgtttccacgctataccgaaacaaaaaaaatttccagatagttaacacggaaaacatggttaacaatactgcaaaaaaaactcaaaatttttaatgactcctaacctcggatttatcttcaggaccagaatatagaggggggacaacctcatctgtaacattgttagcgacctacaaaacaatttagcagaatgtttgttatacaccaaacacccacacaaaaataaaacaccacctttttgaagataatgtcattgttaacatctaagtaaactaataactaaattctaagttaacttaaacaaatacaaccatctacacctcgcccacctgtagattatccaccacgtcgccttcatatcgactatcttcatccattggaaattggaacaactttctcacgctataccgcaacaaaaaagaaaggggatcatgaagatattcaaccacccagcaaaaaacgtaactggttagaaaacaacatattacctccgcctctttgcaattgacaccacttgacaccttgttagtgtagaaagataaaatttcatccacacttgcctcgagattagaagttctttcacggcaatgagatcgagaattggggcggagagtattgaaagtaaattcatcattaccacaattgcaacccaaatcatcggaatttgaagcaccaacattactagccggggtaggctccctaggacgattaatcccacaatcaggatcctttgagtgttctccttcgataaaagtgtttttggcaaaccaatcagtcagcgtggatatcattgttttcccctgagtttcaagcttggcatccaacatacgggaaatagcgtccacagaaacagcccctgaacttccgccttcctcatggatgggtctgtgatgtttggtcctaaccccaccaaggttcttagacggtttggctgctttcctatttcaactaacattagacttagcaccacggttttgttttttagataccaattgcatctgggatggaaaacatccaccaccaaacatgtcattattaaaaattaaaccctcattagccaacattagaagattatcaaccctctcatcctcctcatcatcagaccaagacaaatcttccgccggatccgacacataattaggacaaatgatg

SEQ ID NO: 21029 - DNA, 1003 bp, Arabidopsis thaliana landsberg
gaacgatctatgttcatttcatgaaattgtcatgacattttaaaagaggatacacgactcagaagatttacatatactatatactatcttcattcttttaatagagccagcgaaatgagtcactttcaactgttcaattatatacaacagtaattttggtgaatattgaattgtaaagtgtatgtatacacaacacatgtatcgtatgtagtattgcagatgtagatgaagatatatatacattgaataataaagggaaagtagggaaaattcataaaccttcgtaagaggctatgtatgtgaatgtgagaggcaggccatatatgtggataatttagaaaatggacacaagagaagagactctgttccatgcatcgtaatatcttccatgcgttcctgttattacctttaaggggaccatttctctgaacaccttttctgtccatttatctacaccttacacgtgtctgaatcgaaatatctcagctttagcgttgtgttaacagcaagttcactagaagtcacagcgcgtgtgacctactctcactacaagaagataggctatttccgacggacgaaatcgtcggaataacatttgaaacaaacgtattcgacgaattttcgacgatattgattggtcgattctatctcgtcggaaatctgaatgtcgtcgcaaacgtgttacaaattatcgacgggtttccgacgaggtatttttcgataatttctctacgcttttctgacgataaaatttgcttcgaaaccggttggaaactagtcgaaaatgatcgtcggatcctcgtcggaaatagtttccgactattttctaacgaatatggttgtcaggcgttgcatcaaaacgttgttgaaaatcggtcggtatcttcttcgacggtttcccgatgacgttattcccgatggattcccgacgaagtatttccgacgggatacacttaaaatttttcatattttcaattagtatgacgaataaacgtgatttaaa

SEQ ID NO: 21030 - DNA, 1180 bp, Arabidopsis thaliana landsberg
  unsure (1)..(1180): unsure at all n locations
atttcctggaaacaacagtgcgactctttggttttttgcatcaaatgcattgggtggattatggctgtaatataatcggttcactactcaggctagattaatggatcaccacatggatatattacaccaacactgtggatacgacaaggagatccgcggccaccatatttattcatcctatgtggagaaagttttcgtcacctaaaaaatggaagagcgtcaagtggagatcttcggggagttcgcattggcaatggagcaccagcaataacccatttacaatttgcagatgattctctatttttctgccaagccaacgtacggaattgccaggctctaaaggatgtgtttgatgtttatgaatactattcgggacagaaaataaatgttcaaaaatcaatgataaccttcggatcgcgggtctatggttcaacacaatcaaggctaaaacaaattctggaaattccaaaccagggtggaggaggaaaatacttgggcttacctgagcaatttggtcgtaaaaagaaagaaatgttcgaatatataattgaccgagtaaaaaaacgaacgtcaacatggagtgcacgtttcctctcgccagcaggaaaagagattatgctaaagtcggtcgccctggcaatgcccgtctatgcgatgtcatgcttcaaattacctaaaggtatagtttcggagattgaatcattacttatgaatttttggtgggaaaaagcttcaaaccagcgtggaatcccatgggtagcgtggaagagactccaatactcaaaaaaagaaggcggcctgggctttcgagatctcgcaaaatttaatgatgctttacttgccaagcaagcatggcgtctcatacaatatccaaactccctgtttgcacgtgtcatgaaaacccggtatttcaaagatgtttcaattcttgatgctaaggtaagaaaacaacaatcttatggatgggcatcgcttttagatggcattgcactnttaaaaaaaggaacaagacatttgattggtgatggacagaatattcgtatcggattggataatattgtggactctcatcctcctagnaccgttaatacagaagaaacatataggagatgacaattattacttgttcgaacgtaaaggctcctactactcctgggatgattctaaaatttctcaattt

SEQ ID NO: 21031 - DNA, 1072 bp, Arabidopsis thaliana landsberg
atgattcgctctgataactacttccacttttttattttatgccatggaattgcccacgggatggggggatcttaaaaaaccatagacaaacgtcaaagcttagcaattagcaaaaaggatcgttaagagaagaattgcttgatgggcaatgtaaaagcaagactacggtatactgctgcatcagcaatctctggatgagcaagcaacaatgcctctagttcagctggagcaacctaacaaacatttcaccattaccaaaacccccaactttactcagatcatccatgcattaagaaagatcaactaacgttgattggttacattttatttatttacctgataaccattgcatttgatgagctcctttaatctatcaacaacaaagacaaacccatcaccgtcaatgtaacacaaatctccagttttcaaccatccttctgaatcaatggtagaagcagtagcttctttattcttgaaataacctataaacaactcaacaagtttgagacaacaccaataacaaaaaaaaacaaacatatttcacaggcatatgaactaaagatcaagaatcaaacacctttcatcacagtaggacttcgaatccacagctcacccgtttgattcacacccaaaacccgacccgtatccggatccacaatcttaccttccacattcggagccagtaagccagaagctccatacctcttagtctcctctttattaaacatagaagcagctatagccgttgactcagtcaaaccatacccttgtaggatcttaaccttgggataattctcaacgaacttctccgtcacctctctactcaacggagctcctccagccaccacagtgtgcaacgagctcagatcatacttggaattaatctcatttgctccgttaaccatagctactacaatcggcggtacaagagaaaggtacgaagaacgatgagtctccaccgccgagagaagcttagccatgtcgaatttaggaagaacaacgattgtccatcctaacgcgattagccccggcgcgaaaaccaccgaatccgaagatgtgacacattgggatt

SEQ ID NO: 21032 - DNA, 328 bp, Arabidopsis thaliana landsberg
tcccactatcgtcttaaggtagtcgcgaagagctggtttaaaatgtcgaaaatatgaaaataattgggaaaaatgtcaaaaaatgcgccaattttcaaatttgggacgaaaaaagcatgcactctcgaaatgccatttaactcttacagtttgggttgacttcttaaaaaaatgtctaagttctgttgacctgtccatttacagcgtgccgtgatatctccgttaacggaaaaataacggaactacttttccgcttacagctcaaactgacgtcgttttaaaaatgaaaaataaataaaaaactggcggcagcctggcctagaaccct

SEQ ID NO: 21033 - DNA, 563 bp, Arabidopsis thaliana landsberg
aaacccaatcccgtgaacctaccctattagttttgttaaaaacaaaagtccatggatcccattgaaacccaagtgaagcaaattataaaataaaagggtttacacatgtgtatgtatatttatctccttcttgtcaccacttgagccaccatcacgaccagaaaccctaatctaagagcagccacgccatagttatccagagaagagaagagaagtcacaaacttaaggtggaggagatttgtgaagaaaggataggatcgaggagaaggagaagcgacagaagagaagggatcatcaccaccgtgaaggaaaaacattgggagagggagatttagttcaaaacagtaagggggattcaagctgaagaagatcaaagcctccaaggctagggcaaagcaaaacagaatcaaagaaggaagaagatgaaggaaaaagtgcagcttcaagttggggttttgcgaggctgatccccgtcgtacgagaaaactttagatggtgaataagacgtctttggaaaggtcacagttccatgaatccactgcaacacacagagtttgaatcg

SEQ ID NO: 21034 - DNA, 657 bp, Arabidopsis thaliana landsberg
gaaactatcaataaaatcttgtttgtggggggatacgaaaattaactctttacatttattatcttaaataaccttctaaatcatgtgaccctcatatgtgcataaaaacaaaccaatctgatagggacaattatattccaacaatctacatatcaatttttcacagtttcaatcttttcgcaatctagtttttttcttaccaatagtctcttcgaatccgagatcgatcatgtcaccaccctccatagaacaactacacacttttcatgccaaagacagaaaaatattctcaaaacttgtcctaaaattctcaaaaaccccagctgaatcacttcttatcatggctacatggatttggcttgaagacttttttttccaaaacatcttatcaaccatattggctttaagcgatccagtcattatggctttagctaacgaggctgtcttgtgcttccaatgcctcgattctgctgagcagccaaatgacttcaatcagatccctctcactgcagaactcttgacaaaagacatatctcttcaaatatttcacaaacaccgatacagtgctattgcaggaatcagaaactttttaaccactgtttgttctagaatattttctgatattcttcaacgagctctttcaccttcttcatcata

SEQ ID NO: 21035 - DNA, 877 bp, Arabidopsis thaliana landsberg
tatcattatatcatcattcaataattttcaaataaatataagaaataagattacctattaaaattttatttttaaacaattattcaaaagctttgatgatttcagagaaaatgatattttccataatttgaaccattaatcagacaaacaactacaatgatcaatttgatccctcactatcttgttttggtcttagatgtcacagtgttcagaaatttatttacaagttgtttatatggatttaaaacgcaccgtttatctattttcatgtaatgatgggccgatattaaacgatagcttccattcttcgccaagatgtcattgttttgttacatttgggtaccttggtttcaaagtcatacgggtctctttagcgattaatctagtattgaatgagtctaaaagtcgagggaatggagagtttcggtcggagcagcctgtgcgtcatagcatcaaggacgtttcatctaccgtcaagtggctgtctttttccctctcttagcttaactcatctcaaccgcaagctatctctttccgccacctcgttttcctccaagattcagtctcctctgtgtaactttcatgctctctctctctctctctctcgctctctctatgctatttgacttgtaatttttccgagttggtgtaggcgagtcagataagggaaatcccctgtcgcgaggggcgggagaaggagtcaaggaagatgcgaggagtaagctgcttcaagtagttttggtctctcctcaggtttgcactctcactgctacatatctgaaccgcttcaggttctatttgctttggtcttcttaatacatcttggcccagatcatgatctaaacttatactctccttgacagattcctggaatcag

SEQ ID NO: 21036 - DNA, 1135 bp, Arabidopsis thaliana landsberg
ttcttggaactcttaacatcagactcaatctcaccaatactttccctcatgttctccactgtttgtttcatgagaccaaactcttgcggcgggtaaacacaagctccaagctcatcaatctgtacaccaattccttgacacaacttcagtaacttctcaaacgaatccacaaactcactattatcctttggattctccagcttgatcatgcatgtgatagcacggataagctcttttataacaacgagcgtctcagacacaatatctgctaccattttagcaacttcaaattcttcaggagacagttcatcgcctaaatcatcgtcatccgagtttgtcgaaacattatgatcaggtgaagaagaagcaggcttcagttctttcatctccctaagcacatccttcatagaaacagctacatgtgccatcgctcttccaatcgctttgatgtttgtttcaggcacgttctttaaattagaacatgcttcccacactgctcctgcaagctgcggaatcgtgggcttccttcctttctcatatgatccctctgtttccaaataacagaaccaccagaaaaattcatatacacagttgaagtaatcttcttaaatcaataagcagaagaacatagagtcttcttattaccgtataaggaaacagaaccctgcaacaatctgaagctggaatcaacaatttgcttcacagaagcgtgtatggtcgaagagagtgtagtcccagcaccaaccatgcttccatgacaatgcagcaaaaatccttgaagagcgttgaagtatgcttccatagtctccttcattgcttcagcttttggaggttctccagtgatccatagcattcccactattggaattaagccacaaaacaacaaaacaattgaagaatttgtttttctttaacaacaagacagaaactggcaaaagaaaaacctatagtagcttgtttggagagatgatcagaaatctgaaggacatcgttccaatataaatttgtcttgtgtcggaaacggaacttgctcgaacaactgcaaaaattcaccaaaccctgtctttaaatcagtaatcaaatccatcaccaacacacaaaaacacgatttggtgaaataaaatacctggagagt

SEQ ID NO: 21037 - DNA, 510 bp, Arabidopsis thaliana landsberg
caacataggtgactgtcaatgctatgacagcaaggcatgtttctccaaccgtaatctgacactgacatatatctgtttcttgatgtgcgtgctgcgagatacgtgtataagtaatcagggttgtgcatgcatcgatacgaggcttataacggctcccaccgaattatctccttccccttgcatgctttcaggtgagctgaattctgatatcgacggatagtggacgtttacgaacatccacccattatcttcattactttaagagatctctcttatcacctaatttgattctgaggcaaccatctagtccatgattataggaatcaaattaatgttttattaccttcttcctcattggaagattgtctaacctacaactgtgatgattgttatcatcatttactgcataagcaaagtgctgcatgctgctgactcctcttggaagctgatagaaatagccatttgatcatgtcttgctggcttacatgactggcatgcgctgggccattc

SEQ ID NO: 21038 - DNA, 543 bp, Arabidopsis thaliana landsberg
gggtttttgcttattttttattcttttatagttacaaaattataaaataaatttatcgattaataaacttagagattataccaatgtggtggttggaaaaaagcttgtgtatatggttccatccaagcaaagtgtgcctgcgtgtaaagcttatttaggagacctaatacattcatgtttagtagtaatatgaattttatttgtgtattattttataattataaaatagtcttaccatctagaattgttggattaacagatgtgactaaaacaatagatgttagagacattggatcagctaggatggttcgaaggcgagaagcagttttagcccaaagagataagaagacaatcacattgatgtagaatgtttgaagtaatttgtttaattatgaatgaagataattgaaatgttagggaaataaatcttagactatcaaaacagaaacttacggtaagccataatttgacaatgctttgatttgttgaagtagggtcactaaggtttgagctttcgattgaaagaatttttccaacgacatt

SEQ ID NO: 21039 - DNA, 516 bp, Arabidopsis thaliana landsberg
acttgcagatgccccttttaggcattctataccctcatctccagttatgttctcagctatatcatccacatttgcagccatgtacttaactaattcaccttcgcatcttgtctcctctgcacagactctaatgtacgtacattggtacaaaccatgttgacacgtcggggatggagcagaggttggtgtactgtcaaccaaaacagcagtgggttctacatgatgtacatgtttacctgtcgacgtacacaatgccaatagacgagtgaattcccctggggttccacggtttgttgagtgtcattcacgacgtcctcctcaacatgaccaattccatagtcttccacaatcagatcaccctatttattgtaatcgtaatcttcgccactaccttcactaccgtcgattgtagggtcgagggtacttccatatattcgccaaacatttgatctgcatccacatcctcctcttcattatcctcatcctcatcaccttcatctcttccatcctcatata

SEQ ID NO: 21040 - DNA, 2579 bp, Arabidopsis thaliana landsberg
agaagtgactaatataacatcaattactttagatgtatagttggaatatctggagacactttgtctttccaagatcttttattccaattaactctttaagagttttgatgatcaaaatcattatgtttataaattccagggaatataattataatatatatctttcaaggattagttctttagacatcccatgaggcgtagttaagttatttatatagcatcaattcaatatcgagtgattttgacaaatcccggcgcgacacaccgttttgtattaagtatcataacactctttttgatgtttggaccatatgtccagaaattactcgtttcttatacgagattaatatagacttgcctctctttatttattggccaatatatctctttacgctcacagagcggagattcatgatcctcattaattacattacacgctagatcattataaatgattttatttaggtacctgattttgttattaaccatgtcaatcggtctctttactcttcttcaggagtctctttactcttctttaagagtctatatgctcctcttttaagagtttaatcctctatataacaatttgctcttttttcttttcgagggttttctttatatttgaaaccaaaaatgtttatcacgttctttaacgtgttatagacaataatatgtcatctgccagagacatattttttttttggagcatttttagctgggatatgagtttttctatgaactctctaagttcatatttatttgtatgaggatcaataattttataaaatctcattcatcagctgtttgcatttgatttgcaatatactctgaatagtgatcattttgaatttttgaactcttaagttcatatttatttgttcaaagatccaaactattcaataaatcttccatagtgatggagaatttttatcatcaacattatgatttgcaaatcttgcaattggcacatctctaaaagatggctcaatattaatagagtgaagatttatctccaacatctctaaatttcatcctctttggatgatatttttatgtggtgcagaagagcatttataatatatatctcacacccataaaatttaaaatgataaatatttgatctctaatcatgtataaataacatgagagaaatatttcttatgaatcgttggccttatatagaatcatcatgttccatataaaaacatggagattaaatcatcataaattgttttgcaatcacttggatttgcattatgaacgatttattaaagctcaatttgagagtaaacatcatttttagatgttccactttatgttaaagtgataacttttaggatatgacttcaccagagttatctcgctctagggcgtcaaattcaccaaagtttatcgacttattatcgatgtgggattcctttaattctccccctcgagataataactcttaaagtttattcatctcgaaatgaatctcactttaggatcaataacatgtatgaacgggatcatatatttaaatttggatcctcttaaaaatgtgggacttgtaattattcctcccaagattatggcttttcaagcctatttctcttggaccggatctaattttagatcggttatattttagatttaatttggagaatatttaggaaatcgaccatcatatactatgagcttattaaaaaaatggtgatttggccaaaaatcatatgattctggaggcatagcctaccacaaaatgaaggagaaggtatacaaccatcgaatccataatatataaataaatttaccatatattaaattttaccatctttatttttgtatgatataatcatacatgtgtgtgtctccattgtggtcaaacatttgacaccatattaatttatagtctcaatataataataataaatatctttaaaactgtacgagtttccttggagtactttggaaaacacaaaacatcgattattatgaatctgatgcatttggaagtcgagagactagctcatctagatcttctcattatttgtgcactttctaaacatacatcgacaagtgcttcatatattctcataagaaaactatatttttaattttaaaaatactttaatgtttttaaatattatgtaacacatattaattttttacgaataaaaccaatataaataattaagcatatatgttcaataacaatttgtagaatagatgaatgaatggcaatgctctctgagggcgatattctgggcgacttcgtacccgttcttcatcaattgatttctccacgatggagtgcttttccgacgatcggaatccgtttttttctatggaatttcgatggtggttactctctgcctaacagttataatggcagttttcattctccttccaattcggaaagtaactaccctcataaaccgccatggttccaactctataaatcctccaattcgatttccctcctttcactttctaatttcaattccccccgttctttaccaccacaaaacatgactatagactgcgtaaatccgttcaagacctgaatttgggaattgatgacgaaccggtggctctta

SEQ ID NO: 21041 - DNA, 649 bp, Arabidopsis thaliana landsberg
  unsure (1)..(649): unsure at all n locations
tcattggcaacttgattagcacatgatctccagggttcttatgttgttgccctaagcctttaccccatataattcacagtccttagtgccaaggtgtgctctaaccatggtaacacctggggtgttacagccctccccccttaaaggaatctcgtcccgagattttaggtagagtcccttggagggtgcttgaaggtgtgctggtgttgttcttcctttatacttaagtttctcttattaactgctcttcgaatgtcatcctctttgcaacttcagaaggaagcccttcttaagttaaatccacaacttagactatccttgttatctaagtttttcttataattgaattcaaagggcaggtgggggtggggttttggggttacgtaccgactcctttgggcagaaagtcggggaagcgagacgtnagaaaatcctcagtctctcatgtagcttcttctgctgaatggtgactcactgaactttatacattctgactgaccttgcccgagttgatctttccttttgatctaataccttgacggggtgctcttggtaggacaaatctggttctacacaaggtcaggttccggtagtacttcagtgggtagacgacacatttccgaagctgagatcatggacacattatgac

SEQ ID NO: 21042 - DNA, 747 bp, Arabidopsis thaliana landsberg
  unsure (1)..(747): unsure at all n locations
agattcgctgaagctgacgtgttctgctccaccacgtttggttccatcttgaaaccattacaaactaacggtgttgcgacaccaaatggagcaacgccgtttactcttataccatattttcctaatccaccagaagccgatttgatcaaacccaacagcccatgcttcgacgtcgtgtacctatattattagtaagcaattcattctattttgaattttaacgataaaaaattattgtcaataaatcgtgacaacatgatcactttgttattcttttaattataatactccgttgcagcgatccactatttattattacatggttttgaaaacgaaattagttagtgcacttttggtttgtctaaagaattaaaaagtctttgttgtgaatattagtttttacccgtgtggtgccgtgccagcgatctcagccgcgacgctagtggtgcaaacgatggagccgcgggtgcctttctccaccatggcacgtgcagcatgcttgatgaatgcggctgtccggancggttaatggcgatcgttcggtctaactcgttgaggtttaagtcgaggatgctcacaaacggctctattacgccggcgttactaaacagaacgtcaagcttcccatatttttcgacggtgaacttaacggcgttttcacttccgtctcgttcgtgacatcgcaatgatagtaactcgctttgtcttcacgatcgaactgcaacgttttgaccgactcacctgtac

SEQ ID NO: 21043 - DNA, 430 bp, Arabidopsis thaliana landsberg
gtcactgacacgcgggactgagcaggagtgggtcccagtgcagtgacacaactgcacaaatgcacaaattcagaggacccgcgtcccatccttactccttcctagatcccatatttccattacataagactgtctccagcagaacaggcaactgtaaatgacactatttagagagaaatttgaaatatagaatgagataagagatttgttagagataggcagatagcctaagctccctgctagggatgacaatttaatccgtggatttggatatccggcggatatccgacccgacggattaggatatggatatgttttttgacccgcgggttagacccgtatccgatccgagataaagtgggcatggatttggatattaaatctcacccgcggataatccgttggatatccgaaattaaccattagttca

SEQ ID NO: 21044 - DNA, 945 bp, Arabidopsis thaliana landsberg
tgctacgtttagcagtgaggacacgtgtcatccgaagatcatcctggtatctggaatctcaagtcggcaagttgtgtccttgatcacttctttttacccagccatgttctgattaatcataatgatctgcataggttaattttgatgggacccaataggttaccctagtttgtctatctttataccttgtttaccactgaactttttgggtagtactttctagtgctttatgtggttttgggtatgaagatacattattcatgatcacacttttattatctgtttatcatcactgttcatgataagatcattatgttaattggaacatggagcgaccacccgggaaaacagtgctaccacaagggtataatgggacgcccttggctgattaattaggaaagctagtggaggactaccttacccgaaaggggctagggcagtaggggagtggtcagtgtagggaggtcctcaggaggattttgctgcgatggcggtcagacaagggattcctgcattggagcttcctataaactgtagcgggttttcggaagctagtggaactttgtaaaggcctcgtagtgttgccctgccgcgcttcctaggtagaggtgtatgggattcgcgaccccttggcagatgggtagcatgacttgtgggtaaagggtacaacctctgcagagtgtaaaactggtatactagccgagctcacggtcatgagcggctcaggactctctgatgattaaattatggaacttaaattcaattttgtcatttgcatatgcatggggtttattattaaatttgttctattatttattaaggtttggtatttacttacatctagtaattgctaataaaagtttgaccaacattaaaagcaatgctcagctttaaccattctctttgataagccttacactccatgagctcccacctttggtgagt

SEQ ID NO: 21045 - DNA, 576 bp, Arabidopsis thaliana landsberg
tctgatactcgccactctgtgaaatgctgtaccttgtggaaaatcggaattatgaattgtttgttgatccttcaattttcatggatcgattctcaaacagtaagtatgtcatgttttggctaccattcgtttttgtatttggttgatgcagaacatcagccaagaaacaaacagttatattgaatacttaacccagcctacttgtttcatcatactcttgcaggcttattgaaaggaaaaaataataaagatgttgtggcaacagctagagacattatagctagtatgaagagagattggatacaggtgtgactttgttatgttagtgtatcgtttcctatgtacgctttgccttagagttaattaaattatgagttatgttagtattagctacgtattggcttgcagaccggccggaagcctagtggaatatgtggagcagcactttacacagctgctctttctcatggtatcaagtgctctaagacagatattgtaagatatgattggctataaagaaatattgttttagatgagaggaaaagtgttttagcctttaattcactaatttagtac

SEQ ID NO: 21046 - DNA, 982 bp, Arabidopsis thaliana landsberg
  unsure (1)..(982): unsure at all n locations
gatggcagatttgttttctaaaatataatattttatgttatgatagagctattttattttgtgacagataaatttatattaccataaatctgtcatttgatggcaggttcaataaagaagaaaataaattgttggaatgaccttaaagatatttgatgttacgacagatttgtaatttgaaatccttatagtgaccgatttatagtttcctttttccatgattttttgtaatagaataatactaacaattgtaacagtttttttatttggaaaatcatattatgacaaatttgattttttttgtcaatttggttttagaaattcttttaaataccactaaaataagttttttcaaaaaaaaaaactattatgaattttatttttcaaaaataccacaaatctaaaactaaattttaatattcaaaacgaatttctaaatcctaacactaaaccccacacctaaaaactataccgtaaatatagatagtcaatccaaatatataaaaaaatttacaacttcaaaaatcattttttttttatgtttatggtattttaggaataaacttttgtggtttttttggaaaaaaaaaacaaattgttgtattttcgaaaaacaaaaattgaaaatgtggtatatgagagaatttctcgtttttatctttatatttttgaagaaaatattcttttaagaaatatattaagtaatttattttgttggtaacggcagatttaatatatgtgtgacagttttttatgatacttgtcatattggtcgtcaaaaccattaaataaatagagtattaagcaatggttttttggacttttaacataaaatttatgtcaatctagtaatgagtaaaatagagtgttaaactagttatttttagcttaatttgggtttaaatgggggtaaaattttagtnaattcctattatatattatataatattaatattataattataattattatattaataat

SEQ ID NO: 21047 - DNA, 886 bp, Arabidopsis thaliana landsberg
tctgagtacggtgtagatatgttaaaggcttggattcaatcaggtccagatggaaaagccgctgtttttttaagtgaaactctttcttctgttcgaatagataagtccccttttttattcatatggctgaagaatcgtttagttatcacatgttttacaccaaatgcctcaccgcaaaaaatccgtacgccctatatcttcagagtttagtgctggcatttcatatgtttgagctccaggagtcaattgctatattggaaggcataaaggacgttatcccacatgctggtctactttacatcatgctccatagttgcgctagattaattctgtgggaattttatatttagtacaagcgaaggtactacaaatttagtaaagtcgacttatttgcagataaactaatgttccatatcaacgaggttggtccacgtcgccaatggacatacaaaaactcctgggagttcaaggactatggtgagtgttggttggaccatcagaacctcaatgagtacgagggacagtggtgtaccacatgtatttactattacctgtcccaggaaattgcacacatttcataagtaatactttcagaagtaccaatttcatttatgttcatcttatcgttcttctcgattgcagaaaaaatatttgaatctaagtttttattcttgattttatgtattagtttgttttgcatatttgtccaactttatttatatattgttcgagtcttcaagtataaggtgtaacaattattatacaaatgattagagttgtttcagaactatgacttgcatttttgtatatgaatttgctttaatggaattcaagtggtagcttttatatttcgagttaatataaaactgaacctgtactcctcact

SEQ ID NO: 21048 - DNA, 1058 bp, Arabidopsis thaliana landsberg
  unsure (1)..(1058): unsure at all n locations
tccaaaaaattaacatataatttttgtaattaaaatggaaaactaaaaataagatggagtgtatataattaaattatatttttatcatagtaaaacaaatatttaaattatatggcaaaatcgaatttgtaagattgaaatttcgtttaaggaaatacaaaattaaatactaaaaaagtatgtgagttattattttaaattcaaatatcattaataagatgaaatgtataaggactcgatagtccaatttactcatgtgtatagaaaggctaatcgtttagcttatggattaccaaattatgtgtttttgttattgcttagtctacatatatttgatgtttgtcgaaatgtctgagtgtagttattatgttatgaataaatcgtaggcgcttttgccctctacatattactaaaaaaatggaatgtatagaactaaatgacaatttattacgatgaaatagataatacaaacttacgatgtatagtaaaattaaatgtgtattattaaaattttatttgatacaaaaattaaaattaaatattagaaaaatatataatcatatttactattcaaatttaaatattattgataaacatttaaataatggatattttacattcgaatttcttagacggactttatctagtatataaatattgttaataacttacatcattttattttttaattttggtaaaataataatatatcctgttttcattaattaattttgactaaggtctctttaattatagagttgcccaaagaattattctcagatttgtccatctccgagcatctggcttctctgtcgcatcttctcttccctttcccccaccgacaattctattcatctccgatcaaaaactattcctttctgannnnnnnnnnnnnnnnnnnnnnnnnnnnnnnnnnnnnactctctaatctcttcgccgattctccaagccaatctgcttctcctcgttattccaactccgattctccaaaggtatgatattttcttatcagaaaccctaattgttgttttccttagatgggtctggatctgaatctc

SEQ ID NO: 21049 - DNA, 438 bp, Arabidopsis thaliana landsberg
cctgacgtaggatcatatagaggtatcacgatccctcccttattgcatcacacacacacaaacacttacaaacaaacaaaacacaaacggtcatgatcaaatcgcgcttaatcagacagagtcaattccgtaaaagaagaggtcatcaaacttggtcattggttggagctttaccaccatgcatcacaagtcctttcttaccatcaatggttccagtcgtggacgcggtccatcctctgctactcggagtcccctcaaacttatctaacctctcccattgcaacgtctctgtatccaacgcgaaagtcccatcgattaattgacccggacctacgtgagctcgaggatccatcgcaatctcacctccaaatatcacaatgtgtttcccaatagccgcactagcgaaaacactcctttcgttaggcttcacaccgaatg

SEQ ID NO: 21050 - DNA, 930 bp, Arabidopsis thaliana landsberg
  unsure (1)..(930): unsure at all n locations
acacgaagaagacataacggcgaagaacatagagaagtcaangtgtttgtgtctttaaaaaccctcgatacagaagtttatataaaactcacaagtaaaccctactatgttgaagatcttttggcttgacctaaaaactttatggcttttattgtatagtcttatgggctttctctaatagggggttattgaaggtatgattttaattgaatatgaaagaatttagaattctatttaaatctagtgttattcaattgattggttttagaattctattaaattctactgttattcaatttgttgattttagaattcttttaaattttactgttattcaacattaagattgttttaatggcaatgtgatttgattagaatttaaaagaaatgaaagacaaaaacgtgaagaaacaaatcccacctattatggtttggatagaatttttcaaatacattaaaatcttttattttcctattcattttaattcttttgaattcaattatctaataccccctcctaaatgtttcggtttcactgtgttttttctttcctttttctttcttcagaaacgcaacttcatttataagctaagaccatccttaagaccatccttaatggtgggttcttagtaaaattcttaacatttttgatgtacaaaataataattaaatattaaaggggttttaataggaagagagaatgtatcaaaaatctcttagttaagagccaatttaatatttttaagaacccttttctattttttattcatattttattttatataatatcttaagagtttttaaaaaactttttaaagaacctaattaatgatgcctctaaatggtaggtcttaattaagcttaagggtttcttgaaaccctttttttttaaatgaaaataaaaattttggttgaaaaatttttttggtt

SEQ ID NO: 21051 - DNA, 1156 bp, Arabidopsis thaliana landsberg
  unsure (1)..(1156): unsure at all n locations
caggtcgactctagaggatcccccttgacgggcccctggtgataggggcacggctccttgagcatcttgtcgaagagattggcacatccggggggtttccgagggttcttgtactcggcggcggcgacaaggtccgcgtcggcgcatcgcgtttcgcttgcgacttcttcttgcccttctcccttggcgccgcgctgagttgacgcctcgggggcatcttccggtgggtggccctggggctgcttgtccttccggtagatagcctcgaccgcctcctggccaaaggcgaacttggtggcgatgtccatcagcttgctcgccctggtgggggtcttgcgacacaacttactcaccaggtcgcggtaggtggtgccggcaaggaacgcgccgatgacatccgagtcggtgatgttgggcagctcagtgcgctgcttcgagaatcgccggatgtagtcccggagagactctcccggctgttgccgacagcttcggaggtcccaggaattcccggggcgcacgtacgtgcgctggaaattgccggcgaaactntggaccaaatcatcccagctggagatctgccccggaggcaggtgctccaaccaggcgcgacgggtgtcggagaggaacagggggaggttgcggatgatgaggttgtcatcgtccgttccacccagttggcaggccagacggtagtccgcgagccacagttccggtctcgtctctgtggcggaactgcccgaattattccaacttaagtgcccagatcccgccttagaggctagaccacacttaaatgggataacccgtcaatccctcggatctagtccgacacggccacggacaggatcaagtaccacaagctcactcgaaggtgagtcacagagtaaatacaataaagcataaaaccatacatgccacaatgttaaattattacatcaccatcatcatcatcggagttttgcaaaagtaaccatcattgttcgaagtgcagcggaataaaactaacggtaaataaaacagagggatggggaagcctgtcccatcactcctcatgctcctcctcggccgaggcagggtcccactcaacagtccaacccggtggcaaggtggacggccaagttatcccagcaaccatctcctccagagaacctgtaaa

SEQ ID NO: 21052 - DNA, 1297 bp, Arabidopsis thaliana landsberg
cactgacaatgaacagagacgatcaatttagttgcattactaaatacgaaacttgagattacagaaaatgaaactgtatattgattgatacagaaacgaagaaacccacctgggaagaagaagattcggacgaggaagatgatgcagagttgtagaactaaacatctatagtgacaacaattgacttaacccaatttggctttagattgaagaaactcttgtgggttttcaaataaaatagtgaagaattcgataattatcatttgctccctgtctttatattaaagtagttagtgagccttcattttatttattggaactttagaaccaaaaataggtcattagtaggttcatttactttccaacaaataaaaatccaatcgaaatcaacgtcaaagtccaaaacccaaaattttcaaaaattcccaaagcacctatatatataactatataagttagtatgagtttctaaatcatttactgtcagatatttagtctataaatggttgtgtaccagactaaaatctaattaatcgatatttaactaattcaccattacggaccaatatacactattgcgaattaaaaatttccatactaacacttacttgagcataaaactttataagatgagaaattatagatatattccccaaaaagcttcacaccaatattaatataacaaggggattgacgtaaatgacactaaaaaactttattattccaaaaaatgacaccttctttttgaaattttcaaaaatagcatataaaatttttaatcctctataaattaattaaataataaagtttttttttattaccatttgtatcaatcctccaaataaaagtgagagcaaacactaatctaatattaaattgaatcaaaaaacttttaaatagtggaaatatataccctaaattggaaataaagaacccaaatataatactacaaactaattttaaaatgaaaaatctcctttaaatgatgaaaatatataccctaaattggaaagaggaaatccaaatataataccataaactaatattaaaatgaatcaaatttcttttaaatagttgaaatatatgccctaaattggaaataaagaacccaaatataatattttaaatttatttctaatttattttggttgaatagatttatataaaattatggtattattattgtccatcaaacttgttttagtgttacttttaggaattactcaaataattatttgagtactatttatgtctaaaaaactttttaatgctatttatatgcaaaaaacttaaaagt

SEQ ID NO: 21053 - DNA, 648 bp, Arabidopsis thaliana landsberg
aatgatgttgttcctactttggtaatggttgcctcagaggtggtgggtgttgaaaacagggtagttaaggtaagtttttctctaagttacagattttctttccattgtttcattgggcgcaggctttaaatcatgaatcttgctctagtgctttctactgaaatcatgctttattcttcatttagttttcaggtgtctgggcaaaacctgagagtggaaatttctcgcggtgcattgacagttcaaggagtcgcaaaagtatgtgcttggcaaaataagtagcaatttgtttgtttttttgtttctttttctatttgtagttcttgttctcttctataagttcttaccgtatgagtatatattgtctgcagagttgggtgctaatacgaatggctatcttctcataaatgctaatggaggactaaaccaaatgagatttggggtcaggcttttgtgttttttcaatgcttctcaagttattgtctgtttataagttctaggctgatgcgtttaactattttagaatgcagatatgtgatatggttgcagtggctaaaattatgaaggcaactttggttcttccctcacttgatcacagctcatattgggcagatgacaggttagtttcctaactttattattctcaca

SEQ ID NO: 21054 - DNA, 999 bp, Arabidopsis thaliana landsberg
tatcacccgcctgactttgatatcaaagcgggtaaaaagaatatcagtttacacactactcgaggattcgaagtgggctctcgccaagcggatcaagaacatatctatggataaaagagatattagatactcgaacgtggttgcgtacgatgacaagtgtcttgtgctgagggaatttaaagacattaagcttggcagtgtggttcatgtgtacgacatggaaactaacacttggagagttttaggggccatatgtcagcacgctaccgtccaaaaattgtataagattacaccctctttgttctttgtcgaagaggatgatgagaagcacaaggtcgttgtagcatctaatgaccaacacatctatctaaacgcggttttgggtgtcattgattcaaccaagtaaactatctcatgtctgatttataagagtgtttgtttcctatatgcttttctgatggtattctcatgtttatgtgtataaatcagtaattagggagttttaccgtaatatcttcatctcacaacctaaatcatgttcccttgttgggagtgtcttacagttatgaattgtaatgaactttgattgaattgaaacctttaactttaatccatagttattttatttttgtcgtgagatagatccaaacactcataattcacaaaaaggttctaaccaaattttggaaaaaagttaatcatgattcatgagtcttattacatcacagcagaaaacatctcatgataaaagttcgttttgcagaaattacgaaaagttttaacatatgattgtttttcttcctaaaactatataagccttcttgattaaaatttctctttggaaaagtcctaaacaaaaccggcatcagtagctatcagagtagtagacagttgaattatctcataaagaggacgacattattttagttgagaagagatataatgattttggaagtaacttctaattgagcatctcgatcatctccatcttcagtagag

SEQ ID NO: 21055 - DNA, 1797 bp, Arabidopsis thaliana landsberg
  unsure (1)..(1797): unsure at all n locations
gtgctctcagctaatactagagtcagcagattcaagctgtcctggagaagtcaaatataagctcaaatctgggtgcctcttgcatttgtacatttctcaattgccatgtaatttaccttcaatttgcctcattacgtttctttatctgtttcaagaatatacttggcattgacgtgtttgtcatatgtaggtggttatgcttctacaagttcacccttgtatgccctgaaaaagattccatcaacacaagtagatgactcattgttagttcaagcttctgatatttgctcgtctcggcattctgatgttccagagataggtagtaatagcaacaaaggtaatgctgcaagagttttctctcagcttgccttcctcttatttagaagctgggagatagcggattaggctcatgttggtatcaatttactttggatgtctctgtttcaggtaatggctcacaagtagcagatatggtgcaaagaaagcctggtcgcggtgaaacaacactctctgttagctgttcggataagatagctcgatggaatgttcttggagttcaaggtttctgtaccctgaattttgacagataatttgttgtgtaatttaagatttgcttattgggattttctctctttgtgtgttcttacttcaggggcattgctttaccaagtcctccagcctgtgtatatttctaccatcaccgttggacaatctctgcacagtcctgacaatttttctttagctgatcacttgcgaagatctttgtatgagaggatcctcccattatcggatgaacttctgacttccttccgtttgaacaaggttcactagctgctttataccaatgtatcatggaaattgcagtagttactagcatatatcgtgctaattcctttccagccactgttttttgtagctccagtaccaccatcagagtttcagcattcagaaactgcgcaagctactttaacatgcgggttagttttcaatactcttcctcacatgacatgtgtgtcctttctttgtttcttaaaaggtggtgtgatctatttgttggctcttagatattccttgtgttggaactattctggcttacacgaagttattcttggaacaaccggtagaaagcaaggcacatcagctaaaggagctctgtatccgtctactcaatcatctatatgcaagtaaggggatgagccttgttatccaagcatgaccttcattatttgtagttgatatcatattcatatatttttctagacagcggttactggagctattcttgaaagaaactcatggacacaaaagggaatcttccaagtcaaaaaaatcgtaccgagaactgaaggtgtgtgcgatgctgattcttttctgcagctttaacatgcttccactggaacaactaacatgctaaagtgtataaatctcatagtgagtttttgacatgtatgctgtaagattgtgattttgtgatattgctctctggttaattctgagatgatttacgtttcttttttgttttaattgtatgcagaacaaagctacggaatattatttgatgtcaaagatttttaaaggaaagtatccattcaacaattggctaagaaaacccttgattggcaaggatttttgataaattnnnnnnnnnnnnnnnnnnnnnnnnnnnntctttttaacggttgttctttgcatcattaagttcattaccatcaccaggtggttggaaattgccactttggtcaaggaagcaaagtgaattatctattgggatgattaatggcgtcccgaaaggaaaaa

SEQ ID NO: 21056 - DNA, 1725 bp, Arabidopsis thaliana landsberg
ttgccacggttagggggtgccatgctgcaagcgttcagtattccattttaactgcctttctgggatttcttgggggtaggttctcaccaataatagaggtatagagttcacactttatattatttttgtttatgctgaaatatatctaaattttagtcatttgttactcttcgtatctttatgctaatgaaaagatagttgtttttaccacctttctggtcaaattctgaacctttggttatctggtttgtctactctaggaatgtgtcatgtcttttttccctcaaacgtgccattcattttctttagtaaaaggtcttcaatgactacaagcaagcgtatgttatttagtgtcatttcatagagcgaagccttgtagtaggtcgaatagagtgcaaagaagtgtttactttatcagatcatataacacaagtatcatgtattttctttttgtttgctgatatttcttttgttactgagataattttattttatttgtattttagtcaagagacaagcttcttagagcatttcgagcaatgaatgctgcagatgttgctgaccaagttctccgtcaagttgataaattggtcagaaataacgaacgtgctgcacgtgaaaattggtcaggcaaggtaaatgttttgttttcattctttatttcctactttttctttagctctacatcacctttgatcattctgaccagtaacgtctcatgataaacctacttttcagaataaccaggtgattagtcatcaaaattcttgggatctgtcaaagaaacgaataatgccccagggtgaagatgatacaatcaatggagaggttgctccgaagcgcgtacgccataatactaacatgcatttgacccagcaagttcaaacaaatgaatccctacagggacctgtctctatcaatggcatttcctctggtaaccatctttcggacagtgagttgactccagtggaacaaatggtttcaatgattggtgctttgcttgctgaaggagacagaggagctgcctcacttgaaattctcatttctaagcttcatccagatatgcttgctgatatagtaataacaagcatgaaacacttgcctagtacccctcccacgttggcaagttcagtggctactccagcagatattgtggtatcttcttctacaaataccgtgcattctccgactcctccggcacaacttccttttgatccaatccttcctgctgggtcatcgttttccgaagtgcctagcttgagtagctcggttgccgaccctagacgcgacccaagaagggtacaaacttctatatgttgcttgattctttgttgaatgttctttctccaagataacttattcatagttatgcaggatccccgtcgcatggatccaaggcgtttaaattcatctgtgggaccaacgtcactccctgtaggtgagggtaaagaatcagttccagtacagaaggacatctctaccttactgagtaagccagtctcagtttctgctgtcacgccaggggctactggttctatacattcaacagcagtagagcttagccagaataagatgatgggaagttcaggaatcagaataattgatccgcctgaatgcagagaggacttgttgactgttcccaatgagtgttcttacccgtcaaaggaaatatcatccttagatgttccactatctcctgcagggatgataaggcatcaagcttag

SEQ ID NO: 21057 - DNA, 2123 bp, Arabidopsis thaliana landsberg
  unsure (1)..(2123): unsure at all n locations
ctatgtggcttcttccccacgtttgggctatgtacttctccaccccactgcacagcggttgcgctatgtttgaggtaggcgaagagtgtccccggccaataacctatcacgttgttagcacatgtcaaccaccgattcccgctgttggtatcctgcaaacatagtcgatcattaaacattgtaagctaaaagagtatatatgcaggttctaaaacatgtgccaaaggaaactattgcttcatatttttgatttataacgccaactttgaggcattaaccaaaacacatacgataaaagcaaaaaaaacgaatctaaggactgcctaaatgtgtttaactccgcttaataacataaacacctaactccaatctttacggtctatcaaagcatagacaactacctagactacttttaaaacattggatatgtgtataaggcaaaaatgttaccaagaacatgctcacggtgattaaatgttgtttttgcgaggtagtcgaaacgggttctattgctgcacccaatgcaaacttagtagttgtttgcacaaaacctgcgcataagaggttgacgcaccccgttttagagtatccatctttctgcaaatccaaatagaaagagaagttatgaactcatggaagagatttaagatgttataaagtcattagtgatttagtgatgttattacttacagtccaatatgtgaaaagacgtgtgcgggagtctccgaaaacacttggattcacctgaaataggttgatagcgatcagtttaaaatttacctcaaatacgagatatagtacttcgatggaagtaaaaatataccgcccaaccagcttctatgctttcaaaagtatctgagaggccaccaagcagccatatctgagcagagctgtagtcgctagcctgaaccctcggagggttccatacatttatatcggattgagctccaataaaattataccctaaggcgataaggacagcctcctatatcattaacaaacaataagtgttttctagttaaccatatataggttttagtctaacgatttagcttttgaatggatgtgttgtttttttggttctcttttcatttttattagcaaagagaaggaaaattataaactatgaatgtagatacgaataacaaaataaattatgtttaacgtaccgatcgaagctttgggcgggcatgagttatttttgcagctgttatattgaaactacccttgtgttgaagagccttgtcgagaaagctatatctgtgaggagttttcctcccaaaatgagacggtgaagaagctctgtttatgtcttctctactaactctacgtaccggtattgtccctttgggacaatttccggatttagaccaaatttgagacgttatttgttccgaagaaccgttgtttggaatagtagttttctttgtaccaaagtccacgctcggtttcatctgcatgtataaatgtagattaggtaaagatagaaactttcctaggtccaaagcaaaatataaccaaattttgtatttacaaaatcttttatttatatgatcgttatatagtagaatttgtttacctgaatcttgtggttccttaaagcgggatgatcaaaggcatgttgtttgtagatatctatacaatctattatatctccatcttcgctctacaaatcgatttgggagcttagaaaccaaaaaatatacagaaaatgtcatatcttcgcatttagatttagtccataccttgatggtcttcaaggaaggcttattaagagacttcagtttcatatcgatatctaaagaacctttcccataggcttcattgtaaaaaccacacagaatcgcaaacattaagaacaatctcattgcggaattttgttgtgtgtgtttactaggttgaaggaatagaattaggatataggctttgaatcttgaaccttcttcctacttatagagtttacaaaacctaatggtttttcttcttctagttaatatgatactatcacgcataaatattgaaaaaacggatttgtaaaccttttggtcaattcttcgtgctataaaactcagcaggcttaacgtactaaatatgaatgctccggtaattactacntccgatct

SEQ ID NO: 21058 - DNA, 1822 bp, Arabidopsis thaliana landsberg
aacatggatgacacatctaaagaagtaggccacaaagcaataatttcgaaagaagttgagaattgaatatgtcttgaggagcaaatttcagaaataacatcatcacaaggttgccgaaacaagatgtatctattagctaagttttagatataggtttttgaatctttttgttatttctagagtctttttaaagtcttttcaagtattctatggattgggacaagaatggagataagaagacattttgcagcaaaagctgaagaaaacaagccaaaggacgaattcactttcagatcaagtcgagagtgtcgatcggcagccttttggtatcgaccgacaccagttgtggcccagaaaagtctatgacggtttagagttcgaagatatggaaatttgccccagcagacttttttattttcattaatagtcattgcacgttttaggtcatatatattttaaggtcaatgtttagacctaacaagcgttatctaagaagttcttttctagcaacaagttgttctttaagctattcatatccatgttttcagagtttcatcaaagatttcaataacagtgaagagatcttttctaactattttctctctattgattttgtttatgccttcttattcatacatgttggttgtttcatccatcatgtctaagtagtttgcttgttagggttagggtttctcattagggatatagatgatttagtagattgcctacttgctaggttatttgtaggattattcatctttacttgttcttaatgctagttctagagtaggtaagtagaacttgatcataaataataagtatacccataataggtatctatttgatgagtcaacgtttataggtgtgcaataagaatcagcctatctacttaggtgaacttatcgaatttgtttagcatgcatgtcttaaattagggattcactggcacatcgctagggatctttagctttaggcatagtcaacagcactacacatcaccggttactctataattagggtttgagttcaggaacggttcgatcgcatcttagctatttctagatctactatcatctatttcctgagaataccctagacctaacgtttttattatcttttcttacaaccaatcaatctaatatttgcttacttgctctctttttacttttctattatcatttagcttaatcttgacacttatgccttttgtgtgaacaaaagagctttgtagaattcgacccttaagtactaacggacgatctctggtttaagggagtaaactgaaggcaattttacctacactatcgaccagccatcaaagcatgtatggtacaagcatgtaaaacaccagctgatcttgcctctaagatcactcacatgaaagctaagttgataccgaataccacttatggtacacaagtagagcaaaacttactatgtagtttgatattggcattatcttatattcgaaacaagttttaagcatcttatttatatcatctcaatttcaagtataatgcacttgattttgtctttgagtgctagtgatggtacaagttccaaggagaaatgtgatgataaaaaagaagccacaacaatgttactctcggatcaaagcaaacaagaaattgatttctgtttaacacataaaaaggttcaaagtacttaattaattatgggtatgaacgttgcatgactgccttagtacacttgtcttgtgccgaaactgttggaacacatgtagatcctaaggaggcacatgctgatccacatttgcgatcaaaaatgaataatattttggcacaatatctgatatgactat

SEQ ID NO: 21059 - DNA, 441 bp, Arabidopsis thaliana landsberg
ccgacgaaagggacgccggtctctgtcacctgttcttcgaatatttgaaaggaccagccctggattggttctcaagactcgagggaatttccgttgacagttttcaggagctatcgacgctcttcctcaagcaatattcggtgctaatcgatccaggaacgtcagacgctgatctttggtcattatcttagcagccaaaggagccacttcgagatttcctcgcaaaattccgatctaccctagccaaagtcgaaggaatcaacgacgtagcggctctctctgctctgaagaaggcgctgtggtacaagtcagaattccaaaaggaattaaatttgtccaaaccacaaacaatccgagacgcattgcaccaagcactagactattgttttcatgaagaagaaatagaactgctatcgaaaagatacgagccgccgaagcaaa

SEQ ID NO: 21060 - DNA, 321 bp, Arabidopsis thaliana landsberg
ctgggtgacgccctcactcgtttcttgccacttggtcttggacttctatacctggtctatacaggttagcaatgtgttttacataatctcgctctttgttcgtatatcattatttgcattgcttgaccaacatcaacttgttccaatatctaccaggaaagtgtagaggctacagctgaagtttcgaagaccttcaatgagaagattagaaagtattgtgatatgacacttctttcttgtgcttatgctggaactggaaatgtcctaaaggtatctaatcaattgtgctggtggatgagtgacatatttcattacttggtt

SEQ ID NO: 21061 - DNA, 1399 bp, Arabidopsis thaliana landsberg
taaagggtatttttgtatgtcttttattttcaacacataagaaaagggattttagacaaaaaaaaaaaaacaatttaaccccaatatttttttaagacattctagtaattgatttcattatttgggttaatctagttttttttcctatatattaagttgaattattttcttggtatagaaattgctccaagcaaaaaggatattttatttttgtctcaatataagtattctttagatgatattgtggctgagatgggcttacttgaatcgaaggttgcacccaatcctatgaagcaaaatcatcatttggtgcatgttctctctcaatatattctctcaactttccttctaacggatctcgagcaatattggcaacttgttgggagcctcagttatcttcttctttgtcggtcagagctcacatatttggtgcatgttctctctcaatatattctcctcgtgaggttttgcgtttttcaagggttgtgctagccaatgttcttgatgcatttagacttttatttacgttacataactatgactgggtcgtacgttttacaacatgccattctctaatgacataatttatcacattcttccgctagaaataaatatcactacatggaaaatgctttgttcgagactgaatggatgctatcaaacaacaagaggagattcaggcccaaaaggaaaggcttctcagatccctccatagccatcaaagaaaccttcttcctcttctatatttgacaaaattatatacaaataaacttattataacaaaaactaaatgactaaaaataacttattataacaaaactttttttttccaatcaataaactaaaatgaaagcacaagaaccatgtttttgtgatttcattaagaacccagtttttaataaatacgttacatccctgtaagctcgcgcaatcttagaattttgtggtattccttatcatacttgttgatgtcctaaatattaaaatatttaaagtaattattgatgatacaatttttttataagaactatgataatatggagaactcatccctatgtcatgaagcatgttgattccatgtaatgttttcgtagatcacagtttgcttatgaattatgataaaaacaaaatctagttgtgttatgcatttaggttagattttaaaggttgctcaagagaaaaagaaatataaatgaaaggagtaatacttaatacaaattaatttaatttaatttctattcattgattagatgaataagaacgtatgatccttactatggaaaaatttgttttccttaataacgcttttgattattgaaaataatatacctattaaataaatggcggccaattttatttaaaaatttaaaataaaaatttgccaatttgggatttcaaa

SEQ ID NO: 21062 - DNA, 1447 bp, Arabidopsis thaliana landsberg
ttttttttctgaagtgaggagacggtgttctccattttattaaaagaaaattaaaagaaattacatgctaacgtatcttggacataaaacaccttaagcgtcatccagcataatcgaaataacaaaatctgtctttaggtttttttgggttagcaaactatgtgtttctttttttctaggttttcatttgtttgatatcatctctttcttgttgtaaaaaaaataatgtttaactgtttttgtctacacaaatttagccaaaactttataaaggttaacataattgtccagaatatgacataattgttgcacattttcttgttgaatctgaatataactgctcaaatgcgacagagattacgtagaccgttaaacgttacataacttcctaaatgtatacagtctagaaagatgacataattgttgcacatttttgatagaaaaactggtatttttggcatgttatagacaaaacttcctaaaggtaaagttttacaaagtgagctgcgtggagttggtatacttttaaagttttccctctctcttttagtaatttcctgctagtgagtggtggaagaaaggaggctgcgtggagtctcaagaattcgaactgtagagaaacacgcttataataatcagcttaataatccagttctcttctcttgatctgaagatttaaacatcttcaagaaatcaaatctttgtctctggtattaccttatttaagttcgacaaacaatcacattctgtttgtcaaaaactcatctatccctatcccacagaaaaatgtcatgtctaagttgtttcaaagtcatgtgcttcaagaagaagcagagcaagaaagaagacaaacccgtgaaaacagagagattgccagagccagttggacaaaaggaagatgtagaaagcagcgcggacaagaagagaccctttaaggagctatgcatgggaccggcgtactacccccatgcaggatgcagctatagcggctttgagcaaaatgttggcccgatagattatggagaactcttggaaagtatcacttcattaccaataaataatgaattcaacaaagtgaagacttttgatataagaggagtcacagaaactgtggccaagtgaataagagaagaagttcaaagatgcgttgttcatcacatgtaaaattagagccgacatatatacatgaaagtgcacgtttctcttaataaaattctcttgtcttgagccactgattcctacttttatttaatgcatctgattacatgtttattaatgcaagaatttctgttttaataatccttttgcccgctcaaaaaaaaaaaaaaagatagagaaaaatccaaacgtgataaaattcaacgtgatttagactcaagaatcattcaatgtgtttatgtgtgtacaaagcaactctcagtttcctattgtatggttcacacaaggc

SEQ ID NO: 21063 - DNA, 1503 bp, Arabidopsis thaliana landsberg
taccctagtagtagtagattcaaaatggtgaagtcaaatagtattatcaatgaatgcggataattataataatcggaccttatattagtggccttgttgagtacacactaataaaccataacaaaagaagaaaaacataatcacaacggaatcatctttactgttgtaccacagaaaaccattcatattaggaatatctaattccaacagttgagacttgagagttgaccacgatatattatacaatttcttaaccatttttgaaaaaaaacaagttacgtacacatacacataatacgatcttgctgttgtattaagaaaattgatacatcatacatctagatcgatataattattttttattgaacaaagctaagatcgatacaattataaaccatatactacgttaaaaaggaaagagatctatctattcagttccttcactcaatttaaaaacaaatgtgcatgtgtattgaatatatataatacacacaacaaacaacatagtttcacaattcgtccctgcaaaatttgttcacaccctaaaatattggaagctgccatcatcaacatgtcgcaagtcctctactctctaacgatcgtctttgttttcttcgcttcgacaaacatccagaaaacatcaggcagtgcatcatcctactcccaaaaccacaaaacgttcgtgaaaaaggcttgcaattcgacaacataccccgacaaatgcttcaagtccttatcctcctactcatcgaatatcaaatctgacccgatcaagctatgcaccaccgcgcttaccctcaacgtgaaatccgcaaaggaagcaacgtccgtcgtctctaagcttctcaaaatgtctcagaaatcaaccaccggacgaaagggtaaaatgttaccagaggctcttatactcaaggactgtctcgaggagatgaaggacacaattattgagctcaagcaagcgatcacggagatgaagaatctacaagatggtggctctatggctgagcatataacgaacgttaggacgtgggtgagctcggcgttgaccgacgaagggacttgtacggacgggttcgaggaggtgaaagtgaataaagaaacaaagaagaaggtaaataaggttgttgaggaacttgcaacgacgactagtaatactttggcgcttattacgaatctacgttactagcttacgaataataaacctaaaagtgaagaaagttattattgatgaattattactactccttgcatgtgcatgcgataaatttcttgtgtctattatatattattgtatcatgttaatgttagagctaatttaagttaagccaacttgtatgatatatatcacatatatgtttattatgctaaagtaaaatggtgaaagcattttcaaagaaattgtattcaaaaacgaatatatacatacaaacagaaaatgatttcaatagtaggaacataggcaaccatgtgatttctcctgttcttattccgcaattgttacta

SEQ ID NO: 21064 - DNA, 722 bp, Arabidopsis thaliana landsberg
agttaccatgtagtttatgtagtttatgtagttcatgtattctgtctaaatgacatccaaaacaacaataactaattcgccttcatcaccaatagcaaatttctcaagctcgccacaaacttcattgttttcaattcagttttgatgttttcaaaacttttactcatatcttcaaaatcatttggtatagggttaacacttgaagaactcatgcttaatagcctaaaagagaaagatttaacactagaattaactaaatttcttaaacaaattattgcaaaatctcggatacataccccttgatccaagtaagatgacgataatatattttttaggttgtccctttaaattacaaagactaagtctctaaagacttattatttttcaaaacgacttcaacatattataaagaacaaaaacaattaatgtaataaatctgactagctgtttgtgatttcttgtggcagttggaaaagagagaacctgatgatccatgttcttatttgcttgctatttagatgctaggtgatttaatgatctgcatatcttttaaccaaccaaatcatgtcacgtcaccaccgcgttttgcttaaaagcaccttctatcttagagcacctctaaactaaattgctcaattaacatttaaatttaatcatttacaatctaagataggctctatgatgatgttgtttgctcgattgctaggatatgcttcgtcctc

SEQ ID NO: 21065 - DNA, 825 bp, Arabidopsis thaliana landsberg
tatccctccattatttctttattttccaatttgccataactctgaaatgcatagccgcataggtgatggtgatggtgacaactttagtgccagtgccgatgttaatggtgatgataacagtggcggtgccggtggtgatagtgaaacaacagtggaggtggcgatggtgacgataacagtgacggtgccggtggtgatggtgacggcaacaatggcggtaccggtgacgatggtgacgacaataatggtggtgccggtggctaaaagataattacaaacacttattgatctagaaaaactgagccctaagatactataaatggaacccaaacaaaaatttttaaacgaaatggaattatctcaagtttcaattttcagaaatctaccagcaatattgttggacggaagagagattggtcagttgtgagatttggtcgtcggaatagtgacggtggctttgagaagatggaggaaaaaaacagtaaataattgggggtataagtgtatatattacacattctatacagaatatcatagtcgttttttgttatggttatttatttaatttgttgttttttgtggttatctactccaatttccctttttttaacagactaggttttaaaactatgctacgcatgagtttatttaatatatataaatgtaagctgtattcaagtaatgatagctattaatattatcttatataattataatgtggcggtctctagttttttaaattactagtttagaaaaattacattccaaaaacacaattttataattataaaattctattatgtttaaaaatcaaatcagatttaa

SEQ ID NO: 21066 - DNA, 1012 bp, Arabidopsis thaliana landsberg
  unsure (1)..(1012): unsure at all n locations
tgccgctcagggagatagtcagctacacgcagtcatcgtcacaccctgagccaaaacacgccggataccccaaagccacgctctcgaacgatcaccgaaccaagaggaagtaccctgaggaaaaacatcaggaacaccagaagcaaagacttgtaaaatattgtctcgctcaaaggatcatttccagagaaaccgaatcattttcgagattttcggaaatgatatggaagaatcttcaagaataatatcaaatcaggaaatctgtttgaagtccccaaaaaataaaaaatatttccttaaggcaaagatactcttgaaccgacttaagaatatattcaaatcttccaagaatatggctggagaggcggtttatcaactctatataaagcgactcaaatatttcgcataaaggggagacacacaaattatgccctcatcttcagacgactcaagagctctaaatttaaaggcaaacacttctcttttcataatctaatcacttgtacgatcaaacacatctttttatcaataatattaagaaaatcatctgtggttagacatcggcgttttcatgaaagagattgtgtgctccgcgaggttttccagaacactgccgagctaaacgcacgaaagtttggagctaactaggaaggcccatccctaattttgagagtcgtctgttccggcgtctacgagctcgccaatgtaaacggctgagcaattcctagatcccggaacgccatgtaccttaggaaatactactactaacaccgaaagtgcacatgaacttgaactacgaggtgacttgaaccctgaaatggctacgtagacagttcatctttggatgagttctgctactgctcccccctccccccaaacaaaaaggggggggggggggagggnnnngtncatatatccatactctcacttcagtttttacatagatgttttttaagtggcctttacttggaatgtcttaagtatctcactccttatcaatgatattcggttt

SEQ ID NO: 21067 - DNA, 1095 bp, Arabidopsis thaliana landsberg
ttttccaaataatgacttacacccttagtttctgaactgatgttagaagtaagtcgaagccaagcagagtatttcagggactcttgaacagttaagttgggagaatggatatcaaactgttcgcaataacctgaaacccgcgaaaatgtgtcttgaaccttaacgtatccgcctacttcaatctgtcctttaatgtcaccgaaggttttccttcccgaaagaacatccagcagagtcgttttaccagcgccactcacacccattaaagcagtgagaacaccaggcttgaatgcgcctgtaacgccagagagaagctgcagcttctttcccttttaacacataaatcatagccacacattataattctctatcttgtttaaaaggattcaagaaaacttgcactgatcttgcatactctttagtctttacctggggagtctcaataatatattgtacgtcttgaaatgtgaaagttagaggttcgaaaggcaatgcatttttgaaacgggaagcaattttagaatcattctctgagctttgagtgttcttttcatgagaaacaattacacgagacctctgtgaagctgaagttgcagaaaaacatcaattgtcattgcatatactaacatgattaactcacattcttatatctcttgtgaacttactcttcaaaaaggtcaaggccagtgcaaaaacagtattgaagaagagtgtgaagccaatcaaagcgccaaatgcattccagtaagattgatttccaaaattcaacccgcgagcatctagaacttgttcccccaaagttctgttttcagatgtcatctaatggtaataaaaagatgacaaggatcaataccaaactaaaaaaaaatctataatgtgaaaggtttctgaagaattcattaccttcctccaccttggagcgaaaaattcatttgaggttagaccaatctcagcatatgacagtggagaaagccagaatccccactcaagccaagaaggcattgaggctgaaaaataacagggcaccattacagtgaaacctctgaattactccagttcaagtttcaagttaaatactacgttttcgacaatgaa

SEQ ID NO: 21068 - DNA, 1576 bp, Arabidopsis thaliana landsberg
cgactctgtattatcttctaggtaaatttgcaccagaagatgtcaaggttttgcctttagatttagctagcggcgaagagtcactcaaacatgttgtagagcaagcagtgtcgcttttccctggagctggtgttgattatttggttcacaatgctgcctttgagcgtccggtaagtaatttccttgctaaagttttgtatctactcaatagagagtcttaggctttagatatgtttactcaagcgggtgtcatcatcatactcttttccttgcagaaatccaaggcatcggatgcaagtgaggaaactctcaaggtactaaaattaattgcgtaaaattcgtaggcaagattattaattcttgaggaaactctcaaggtattttttgtttctattgccatagttagcctgtaacaattaggacatgggtgattttgatatttctttctgacatatggttaatctatgattttgtgtgcagactacattcgatgttaatgtctttgggacgatatctctgacaaagttggtagctcctcatatgctaaaacaaggagggggtcattttgttgtggtacgtggagactactgggggatagtttttgttaattttgtggaattatatttaaggattgagcttcatatcatagtttatgaatgtggataacattgcgttttatatgttagttaattgttgtaatcacagtattgtatcttgactatatatgttaaatctgaggatactagggtatatagacaatttaaggtttcgttcaggttagtatttaccatagcttgaatgttatggaactcaggttatgatcatgcactaattgtccattttattgggttaaatgtcatgagtaataattcacgtcaattatgctcagataagcagtgctgcaggaaaggtaccatcacctggacaggctatatattctgcttcaaaacatgctcttcatggctacttccacagcttgcgttctgaggtatgttagaagtaaagaaactgttgtgcttgctaattagttggcagaaattgacttattgaaatcacaagtgaaaatttacagctactcctgagttttaataagcttcatatgttgattcgctatgttttttcatttacattttattgttgaaaatagcacaatcaattacaaaaactaacagttagtttacaatcatctgtgcatggtttcagttctgtcagaagggaatcaaggttaccgtcgtttgtcctggtccaatagaaacctggaatggtacaggaacatcaacttcggaagacagcaagtctcctgaggttggtacttattatgattgtgattatttgattaagttgtgagcagcaagtacttctcccattgcttgattcattatttccttgtagatacacgtagaatcatattctttgtcaacatttggagattctaacttcagctccttgctcaacttgatttctctcaagcatctattctctttgctacccagaaacgtgtgtcatctgaacgatgtgcagagctgactattatcgctgcatctcataactttgaggaagcttggttttcatatca

SEQ ID NO: 21069 - DNA, 348 bp, Arabidopsis thaliana landsberg
ggataatcctgggatcgattatacgacttgtaatagcttatgtgcaaactcataggttgtatcgaatccttttcttaatcaataaagtatccgattgtttgtttactctattcgtctcatatattgaatcacggaatcatatggaacggattagacaaggaaagaacctcataaacggttagggccgagagaactcgtccggactttaggtagtccggattggggcctttaaagttggtatcagagcatgcttggttctaggactaggtgttgggttcaggggtatcaccactcgtcggcttgagaatctcgcggtagctgttctttactcttttacgattttactag

SEQ ID NO: 21070 - DNA, 841 bp, Arabidopsis thaliana landsberg
  unsure (1)..(841): unsure at all n locations
ctacttacccaaaatttgtccaaatatacccaaacatacataaaagttttcataaaaccagaaagatttaaaattataacaagtttttccttaaaacaataatataaaacaagaagtaaaccttgttttgagcttgttctataactcaaatcattaaacaggtcacatattcaagttattagtgtatatatatcctcatatgtatatatattcttgtaataaaaagtactcacgggtattgggttcggttcggtaatacccgatgatatccatggttatttgaaaactgaatccgatcgggtaattagctgaaaccgaattacgggttcaggtatttcgggtcggtttttcgaattcgggtattatgcccatgcctagctaagaatgtaagcattttaagcttgggatatggatattggatagttgaaacttaaattcctcttctttattttggtaaaccgcaaaattaagagcctgagatatgtatctcttcgtgagccgtagactagagcgggttaatataaagaaaaatacttgaaaaacataaactctcaaagcaaagattaaaaaatacatatactataccaagaccttcaggttaagttaaagaacaaaaatattaatcaatagcaagacctttaggtcttcaggatcttgcaagactcatcgactttacagttccacgagtctatccaccactaatacacctaagttgcgaaagcctgtgttcaattttctacaactctagagctatatcattagaattgttactcttcacgagaggctctgtgatcttattaacatcnccacgcaagaagcaatgcctcaacaatgtgaaagc

SEQ ID NO: 21071 - DNA, 781 bp, Arabidopsis thaliana landsberg
tctactaacctttttcaaatcatcatgtatattttattataacgaaattttaatttgtattgccatctcttgtctctgcagtaatgcagttaatcgacaaagaattcgttgatacatcctaagcaatttatagtttctattccaggatactcaattactttatctacttcaattttattgtttgtgattttgagcatacagttattttgaaagcgatcctcttgctcatctgcataagttagtccagaggtgagcaatcaaccctaatttagcaaaccccaattagtatgtttttgctcaattacttattatatcccttctttgtgttttcgagagtagggattcaaatatagaggaacatacatgttgtagctttgaatgggaagtccttaccacaattatcaaggttaacgtggtcagacgtgtgatagagctaatgcaagccaacattgatcatatgtaaaactctagaaaacattgatcatactaactctaggcaggcaatgagagttgtaacatattgcaagccgagaatgttaacgaaaaatacatctttgatcgaagctaccaaaatttctgactcgacacaaaaaccttttctcaacgtgaaggtaatctcactgaatttttccatataatcattgttcttagttataactttacacaatcttcttattgtatgtcttcttttttctttagtattcttggaataacaaaattattctcacaattaaaggacatcgttggaaacaagtgtcatggtatggtgttttttgattta

SEQ ID NO: 21072 - DNA, 371 bp, Arabidopsis thaliana landsberg
ccgcagctgtttatctgattaaccgaatgtcgactccggtgctatccatggagtcaccgttgcagatgctgctcttatccaagccgaattatgagcgtgtacgagtattcggttgtctgtgttttccatggctcagaccttacactcgcaacatattagaagaacgatcgagacggtgtgtgttcctcggttactctttaactcaaacagcctacctctgtttcgatgttgaacataagcgactttacacatctcgccatgtcgtgtttgatgaagcctcctttcccttctccaacctcacatcccaaaattctctccccaccgtaacctttgaacagagctcctcgccgttagttacgcccatactctca

SEQ ID NO: 21073 - DNA, 499 bp, Arabidopsis thaliana landsberg
tttgactatcctctaataatctctagtatatgaaggacggaattttggatcattgctctcaacttgttcatcaaaatctagcaaaattgacattttccgtcgaatatcacccatataaacttaaccatagtggaaacctaaaaattcacccccaacttttacaagaaagtgatctttctcattccttcatttgaaaggtttgaccttaacgtttttgttgtagtcgaaggagtatctttcacaacattgctgatcttagaacaaatgtaacccattattaccataagacttattttttctttttcagttttgacttgtgcctttatgtttaagacactagtagccacatttattacgctttttaaccgcaaaatttaacacgcactctcttttgtcgatcccacaaactccatctacctaaccatggttaaaaatcatcaaaccttggttcccttgattaaaatatccctaaatccaagtctctttattatttcattta

SEQ ID NO: 21074 - DNA, 761 bp, Arabidopsis thaliana landsberg
tgtttaattcttcaatcctagcaagcaaatcatcattattatctctaggattgggaattgaaacattacaaacatgtgaatcaaccttagcatttaaactggcattttcatttctaaggttgtcaatcatctcacggcaagtgcttagctcactggataatttctcacatttctcaatttctagagcataagcatttttaaccttaacatgtttcttattttctttaattagacaatcctcttgggaatccaaaaggtcatccttttcatgaatagcactaattaattcatttaatttttctttttgttccatgttaaggttggcaaaaagggtacgcaaattatcttcctcatcactagcattatcatcactagaggtttcatatttagtggaggatcttgattttaccttctttttgccgtcctttgccatgaggcacttgtggccgacgtttgggaagaggagtccttggtgacggcgatgttggcggcgtcctcgttggaggaggagtcggtggagctctcgtcggagtcccactcccagcaaacatgggcatcgtcgcccttcttcttgtcatacttcttctcttctcttctctttcccttcttatcgtcgcccctgtcactatcactggataatggacattttgcaataaagtgaccgggcttaccacatttgtagcaaaccttcttggagtgggacttgtaatccctctccctcccttgtttgaggatttggcggaagctcttgatgatgagcg

SEQ ID NO: 21075 - DNA, 1226 bp, Arabidopsis thaliana landsberg
ggttttttattttctgtattcaaatcaaatgaaaatagtatctatttatagagaatgaaaattataaattttgatatttttatgtataaatattataaaataattgaagttatataattgaaatgaaacaaaaaaaaatagaaatcaaagcaatcaatcaaaatataacacttgtcacacttattttctatcttctactttcagggatgttgatatttatcaacactaaatttgccatatcacctaacttttaattacaacaaatcaatgtagtgaaaatatttttttcaccagttgtaaaatggtttgttacaacaaatcattgtaactagtctgaggttaaatcagcttattagattttattttattttattttattagttcaacacttatgaaaattattgaacaggtgacaccatatcgattaccatgttaaatcatattttgaatcaatttataaaactataagaaacaatacacagttatatgatttttagctacggaaaattatgttgttggtctggagatgacgtcaccaaaaatccccacaagaacattttccatcttcaaaatgatgaaacctttgaacatctctaagaacaactttcctaccaaatataagagatatcaactttgctgcattgtgacaatctctacacaccctaagattcttcacaacccgaatcgttgttcccggaggagtattcaataatccaaacgttatcgcaagcttttcgctgtgatacctaagcgtaatttccttctcttggtcattcatattggcgtgaactaccattgatgtatcaggaacataacctgaaagctttagctctttcaccatttcatctaatgctctgtgaagctttgtggttgcagacttcacaccatcccctgagaaaaactcatgaaccacattgtttacctcaatcgagctgcaaccgggaactttaaccgcctttcgatctttcatcacctttcttaaagaatctacatattcccatttcttgtttctcgcgtagaggtttgataaaatcacgtaatcgccaccgtgtgaatcatctagctcaaagatcctctcgctaaccttttcagctaggtccaaattgttatggctgctacaagcagctaaaagaatcctccatagcattggtgttgggctaattgggagcttatcaatgaattcatatgcatcttctaaatttccagctctactaaaaaaaatctac

SEQ ID NO: 21076 - DNA, 630 bp, Arabidopsis thaliana landsberg
tacgacaagcgcttgagcgagtgtacggacaagtctgaggttcgcctctattttacttacgctttcttcttcttttttccatgggtttgaaatcggtagttatatgttcgatttagttgttcattgtgttcccgaatcgtctctctagtttttttttgcttcggattttgtggtgtcatcggtttccgaaaatggatactggtgtgattgatttttggctcctcctaggcttgcttggtttgtgtcttctgtttgacatttctttttttttttttatatcgggttctatgatattttctcatggattgcagaatgttcaagactatgaagggattatcgagttgtctaagacaaacatcaagaccaagcagcttggagctcagctgattccacgctactttaaattcttcaccagtctcgccaatgaagcttttgatgcgtacatggatctaatcggtgaagtggatgtcggggtatgtacctagtcttcttacacatatgaattctcggtagatgtagatgctccatggtcaactcatatgaacttggattagtttggaatgctcaaacttggtttcactttggataaataagctcgattaattctaaaactactgggttgaatgattt

SEQ ID NO: 21077 - DNA, 524 bp, Arabidopsis thaliana landsberg
  unsure (1)..(524): unsure at all n locations
tattcattttagaatacctttatgcttcctcccttctttggcagaaatcattatcaactnnnnnnnnnnnnnnnnnnntctgaaagagtttctccaaggtctgtggtggcttccttgcaaaatattgggttgtgggtcctagtcgaagccccttgatcatggccttaataacaatctcattgggcattgtaggcgcttgagctctcagatgcaggaaccttcagacgtacgcctgtaggtactcctcatgatcttgcgtgcattgaaacagggcctnnnnnnnnnnnnnnnnnnnnnnnnnnnnnnnnnnnnnnnnnnnnnnnnnnnnnnnnnnnnnnnnnnnnnnnnnnnnnnnnnnnnnnnnnnnnnnnnnataccatgtctgagccacgcttctgactgccatgacagcagcgttgcccatacgaggatattgttgccttgtaactcatcagaaactactttggatccgaatgcccatcatacatgggtaactgaggtggcttgtangatggtgacccatg

SEQ ID NO: 21078 - DNA, 529 bp, Arabidopsis thaliana landsberg
caagaaaatgtagtgtgttttatatttaatctacaattctctaaccactggaaacaatggtaacatttttagaccatgttgcaaaatgattaaaatgcttactcgggatcaaggtatcctagagtaccaataacaactgttgaaacttgaggttgattgcctccaacttgaaacgatctagagagtccaaaatccgcaattttggccttgaactcttcatccaataatatatttatacttttgacatctctatgcaccattgctggtttgcatctagtatgcaagtattataatcctaatgcagcttcgttagctatttgcaatctggtatcccaatttaaaacagagccaccatgtttcctacatatcaaaagatttttattatcaagtttagatcaagatgaagtcatgatttatatgggaggatattgaactaattactataatataattaaacttaaaaagagtattaaaccattgcttggtttcgattggtgacaaagcatcgacttcttatatgtactaaaat

SEQ ID NO: 21079 - DNA, 1682 bp, Arabidopsis thaliana landsberg
agtttcatggataaggttaaggttcacgacttagagaaagtctgcgagccattgttctatcactggaaactagagaggcaaactaaagaatcatttggagaatacacaacccgcatggtaagtatcacatataacttctctttaactctctcactgtggcttgaacatttatattgaagaagaagaaaaaacaaatgactgtgttttttaactttaacaatggtaaaattgcagggattcgagaaactgaaggagctgatagatacatacaaaggagtttctcaatgagcacaacagagatcatctttcgttttataattcatgtaatgtaatgtctctgtctgaactgttactcttcggtaactctgatggagaacttgttctcgttttggtttgattttgtaccctcttttttttttgtttttttggattgctttgtctttgattggataatgaagcattactgtatcaaggctaattagcccatcaataagcctttttaaagctctggatatggaaaagtcagaacctctctctcttatctctctaaatttttcacagagagagagattttgttcgatgtttttccgtctggtatgctttaccagcttatgaatccggatgtgatccggttttgtcgatctatctcgctgtcctatctcgccgtccggtgtatccggtgttgtttacggctatcccgttgccgttctgtttgtttcaccgaattgatttgggaaacaatttgatatcagttttttcttcttttctaactggaaattttcatggccttctctcgatccgtcccaccaccatccacaatcaggtaagtgttttggtgtttcgattgggcgactgttttagtctcatccacatgaatcaatatccagatttgggcgaattatgggttgcttgactccttccaaccgttatagttgaaacggtccggcgtttttgacggcttcaatcacctcatttgaggtccgtcttgccattccaagaagtcaaggtatcaatttccaaagtctattcttattagcaagtgatgacaagagatcagaagcttcacctcgtcgttgattgtttgtcgacgacttctttcatgcttttgttttcggaaaagatccagtgatgagaagagaaagaatttgaagattaaattgaatcctttatctttttcggtttaatagctgtctgttttcataatccggagatgtttccggttgttcactcgctggaaattgtgtcggcttctgtttgcatatttcgctgaaggggttgtgggtaccggtttactaggttatccggttcacccggtttgtaagattggtttatgaataaatatccctttgagaaataatcaaataataatcaaacttatggatatatagaaaacagataaataatagaagactaaattttaattatatagttgtattgttggagatggatcctaatcggaaatatcaacatgcatgtaccaataaaaataaggcacgtccaatgttgaactaatcgtctcagccaagtagaataaatttgatgggatcttatggtaagactttttcgaagtgggagtataaaatcttataagtgtgtcacgtcaaaattatataaaagtgttggttgtagtatgtaaatgttttttcgttgagattttaaaaagttttgatgtaatgtgtatt

SEQ ID NO: 21080 - DNA, 1805 bp, Arabidopsis thaliana landsberg
tttctttctacgacacaaacgagaatcatcaccacgatgattataacttttcaccttggtagcaaccagtgcaacaattgtcactggaaattttttctttgggacacatgaaccaggtagacattgattcattccatgttcatcaacactgacaaaataaaaagcatcaattgtatagaattctgaatacgaaaggaaaggggctttcaaaatgaaatttgtgaacgtagtggagttgttttcttacattaatttcagtccttccttttctctattgagaagagcttgtggaattgaatcattaaaattgttcttgctcaaatttctagtgaaggagaaaaaaatttcatacattggtgaaagtgaacacatggagtattgggaccaaaagtatcaaaacacttacatgatcaacaatgatttcatattagctagaaattctgggattgctcccgtcaaactattatttgacaagtccctgaaatttcgatattttggagatcaaaattcattgaataagagtttcatcttcgtgggaaaaatgatcatacttacaacttttctagatgggtaagattttgaattacaactgatatgcttccggttaacccgcttgaagacaagtccctatataaacatcatagcacaaaaaaagtaataatgcagttagaaaacgtttcttattatatgaaaaggttttcttaaacgtttcttattatatgaaaaggttttctcacaaggaagtgattcttggaggtgtagacgtctccatgctgttgcaatttaaaccgttccacaaaaattgttgaggaacacatggatctccttgccatgtgactcgagtcaatccatagatggccttgatgttttttatagccaccactatcataaaattcgacaatgtttgaaaatatgttagatttagcatttaagattagttatggtaaaacatattttcaaacgttgtaagattattgctaacgtaccatcactagcatctgtttccggctgaggaaattcaaccactgtgaaaacttcaacggcgttaagcaaaggcgggagagttgacctctcagttttgatcatctctagtatgcattctcctctttcacaagtaactggagatgggttgcgtatagtcttggtctgtagatatacaggactataagcattgtacacaagctttttattccaaaaaatttcaaactctctagtttcgttggcctttaagacttgaatctcagagaagtggaggaacaagtatagtttatcacttgggagatctagtacttcgggaatagccaatggtgcactagcattggcaggagatgcggcagtcaagagtgccttttgtggtggcagaaatccactagagctgttcactccaagtgtagtggaaatcttcttccactccggctcaaagtatgaaccccatatacgatcatagacatcatccggatatctacatttggtacaattttgaattagtagccataaaagatgcttagagcttgtaaccgcaattttcaatagttaaaacatttacaaaatatatatgctaagagcaatgtcctagtccgaaaaacgcgtttctttaagatgagttaccgtatgacatcatttgagtcgcttagataaacccgaacataagtcttcaaccaaccagattgagtgatgtaagtagcatttgcaagaggccttaacaccaaggatgatatcaatggtgtggacggccctgtcttgacaagacaaacgtccaacatattagattttggtatgtagatgatctcctcccatgtaccatt

SEQ ID NO: 21081 - DNA, 1520 bp, Arabidopsis thaliana landsberg
  unsure (1)..(1520): unsure at all n locations
taacagagaaggagagaaaagatcaacgagaagattaagactcttcaacaactcattcctcgctgcagcaaggtctggcaaaatttcttatattcctcgttgttttattgaactgaaggttgaatctgattctgtttctactctgatcagtctactaaagtttcaacnnnnnnnnnnnnnnnnnnnnnnnnnnnnnnnntacagagccaaatacaagtatgctcttcaaaacagaatgtgttttaaaccaatggttcaacatggaaagagttcatatgtatctagttttgttgaggttactagagttatttttggtctctatcaaccagcgtctccgcagagtttgaatgtttgatgtccgcagattcatcttcttggaagggttataaagtttcttgggagataaatgcaaatcttataagtctctacttcgaaacactggtacctcctttagatgggatggcctaatagctaattcctcttattatgcactgttcttgaggtcttactcttctgttttgcttcccagtttacaggaggattatgtataatatattaatatctgaatcgatattgttatgtcagatgatgtcgacgggacagggtatgatgtcgccaatgatgaatgccgggaatacgcaacagttcatgccccatatggccatggatatgaaccgacctcctccattcatacctttccccggcacatcttttcctatgccggctcaaatggcaggtgtaggtccatcatatccagcaccgcgctacccttttcccaacattcagacctttgacccatccagagtccgtttaccaagcccgcagcctaacccggtgtcgaaccagcctcagtttccggcttacatgaatccctatagccaatttgctggtccccaccagttgcaacaacctcctcctcctccatttcaggtaactctttaccatggtatccattgtgttgttgcaggtaatccttatgtatgatgatgctcacaagatccttttttaaatattctcttagggtcaaacaacatcacaactgagttccgggcaggcaagtagtagcaaggaacctgaggatcaggagaaccaaccaacagcttagtaagaatcagggaatgaagggtttccttgggatgtaagttaatggtcaagatactgacagatgcatctccattgtgtcgttgcaggttaaagtgtggagctgaaacggatcagttcttcaagcaaattacaactttgaagataaaccagagttgtaacatgtagattttgtctgttaagtttaatgtaagtactttttagttaatgggaaagatactgacaggttgcaaggtggtcagtatttgtgcatcacgcttaagattcctcgatgtggccagtatctcccttttctagcatgtgaggtccctactctctggttctacggagaccaaatgttcgactgattaaacacacaatgacttaccaaaagtacacgcggcccatcctcgtctttatgttccaagtgcgactgtttg

SEQ ID NO: 21082 - DNA, 1665 bp, Arabidopsis thaliana landsberg
gctactcaaattggttgtgtgtgttaataacatctatagttttatctgcagtattgaatagcataaactcggatttgagtagctttagttagggaatctttgctggttaatctgatattcatttgttggtgttatgaaggcttaggctttaactcaacttctatgtaatccatttgtggtggtgatagtacccaaaactaaggctatattggctgtgtctgttaataacatatattgacatctaagctttgtatattttgtatttgtgtaagtagaagcatcacaaaagtgatacgtgtacatttgtatttcagtgtatttgttcgatggggaatgtgcagttgccaaagcgtttgtttcggctaggttctcaacctgagggccgaaagaggataaacaactcctttactcttaggtggattgagatcatcaagactgctttagatcaaacccatttgaagcagttgaagggttcgcagtttggaagtcagttgcaaatggggacgcatcagttttctgtaatgttcttacattacattctatctaggcagttggtgacagataagaagtacgaaatgcggtgggtgtttgcagggaagccaattcgatttgccattgatgattttgcacttgtaaccgggcttaactgcagcaaatctggattcaacaaaaaggatgcaaggacaagagggaagatgaaagcggtttagaatccgacgaggttctacaaggcactatttgagaaagagagaaagtctacttcacaatggattgttgggaagctatctatggggaagaaatacaaagacccgttgactcgattttgcctatcgttgctgctactagttgatgggattctttgcccgacatatgcgcgaactatcatcgatcctgaccatgtagagatggtaaaagatgtagaatcctttcttaaatatccttggggtagaacttcgtttctcgcgactattcgaagtgccaagcaaagaacagcaaaggagcttgcacaagataccacagctatacaagggttccctcatgccttagttcttgtgacagtggcatgttgtccagctattatatacacggcagactcgatgtttaacattctagaccaaaccattccagtcgagaagctggttcagtatgtattggggctgagtttgaacatcaatgttcatgatgcacgaactatcgaccaaagtggcatggtaattctattgttgtatagcttgttctttgtatttggtgttaaaagcttgtgtacttgacttacctattctattgactcttaatttttaggaccgggtaacctcactgctgaatgaagagctctggcgaaagagatcgacttatctttctcagatgaggaggaggatgaaaaagtttcgcatctgctatcattgataatggaggaacacccattcgagcataacagttggagtggtggtgttgatgctactgatgttgaacatccatctgaagatgagttcatggctgatgaatgtgtaaatcaggctaagggggatggtgacgatgagatggatgttgatggtgctagtgttgctgcggaagagagggaagagtgtgcagccggaaaaggtgtagacggattggatggtgaggtgaataaggatggaccggtgatagataaagatggtgtca

SEQ ID NO: 21083 - DNA, 507 bp, Arabidopsis thaliana landsberg
cttgttgattcgcaatttctattatgttagctctcggcaatggtgattgattctgggactgttttaacttgagggtctctattgtttagacacttagatttggttatcgaacttgttgtctagggataatttattgagcatgtcaatcacttgaaaactgaggaaacaaaactactcaattaccccatcctcgagaatttctcatctaattgatttcttgtttactttgctattgtttactgcattttgttacctgttgcttagttttgcaacttttgcctgttactcgacctgatactcgaccacccagttgtctggtaagagactgtgcagtcgagtatccctgttacattttctgtctgttactcgtccagtcactcaaccacacccagtacttggcaacgagctgtgttggtcgagtgttttactgtttctttttgaatttctatttcctgcatgttcacttaggactgctagaacccaaaacctgttatagtttggcttgat

SEQ ID NO: 21084 - DNA, 1043 bp, Arabidopsis thaliana landsberg
agggaatttagtaagggcacttacggtacgcaactggaaaagcaacaggtcttagtgtccgtttaaacccacctgagcaaccaaacatgttattcgccagcttacctatcaccgatacgctcaggctgtcgccagagtcagtatcatccattaggtcttcgctgcagaaagaaacgctcgttgatatcgaagttggcatcccgaaggttgaatcacttgaagacaatgcgactatttgtgggccaacagcttgcgattctgcccctacaagggtcaaatgcaaattttcaatttcaatgtcgtttgcatgatatgtacttccgaagtctagtgctctcgctgtcttctctttatcgcatccgtttgtttcactcggttgactcccttttagcgacatttctcttgaacacatttcacgcaacattgcttcttgttgatttgttctccacacctcgaataaacgatctttttctctctcatcgtcatttataaccttctctttgcctttcaaacttgtaattgcccctggttgtggtactttcgatggcgtctcgctagtctccgctgcaatctccgtgttttcccttatgatgacacctccatacgggttgtgttattcaatctctttacgtatgccgacgtcgttggtgtcccccatggttgctatatcttgaccgtctcctgaaatctaaatattattaacagatatccaacttatttgataacttaaatattatcattaacgtggttttgaggtttacccgagaggttacgcagcagcattctggttaacgcggtaccccatacagctcttgtttctgcacaatttcagtatttatccgatatttctttcgaactcaaaccgcttagatccatgttactgcggtaactattaatgtttcgaacatttccacctcgtataatcttcactagcagatgcacttcatccagataccccctaatagccacgaacagtgtagaatcttagtcatccaatatgtcaattgggttcgctcgtttccagtcaggtccgagcaacccct

SEQ ID NO: 21085 - DNA, 543 bp, Arabidopsis thaliana landsberg
  unsure (1)..(543): unsure at all n locations
tttttttttccttcaatttttttatactttgttgtttgcatatttttttatgttaaaaaaaaaattatttttctttagattttgagaatcacattcaagaatttgaagttatgattaacaattttggttatcgaaatagaattgatatcaatatcctactcgattattcgggtgaaaataaagcatgtttagaagtttatagtttaaaagaaattatagcttttgtttgtaatgttggtaaagaagttgaagacgataatgtggaatttttggaaatagtgacacgtaaggaagcaattatcgcatctacaatttttcacaatttttggatgtagatcgagaagacaacaccaagagtttttgatgtaataagaaaaattagagatgaacttcaacgagattcgaacttttagaaaagacaaacaacattagacttattttatattagattatttagaatgtatgcttaagatttatgatatattngagatcatatttttcatagagattaaaaaatatatatatatatatatatatatttat

SEQ ID NO: 21086 - DNA, 530 bp, Arabidopsis thaliana landsberg
  unsure (1)..(530): unsure at all n locations
atgaaatctaaaatgaaaacatcagatagagagaaataaatgagtcaaaataacaagcatcattatacttaaacacattatagagtagacataacatgttatctatataaaatatatgaaccaactataaataacatgcaaaatatgaacaaacctcttgtttttaaataaaaaccctagacggacgaagcagaatccaaagagtctgaggaaattcccagatctcgccttatctaacttcatgtagagagattaagaaaaaattgaaggttagtagagaataaataaaaaaagaattaaaacttagatctggacacaaccagtaagaaccctatgcaagatacttatggaagtatacatgggaagaaatagaagaagatatagatagagggaaaaagaaccgaactttagatctggccacaatcgttaatttctatgcaattgaagtataaaggggaagaaatagaagaagatcggcgataaataaacgaaaatcatggnaacgtaagacgttcaaaatcctcgatatc

SEQ ID NO: 21087 - DNA, 1558 bp, Arabidopsis thaliana landsberg
  unsure (1)..(1558): unsure at all n locations
tccagggataatagctttccgaaaagcttgaatgatgagctgtgctaattccgcttggagctcaaatatcctctgcccttctttgtagctgctgccaaatgcagtacgggagatcacatctgcagtcatactcacaagccaaggccaaatatccacctcacaggatgactgtttatccgtcactaacttgtcccattcgccaacaatctcgctgcagctctggtggaacgcaggtaccatattctgtacataaaaccagaggacacaaattggttcagaaccaaatgggcatacatacataaagctaaactgggactacggaaaagaaagcttttaaactttgatcttctcaaggtggaaagccgggttgatgattcttcggtgttttgtccatttatcaccatcataactaacgagtccagccgctattaatctgcccagaggaaacgtatgtgccttctggaaatcataaactttgttgaacacttctttgatttgctcaggatccattatggtgattgttggtatgggtccaaaccatgtaaagaaagtcctccctgtttcaaccacataatagcaatacaaaagttgaaacctgttctctacatcagatactctgcaacagttctaaacttctaaacagtgaagagagataccataacaggaagcataccgtaagtcttgaacatttgcaagggataaggcacgacacgaggtgagatgtcatccgttagtttgaggggtttggaccttgcctccgacaacatgctgaaattcttcttcaaatcgccgactagaggcgtgtaaggtgttccggcaagaccttgtcttctcaggtaatgctcaagcatctttggcttaaaccaaacccactgtaaagttctccatatccaccatgacacaacagctagaactactgatattgttaccgatgcaaccgatatctccatttttcctcccagagaagagagagatagaggtagagaatttgctaaaaattttcggggaataaaaggttgaaaacttgtggaaaagatatggatgtggtgatgacatcaccgatgatgtcttatatactttatagtgtttgtgttgatataattcttttgaagtaatcgatattttgcgtgccacgaaggcgcaagaaccaaatttggacttctgtaaaaaaaagtagacaaaataggagatatattaatattggttatgtgactctcataagtcataacttgactggcgggcaagggacgaacgtcttcaactttgtgacgtgtctttgtcatttaccaccaccatccaatcaatgggttttttggtacctaaacattgaacttgaagtattttgttttgtcgacataaaataaaaagtaaactttaaatctctctgttccctttggttttgttctggatttcttcaacgggttgttataatattttacttcaataaaaaaaaaagttacatatctctctgttccctttgtttttgttctgtatctctggaagagttntatttagtttcttctgttgggagactgtattattcatttcgatcatttct

SEQ ID NO: 21088 - DNA, 1307 bp, Arabidopsis thaliana landsberg
  unsure (1)..(1307): unsure at all n locations
agctttcccccttattccaaggtaatttatttatataatgtcactatttattgagattgactagcatataaaatcttctattaatatatataggattgcattggagccattgatggaacacacatttttgcaatggtaccaacatgtgatgcagctagttttcgtaatcagaaagggttcatatcacaaaatgttctagctgcttgcaactttgatctacaatttatatacgtccttagtggatgggaaggttcagcacatgattcaaaagtacttaatgatgctttaacaaggaacactaataggctacaagttctagaaggtatttattttctatgtatccataagttcttctatattttatttaagaagaataatttatcttgtatttttttttatttataggaaaattttatctagttgattgtggatatgcaaatcgccgcaagttcttagctccatttcggcgtactcgttatcatcttcaagattttagaggtcaaggccgctatccaaaaatccagaatgagctgttcaatctacgtcatgcttctttgaggaatgtcatcgaaagaatctttggtattttcaaatctcgttttctgatttttaaatcagcacctccatatccatatccttttaaggttattcactaattttcttcgtcaagaatgtcgatcagatgagtttccttctgaaacaagtattaatgaagagaatagcgatgacaatgaagaaaacaactatgacgaaaatggagatgttggaattctggaatcccaacaaagagaatatgctaacaattgtagagacacaatatctcataatatgtggatggatgctacaggagcttgatgactgtttttttgtgacgaaacagtttttcattaccgtttaggattcttgagtttttaattaccattacagtttttaataaaagcttctcttttgttttgtgtggcgtttgctttttaggaggtaggagataataatcatgatactttttaggtgtacgagtatgttgtgtgtttgatgtggaataataatcattttacaaaactttcaaaatatcaaggtcgcatctattattttggaagagtctttatacgaagaaaaagttttaaactcaataaaccaataacactatactttaatagagtcataaagtttgttaaattcattttatttgaataacacatgactttgattaaatttttaaaatctttaacccaataacgcatgacttgtaatgattataaaaacaatttntaaaataccaaacccataacacaagactttaacaaagt

SEQ ID NO: 21089 - DNA, 151 bp, Arabidopsis thaliana landsberg
atatttactaataatatctcgacggattatttggcgggtgtggaagtcttcattgaatttgcaagctctcatgttcaagacaaaaaatgtcggttttattgtccttgtgtaggttgtcaaaattctaaacgcatgaaagttgtcaccattt

SEQ ID NO: 21090 - DNA, 403 bp, Arabidopsis thaliana landsberg
ctggagactggtctgaaacttcatcttggtttggcttagacgtttttgcttcctcgtagacgtttttggtgagaattttcttgtataatatgcaccaaagcaccaaagacgtttttggttttaatactacattctttgtataatatgcaccaaaacatagtaataatcattcgcttggccctagacttcttcgccactgcacgagagagttgtttcaccgcttctttggccaaatggcgaggtttgctaagacacagttctgcatctaccaccagtgttagtccactcacatatttccctgttaaacaaatcaagcaatgagattcgtcatctaaccatctatatctatatatattgcatactagagagtgtgctttatttaactcagcataccagaatcaca

SEQ ID NO: 21091 - DNA, 1430 bp, Arabidopsis thaliana landsberg
cttctattatctgacattgtctaatcgtttcccaaaggtgagacgttcggtggaacagggtgcccatacacacaagacaagtagaagctcttattattataagttacataggagtcaatgagtctttcatcctgagaaagcaaggacaaagaaacattgtttttccacataagagctaagccaccactccttccaatggggggctgtgttattacattagggaaacctagatcatacgctagtttacgtaaaacatcacattggttaagagtttcaactagaaagaggatatcatacttataaatgcgaaataaacggaaaagccgggactgagtcagcggcacaccaatgccctgacaattccatgagagtgtcctcatattggatcccttgggggtatcgggccccccgcgcctccgtctatgacattgtggatcgaacatgatcccgccgattcggccttcctctccttcttacagagatggctcaggaccgccatctcatctgttgcctccacttgttgaaacatgtcttcaaaatggactcgcttacgctacatgaggataaccgggttctgtgcattgtcagatgattccaagagaagatcattggtaaccagtgtctgagttctcacccttgctagtttagcatgaagataacggagccttccaacagtaagatccgtgtcctcgaaaacgcttgggacagcgaaggccgtagtgtgggtagtggtctgaccctggtttgcatttgggagagggttgttaagacccggaatgagagtcgctgggtctattgtctgaagcgtatctgtgtcactcatgttgttgtctttgttatccatctgattgtcatcatcctcattgtcatcatcactcggttccgaagggtcttcatcatcaaaggcaagaacacactccttcacatcatgtttcagagatccacacttggaacagaagttcctcagacgctcgaaacggtacttaatcacagtgttttcatcaacagcaaactggaaattcctttgaaatctaagcggatcatctaaattccagtcaattttcactcttacaaagccaccatggttcgaattctcatcgaaatcaacttcagacacaaatcctagacgattaccaacacatcttgccattgcattcgtaagaaagagaagtggaatacccgtgatttgaacccagaacggtatgattttcatttcggcttcggtgatatttggataccatctgtgaaccgagagcatccaatcattaaacgaccaaggtccacgtcggagtaccaaattcattgcttcttcagtctggaatttgaattgaactttgcctttgtccagaattcgcccaacacacgagtctgggaagccccaaactcttggcatctgtccaattaaggcacgaagattctgctgagaggat

SEQ ID NO: 21092 - DNA, 469 bp, Arabidopsis thaliana landsberg
gcagctacgttgtaatttgtaggttatttgattcacaaattctttatgcatgtcctggattagaagaaaaagagtatgaaacttacaaagatcgtgattttgctggatagttaaaatactatgtaagtattataatatttcgaaaattcgataacttatttacttttaaaaaatgataaatttaatattttctatgtgtaggttacaaacggatgtggaaacgaaccattaccacttttgttgcatgagctcgttcaagaaccaagatctaagatcacaacaacttcgatgtacttcactcgcggctatactttccatacgtatccatatggaagtcgaagggcaactgcaaaatattgaatccatgtcgaaggtgaaactgagttttatgggattctactgaaaattctagaagtcggatatccaggacttttgaatttgaaatgcgttccttttaagtgtgattggt

SEQ ID NO: 21093 - DNA, 491 bp, Arabidopsis thaliana landsberg
catgtttgataaacagaacctctcacagaattacacaaatcagtcgaccaccagtggctcatgccatgtttaggatgtggtcgagtaacaggcaaaaaataaaacaactatactcgactgcacattctattaccaaacactgggtgtggtcgtgtaagtgtgtgataacatgtaagaaacgcgaaaactaagcaacaagcaatgagaacgattaagcgatagcgatgaaacagagaaatcaaatagacgagaaattccgaagaatggggaaatcaaatggaatggtatcctagcctattgggatggataacaagcgcaatcaagctatccctagacaacaggttcaacaacagaataattcactcctgtgatagaaatcctcaagtaaagctagccaagactaattcctattaacggaatctaactatgtgggcaataagaaccgactgataaagtcaataaatactctgaacggccaatcccttaagata

SEQ ID NO: 21094 - DNA, 765 bp, Arabidopsis thaliana landsberg
  unsure (1)..(765): unsure at all n locations
tatggcggttcccaggttttgagacggtaattaccattagagactaaagaagctgaatgcagatatttaatttggttcataccattagaggttgtctatcaaaatggttgagtcagtctataagactttaaaatggcattaccagtgtcactcccaagtaacttttccattcccgaattttagtgttttatgtggacaaaactcacttggaaacatgaatcttgatctcttacttgttctttcataggtactggacttgcttgaagatgcttgtgagtctttgctggatagtgtcactgtgcaaagttgatgatactacaagtacaaagtcccaatcctagaacctttgttgtttttgcacatagaactgaaaagttctcttattatatttaagtgtcatcagtgatgacaatagagtgagaactgatgtgaagcttggatcttgatcttggtggtgttttccttgaaaaaacctttgttaaatgatctactgatggatcattattnnnnnnnnnnnnnnnnnnnnnnnnnnnnnnnnnnnnnnnnnnnnnnnnntcctgattcttaagaatcatagagagtggcactctttacacgcttgaataatacgaattcttttgttcgatcattattattaggaaagaaatagattttaaaaaaaaagaatgtgtggacgtgaagtgttgttgtttgaaataataacagaatattttctcttattggcttccgagaaattaagtgaatggtggtggagcataataagga

SEQ ID NO: 21095 - DNA, 717 bp, Arabidopsis thaliana landsberg
taaatagttaaaaccaatactaaaaagttaatcaattatttattgaaagttgaaaacatcatctatttaaaaaccaaatattacaaatgtttagttttgtagtgtacaaaaaacttctaccactaacaacaaattagtgtaatataaaatataaatataattattatattttaaaagtaacaaaaaatgtttcagtatatattagttacattttattacacatttaagtatattaattacaccatgcaacacgttggacttttgctagtaacagtataaactaaaaagatagatttgagtgtaaattagtttttttcgtttgggaaatatggtagatttaaaaaaaagggatgaaagaagtggtagaatgtgaaaatgtggtatatatcatagttttcatagtatatggacaaatggactaatcatccaatcattgaaatcaaactatttctaatcagataagtaattagacaaaagcaaattgacaaaatccattcctatttaataataataataatattttagttgcatctaattatctaaagatggcagaggtgcctgcccgcaacaattggctgccttagatcattttttttttctgatccaaaacgtatcacatatggctttgctatgattccaaatcaaaatctaaacaaattcttggaaatagttcttagtagctcagtatttgggttacatgacacatccactcctttt

SEQ ID NO: 21096 - DNA, 480 bp, Arabidopsis thaliana landsberg
gttccttttgtgggcgtgagtgtgctgaaagatcttggagccttgtccaaaaactccttcaagattgcaacagagcatttcatggccgccaaatgcaaaggtgtgataccatctctattgaccctctctgcaagtatttcatcaagacctagcagcatctttactatatcaagattacccacattgcatgcataatgcaacggtgtagaaaattctccatcaacatgccacgctagatttgggaacttttctagcaatctccttgatagatctgatcatccgtccacacacaaacataccagagtgagttaagtcgatttgaaatactaacacaatatttcaaatggacaaaatattaggttgtatttgtggactagctagtgttgaacatcagtctgattatagaagtactaactaggagaattttgtaacttaattaattgataaacctaatttcacttccgtttaccatctactctc

SEQ ID NO: 21097 - DNA, 465 bp, Arabidopsis thaliana landsberg
tttctattttagagaaatacattagagtaaaatcaactcaatttcctctaaaataaaagaaaaattaaggtgtgcattagagatggtctaaatttctaattatgttaaacaataagaccattaatttgatatgttttatcaagattaaaacatatttagaggcggccatcacatgaaagacttaaatttagctttgacttcaaatgattatataatcatcattattgaccctttaatttgatattagttaattttatgtcaagtttgctttgttttttggcctttaacttttggtggtatttatgtggcaatacttgcatgatgagctctttttctaaagtatccgatgatggacgcaacatgataaagaatctcttacgtaatagtagtacgagtaatttattaatcatgtattgattgtttaatcgtcttcaacgttcgataatgattaactagtcaaccatg

SEQ ID NO: 21098 - DNA, 455 bp, Arabidopsis thaliana landsberg
cttataggacagccttcaggacccccattggtacaactcctttcaatcttctctatggtaaattatgtcacctacctgttgagctcgagtacaaagccatgtgggcggtaaaacatctgaattttgacataaaaaccgctgaggagaagtggttgatccaactcagtgaccttgatgagatccgtttagaagcttatgaagagctctaaaatttacaaggaaagaactaagcttttccatgacaagaagatcatcaccaaggatttcctggttggtgatcaggtgctgctatccaactctcgcttgagactctttccaggaaagcttaagtctagatggtctgatcccttctgtgtcactgaagtccgtccttatggaacagtcactctaactggtaagagtggagatttcacagtaaatggtcaaaggcttaagaaatacttataagatcaaat

SEQ ID NO: 21099 - DNA, 432 bp, Arabidopsis thaliana landsberg
ggtgggttcagagggtggttgagaggagcttatagttacagctcatgatcgattttatcagatttatcttgtctatgttgatctcaagatgaaacgttcaagggaagtttggctcggagggatcagatgctcagatcgatcatctttagtgcttactttcacggattacgttgaaagtattatgttattgtcataagaacaagaagagtgatgatcttgcatgatcacatgagttaatggattcttctttcgtataatgtttgtcagttttttttttaaaatataaatgttggctcgtcttgtccaagagaatcctttgtaataattttaatgtaataataatacatgctcatctcctcgtcttgtttcttcttcaccgcatgagtattaaataatatgagcagaagttgttagttgtaataacggcgagta

SEQ ID NO: 21100 - DNA, 449 bp, Arabidopsis thaliana landsberg
gaggagcacatcgagtttgagcaacatattgatcaaccggagcaagggactagtttacaagagcaagctcattatgaagaaggtgctaagcaagagggagatgagattgctgaagttcacaagaagcttggtgtgcttgaagagcttggaaacctttacaacaagacaatgaagggtttcaaaaagaagatgagaacaatgaagaagtagctgaacagtatggctgctcaactgcaaggagagctgaaaggatcgatcaaccccgagcttcatcttttgagcctcgggaagtgatctccgagctgagagagccaaggagtaggcagagacgagcttccacacgctcgaccggacagagcgagcaaaaccctcccgcctcaacttcagcccccgcctatacccaagagagtatggatgactatgtctccatctacttcacctgatcactg

SEQ ID NO: 21101 - DNA, 3679 bp, Arabidopsis thaliana landsberg
aaaaaccctacaaaaattcccaatcagaataacgtatatacccatttctaaacaattatattcatttaagaaaaataaatactctttgaaacttctaatcattccaactagaatattacataatgtaaatatttatttttatatatatatgacacatattcaccaccaaaatagtttaatctttgtaaccaccgtaagagtatctagaaaagtaagtctctcttctcaataacttttactttatttttttggaatcataaacttcaacttattaacgacaacaactaatggtaaataagaataaactaatatcatatctttcatttgtcagattcaaagatcaaaatcacgtacgatcattatggcaacaacacaatcaacaactacagtagcacctcttcaatccatcgctgtagacaagcttacaatcggatcatctatgcagcatataactgtccgcctcttaagaatgtgggaagctcgcaatttcaaaagaaacggagagctaatgagtttagatcttcttctcctagattcaaaggtatattatgcttaatttgacatcatacgataagttatttataagccaaatattcacaaatcattcaccaccccaaaacatccaggattctggaatacaagcttcaatatctaagtaaaactcatttattaacatgtaatttattttttcctttcatgtttgacctctcttgctattgcaagaaatttttaattataataaaatctaactcttatattacctatcattgcatatagtaggttcaaaatattgttaaaattgttaaccatccatcaataaaataatatatatggggtaagaaatcaaaatatgaacaaattaagtagcaaatattagaaaaataatagttattttaaaatacaattttacaaaataacaaagaggagagcaaaacgaatgttaaaaacaaaatcaaatttattaaaatatgcacgagtaagctaaatgatgtttttctataatcctttacaacttactaatactaaacaaaaagtatatataatacacctacaaattaggctcaaataaaaagaagtggctaaactatggattaaatgcggtacagttcaaatactaacaaaaatatatacatacacatatatatatatatatatatatgtaatttcgttagttactattcaaagcaccggactatgcggtttcatcaacacactcaaagcttttacctatgagtaaaaattaacaaacaatatgcagtgcttaataaaaaatatatagttttcatccttcgtaatacaatctttcttataaaataacatttgtagaaaagaatgataaactaaatatattataaaaaaaaaacaaaaaaaaacaacaacaaaatcctgcgcgtagcgcggacactcacctaatattaatgaaacaaaccctcaagtatatgtaaatccattttaaaaccctcaattatataattaatgaaaaaattccttaactaaaagatttaagtgacaaaaacccttaagtattaattaatttttttttacttttgtgcaacatcttcaatatctaaattaataataaatgaagataaacttggagaatcctgtataacgaaatcagaaaaagaattttccgacttttaaagatatatacctgaaactgcatagatttgaaatttttctaacggggatgacactatctttaaaccttcaaagtttttaataatattccaatacatgatcaaatttccaaccatatttgaaatttagatcttgcatatatattagcatttctttcccttgattgaactggatacagttttaagaaaaatataaataaataatgatgcttgcatgtagtttatatagaatactcactacatcatcacttgaagcaccacttgaatgtttattgtcacattatttgatctatgcatgttgttttcttgtggctttctttttatttggtagggaattgatctatacagaagttttcgtttgttttaagacttaaaactatggttaaccaattaacctttttttttttgtaagaggggagacaactgacaatatattactcaaaactatgttaaaccaattaaccttagcaaatggaagttgcagaagataaattagataataattagcatagacttagagaggttgacctcattaaaccttatcctctctacacacacacatatatatatatatatatattatgcggatatgccctagttgctataaaactcggatgttaattagaatatttatttctacaagttatcttaatcttagaataataaacaccaaagcgcgtctaaatacttttatttcctaaactttgaatcccaaatgtcaaagtctcctatacagatgtcaaaccttataattagcgaaatagcataatacaatgacaacttgattaatataatcaataaaacgaaacgcatactcattaaacctacaattataatgaagtcctcttgcagtttttggtatataaagttccacacccttctgcctcaaaacaaccaaaaccaaacacaaatcaataacatactaaatggcttcaagaaaaccaaaggccaaaccggttaatcgccaatctgtgaggcacccaagtcacaaccatccgctgcgtgtctttaaagccaaagaagaggatgagaccgcatgctctggctgcgagctagagctgaccgggcaagctttcaaatgtataaagtcagagtgcgattacttcttacacaagtcatgtttcgaccttcctagtgagaccaataacaagtctcaccaggaccaccctctgaccttgcttcattccccaccagatgatcggtctgtctacacgtgtgacgcgtgtgaccaatacggatctggattttattaccattgctcaaactggaactacagtcttcatgtgggatgtgcgtttatccctggaaccgtatatcgtgaagatcatgaacatccactcactcttctttattgcacaccgtgtaaaggacgtgaagacacgtacttcacttgcagcgtttgtgatgaaactatttcagaagatctatggatgtattactgtaaggattgtgactatggaacacatctacactcatgtgcggcatatgaagaccaagggaaagaagaagaagatgaagacgaagaaggagaagcgagttctccagcttctaggataaagtcgttgatgaaggcgcaagacgagatggcggctatgcagctagaggcacgtattgagaatgatgcgaggaatgctgcacttgatctgtgggatgaaccaaaacgtagatactattggtgatcaagaagggaggaatatatttatgaatattggtatttttctttgcgaaatatggtttccaaaaataaagaaacaatagatatattactctttcttgtttggttcttgtttatttgtgtggatttaatcataaacactcgtgtgtaagttgtttattttgcaatatgaagaagaagaaaaaatttaaattgatttgaagatttgttttctttcattttctctatcgtaactcggaaggtttaggtaaatatgtaacataatcaaacatattggaaccttatttatctaaaaatggaacggtgattaaaaattttgaccctttaaaaaactttcaaaaccgtatttgatataataaaatag

SEQ ID NO: 21102 - DNA, 1954 bp, Arabidopsis thaliana landsberg
ataaatgaagttggacccaatcttttcttctcaatattctccttgtaagttttactttagtgccataaccatgtaaaaggtataattcaattggatggcaaaagctaaagcaaatattctcagtttgtggctcttcttctatctctgcttttgtatgagaatcaaaatgatcacatatttgatttcaatttgccaaagagtgaaatttttgagactgtaatgaagttttgaactagttggcctttgtcattttagattcctatgtcctaatgatgttctagattttattctcgataacaatttttgctagtgggcagaatatgacacatatgggaagtgcttgaattgtggcaagtatggtcatttaataagccgttgtctcatcccttgcagaagaaacttccctttaaaaaagactatccctccggggctaatgaagtggctctctctgttgttaaccttccttcaggtgctgggatttcagaaactagtgtcattggttcagcttcagctaatccacctgagctcccttggtccaaaccaaaaagaaggcgttcgagatcaaagaagcgctctctcagttctccacctcggattgttgacccgttgattcccatttctcagcaggtccctctattgcccaagccttcggctagtaagaaatgggttgtgagaccaggtttgaattcgccagttcctactgttgtcattggtgcagattctggaatttctcaacctcctactctccctaaaaaatctatgagagagtctatcaaagatccggatccaaacttccctcttcccctgggctgggcagtgatgtctactaaggcaaaaaagaaagaacttaagaagtggcacaaccgtattcgtccccccgtgacagagcttcaaggtttcgtcgatggcagggccggtgacggtccttcttctcattgaaagctttgctttcaccttcaccttttgttgtgaatatgaaggtcttttgttggaatattagaggcttaaatagccgtaatcgtcaacgagttgtgcgaagctggattgcttctaataatcttcttgtgggatgttttttggaaactcatgtggcacaagagaatgcaaactcggttttggcctcaacccttccgggttggaggatggatagcaactattgttgctctgaacttgggaggatatggatagtctgggatccttccatttcagttttggtgtttaagagaacggatcagattatgttttgcagcattaagattccttctcttcttcaatcttttgcggttgcttttgtttatggcaggaattctgagttagatagaagatctctgtgggaagacattctcgtgctgtccaggacttctcctctttctgttactccctggcttttgttgggagattttaatcagatagccgctgcttcggaacattattctatcaatcaatccttattgaacctgcgtggtatggaggatcttcaatgttgtttgagagacagtcagctttcagacctgccttctcgaggtgtgtttttcacttggtcaaatcatcaacaggacaatcccatccttcggaagcttgacagggccttagctaatggtgagtggttcgcggtctttccctctgctcttgcggtctttgatcctccaggtgactctgatcatgccccttgtatcatcttaatcgataatcagcctcctccttctaagaagtcctttaagtatttctccttcttgtcttctcatccttcttatttggcggctttgtctactgcttgggaggagaatactttggttgggtctcacatgttttctttgaggcagcatttaaaagttgctaagctgtgttgcaggactcttaacaggctccgtttcagcaatattcaacaaaggacagcccaatctctaactcggcttgaggacattcaagtggaactcctcacgtcaccttctga

SEQ ID NO: 21103 - DNA, 558 bp, Arabidopsis thaliana landsberg
cacacaattggtgtctcttgcttcgcttacaaggctttaagagtaagaatgagagaaagaagaaagccaaccaagcaacaagagcaacaaaagaacacaagccgatcttctcacaagtcctaaaaactagagttgaattgtggactttgatttgactggaggctttgaattgtgtcttggagtgttgtgtattgctattgtattgaatgaggagtagtgaatgcttggatgccttgaacagtggtggttgggggtatttatagccccaaccagcaaaacaaccgttggggagggctgctgtcgatgggcgcaccggacagtccagtgcgccaccggacactgtccggtgcgccacctacgtcacccaactgttagggttctgacggtttcgattgttggagctctgacatcttgggccatcggacagtctggtgttgcacaggcagtcactgttcactgtccggtgcgccttctggcgtagctctgactctacgcgaactgttcggcactgtacacgttgcaggcgaccgttggagtcgacgttgcgcttgggagcag

SEQ ID NO: 21104 - DNA, 1394 bp, Arabidopsis thaliana landsberg
  unsure (1)..(1394): unsure at all n locations
atttataaaaatattaactaaaaagatttattgcatttttttttactacaactattttaattaaataaaaagcaaaggaaatattttgacaaaaagataaaagaaataagcaaaacataagcaaaatttcatttgtttttaatatattagacataaatctatttattttatataattaattggatgatcatgagttaattaacgtgtaaaattgtttgtttccaaaactttcaatttgtatagcaaacactttgacaaatagaaaattctatattagtacaccgtaatacacattcaataaattttaatcaacgaatgcatgaattctcctaaacctatttatcaatgaattaatttgtttatcagtgtttcacacagatcatgatatgaaaccaattcttccctagtttctaattacatccgactcgtaacacgagttatcaaaattgagttgcaataaatgttagaatttgatgtaacttgcagtaaaaattatgtggtataactgcagattgaagtaatgaatttgctgtagaaatatgagttaacatttttcataaaatgtttgactggtaacatttatgatgtattagtagcagtatatattattaattttttaataataataagcttatatttataaatttaataaataaaaatagtttaaataaaatgatactatcttaaataaatntaaaaattattttgtaacataatataaaaatgtgcttatatttgataatgagctttacgtacctatacataattttgtgaatgattccacaaatatataaaaatgaaaatccataaatttaactagtagttataataaaaacattttattttgaaaagtcaaatagaaataaaaattaaggaaaataattgaccaagttgttggcttactagttaggattgcttagcatcattattagaattggaaacaaataaaaagtttaaaaaagaaaaaagaaaaaacaaaatcagtcgtgggtaggaagaaaaaaaatgaataactcaactctaactcatgagattttccatgatgttgaataatgttttgagttaacaaattaacaaaggaaataattcaaaattgtaaatcaaacataacacattctaacgcaaacttaacttcaaaaagaaaaatttagttcatgattggtaacatttttgaattatttatgagttatgtacataactcaactcaactcaattataactcatgttaccaatcaaagcattaatatacatttagacaaaactaatgcactatatatttacattgacaaagaactaacaactacattaataatcccacaattatatagttagtactatatagagagagttgaagtaggaagcacaaagaaaagagaggcttgattatttgtttt

SEQ ID NO: 21105 - DNA, 2886 bp, Arabidopsis thaliana landsberg
aataacctccttttcttcttccacaaggcaataaagatggatttggactaccttgtttgtggatcaacaagattggcagccgactttcgtttcctcgcgaagtttcagcaacggttccatatgataaagtttttgtatcagatacattctgatgcagaagatgagattgcatttccagcattggaagccaagggacagctaaaaaacattagtcactcgtttagcattgatcatgagctagaaactaaacacttcgacaaagtttcgttcattttgaatgagatgtcagagctgaacatgttggtttctaccatcaataccactgcagctgaccacgaccgaaaaatgaagtatgagcggttatgtctcagtctccgagagatttgcaaatcaatgcacaagctattgtctgagcatatccaacatgaagaaactgagctttggggtctattcaggaactgcttctctattgaagaacaagagaaaatcataggatgcatgctcgggagaataagtggggaaatattgcaggatatgattccttggttaatggaatctttaacctctgatgaacagcttgccgcgatgtccttgtggcgccaagcaacaaggaaaacaatgtttgtcgaatggctaacagaatggtataacggtcatgttttacaagaggaagcaggagaagcaaacaacgatccatttggggattcagatccactagagattgtctggaagtatctctttgaagcatctgctgatggggaaaaagggagcatgcgcagcagccttctcaaactcccgaagacggattttacaggtattatgaatcagcctcctcctaattacaaggttgaagttggcaaaaaagaggaaaaagatctagaacggtcagaaagtaaaaagatatgcagaggatctaaccaagagggggacaaagaacaaactgacaaaatgtctcagaaggttagccagtttggtccatccaagaaatatgaacaactgttaacaatgagtgaagaagaacttgtggttgtgattaagaaaatatcatgcgactcttccctggatcctcagaagaaagactatatcaagcagaacttgttaatgaggtaagctctactaactctcttttggtgtcctgttccaacatatttagataagcaggaaatctatttagtcttgtattgagactaaactaatgtcaggttcttctttcagtcggtggaatatctcacaacgtacatataatttggaaccatcctctctctcgagcaacatggaaacagttcatggtcaacatccatcatatcgagatcctcacagtttgatctttggttgcaatcactacaagagaaattgtaaacttcttgctccttgttgcaacaagctctacacatgtatacgatgccatgatgaacaagctgatcactcggtggataggtaggtgcttcattttcttgtatcaaacatcagtaacttttgttacaccttgatctgtctttaagtttcttaaatacttgtgcagaaaacagatcacaaagatgatgtgcatgaaatgcatgataattcagccagtaggtgctagttgctcaaatatttcatgtagttcatcaatgggaaaatattactgtaaaatatgcaagttgtttgacgatgataggtaaatcttctacgactatttcataaggcaattcatttctgatgtctggtcaaaactggagtagtttttgacggctaaaggttttctttgcagggaaatctatcattgtccatactgcaatctctgccggctaggaaaaggactgagcatagactactttcattgcatgaaatgtaatgcttgtatgtcgcggctcatagtagaacatgtatgcagagaaaagtgcttagaagataattgtccgatttgtcatgaatacatatttacctcaaattctccggtgaaggctcttccatgcggtcacgtgatgcattcaacatgctttcaggtgctttactttctcggtttgttatatgcaatgatgaaacacttgatacacatttactaagaatgttacttaagggtgtgatgtttatggttgtaggagtacacatgttcgcattacacatgccctatctgcagcaagtcgctcggggatatgcaggttagatactccaaagtctggttctctcattaaacaattactaataatagtcgcgtaaaagatagctaatgggagcattttatcaaatgctcctaaaaagaaaaatctcaacgtatacagtgatgatcaaacactgaggtgattcactaatcaaagaactgtcttctctcacgcaggtttactttagaatgttagacgcactgcttgcagaacaaaagatgccagatgaatacttaaaccaaactcaggttcatctttcgttctcacacactcatacttaatgcaaattatcagttccattgtctaaatttaacttaagcatatggataaatggatgcaggtaatactgtgtaatgactgtggaagaaaggggaatgctccttaccattggctctatcacaagtgttcttcttgtgcctcctacaacaccagacttttctagttccttctccaattttccttctttgttttcttctttgtacatctgcaaatcttttaacaagtttttcttttctttttggaagcatttgattttgtatgaaaaaaaatactctacatattattaaatctagataattgtctacacctcaatcgtttcaagtaatctcaaattattacgagaggaagatacaactgagaagctgaggacaaaagactgtagagacacttcatcctgtctagctctaacctttacttatgacttactagctaaacaatttcataagacacaatcgccaaagataaa

SEQ ID NO: 21106 - DNA, 571 bp, Arabidopsis thaliana landsberg
cagagaagagaattagggcttagttacctgttatttgtatccccttttgattgcattttagtttttaatattgttcactgttgattctactcaacccaatgatcgagtagggctcttaagttctcatttttacctgtttaaatcctgacctaggattgttactagaaacccaccatcattataatctggcttgacttagttgcttctatacacatctttattgctagcaataacagtggactcgattaacagcccctatagctgcatcgacatgttagtgtttaaggggaattgaactgaacctcacttcagcatataagtaggcctaaaaacctacttatcagtttgtcttcgtctcacaaatatcacaccataagtcaccgattgcgtttcccacaccttgacatagtgatagaaaatgatcatcacacctgtgttttacctttcttggtaaagtagcgcacctcatgaataaagagtagtcatcacagaccgtgcaattaagggatcatcgtgtatttctctgtcacacgcctgacaccgtctcgaactttgcaaggtaaagtataag

SEQ ID NO: 21107 - DNA, 693 bp, Arabidopsis thaliana landsberg
tctgagcgagcatgtggcatggatgaagtgccatcagcttaagatcagaaggattccaagctgacattataatccgtcgatcatcaggattgttcttgatcttgttaattacatctaagagctgatcaaatccttggccagtataatcagcatgcatatctgtgtacctgtagagagagatgaacaaaatgtctcgacacagaaatctgttttgccaaaactcagaaagtgtcaagagataagagagaagctactgacttagcaccaaagtgtctccactgaaatccataaacgggtccaaggtcaccttcctctctctcagtcagtccaatactgaaaattaaaaactttcaatttatcagtgtaatggccacaaagcttcaagttgtgaaagaaaaatgctgaattaaagtttacccatcaagatatgctctcgacgcattcccatcccatatacggatacccttttcttgaagtacctgccacttacacaaacttctcagaaagaaaaaaaaaatctagttcatctacatatgctccacatcttgatcaatcacggtgcttaaggcatgaaaatgatgataaatgatctgttttcttacctttgcattggttgaaccgcttatgaaccatagaagttcctaaacaacacctctccagaaaactctctttcaagtgaaatgcaaacgagat

SEQ ID NO: 21108 - DNA, 529 bp, Arabidopsis thaliana landsberg
  unsure (1)..(529): unsure at all n locations
ttttggaagtccaaaacttaatggacgatgtggtttacccatcatagttgctagctaatccgtaagtcaaaacatttttactgtataaacctataaacattattaatcatatgaaacattatacagattttaatcgtataaaacattataattgtatgtcaaatctaatgtatgaaagatanaattaaaattgaccattaaccattaggtaattacgataatgtttttattagtttatgtcatcgtttaatcgtataaaacattataattgtatgtcaaatctaatgttaagaaattcttatggggccactaaaattttatagagaatatgcactagatgactatgaaaacgaaaagaatcaacaaactaactatgagctacagtgttttgtcagatggtagatgaaatgaccatttaacctttcctttcaatctttatgtttcatcatcatcaatacaacatcttatttctcaccgtcatcagcgcaacatccaccaccaccctcaacatcactaccaacagtcaaga

SEQ ID NO: 21109 - DNA, 2349 bp, Arabidopsis thaliana landsberg
cagtgcaatgcaacatgataacgatgattctattgttgaagctgattcattataagtcgagacactatcatatgtagatggccaaccagaagatcttgatgatccagtagtagaagccgaagatggttcagatgctgaagatgggaattctgatatcgtattaactagtacgaatccgaataatatttttatttttttctcatttgtactcatttgtactcatttcaaatttttatgtattatcagatttttttcatccaaaattgaagctgtttcttatttaacttttagtttacatgtttttaattttgtcataagaatagtaacaattatgtcacaatctatgaccaaacacaaaagtcactaaaaagtgacaaactgtgacatggttattacaaaactctcgttaatataagtgatttaagtttagtcacaaattttgtgtaatttagttaccatatttggtggctaagctgtatttatatttgtaactatataatttgtaacagattcgacataattagtgacaaacattagttaccttcaattaattcgtaatcttataaggaaatagctatctttttatggccaaataaatacgtcataattttgtatgtaaatagtcacaattttctgatgaaaaaatggttgcaatttttccgtaagaatatcaagtttttttggtagtggtcccactttaataacttgactagggacttcaataatttattacatctcttacttatagaggttcatgagcaaggcacgcacttaatgatctataaggatgatataaattattttgggacaattattttattactgaaccaaatttctgtagtttaaaataaaatcaaatgtctgtgaacatgagcatcataacataaaataacaaatctcccactagaatcaagatcacatctttagatatctaatgcatacaacagtagtatgactctcatgcttaggccttggaagaggcttggttaaaggatctgcaacatttgcatctgttgaaactctgctaatcttcacatctcctctatcaacaatatcacaaatgaggtgatatcgtcttagaatgtgtttggatttctgatgcgatctgggttctttcgcctgagcgatggctccattgttgtcacaataaatatccaccggaccacaaatgctaggaaccacaccaagttcagcagtgaacttcctaatccgaacaacttcttttgtcgcttcagaagcagcaatatactcagcttcagttgttgagtctgccatggtgctttgcttggagcttttccaactcaccgctcctccattaagacaaaaggtaaatccagattgagatcggaaattatctttgtttgtctaaaagctggcatcagtgtaaccactcacaacaagctcatcatttcctccataaaccaagaacttatccttagtctttctcaaatacttaaggatattcttgtcagctgtccagtgactttcacctggatcaggatgtatctactcgtcatgcttaaagcacaagccacatctggacgagtacaaagcatggaatacatgatagaacctatagcagaagcatatgggattctactcatccgctctcgctcatcatgtgttgaaggacactgagtcttgctgagagttatgccatgagatatgggtaagaagcctttcttggaatcatgcatgctgaacatgtgctagatcttatctatataagtgtcttgacttagtccaattattctgctcggtctatctctatagatccgaattccaagaatatatgcagcttctcccatgtttttccttgaaaaacaacttcctagcaaagtcttaacaaaccgaagtaaaggaacgtcatttccaatgagtagtatgtcatctacatacaatacaagaaatgcaatcacgctcccactagttttcttgtaaacgcaacaaccgctttttgttttcaaaatccttaaatcaaaatttctctacactaacaaccgctttttgttttcaaaatctacacaaaacttcaattctaaactaaagaaaatattcgaaagggtgtctgaaatctgtttctgtagtaaattgaatcatttctctttttgaattttatatagatatttctttaaaatctacacagatctaccaccaaggtcaataagatcatgaaatagatgtccaagtaaagagaacttatgttagaccaaccaaaatctagaaaatcaaaaaccaaaagaacctctctaacatgagtttttgagagggaacgaaaaacaaagtaaaacacttaaatttattcgttacatccacagatatagatcactccttttttctcaaccttga

SEQ ID NO: 21110 - DNA, 985 bp, Arabidopsis thaliana landsberg
ggatgtcgctgtcatgacttacatgctagaatttctatatctcttatgtattggacaaattcatttccattttctgatgtggaataatttttacatgatctttggagatagtggttcttctagccattaatcccaacagaattctatcatgttcttttgagatactacttttaaaaaattggaccggattcaaacatcgtatgtttgaattctaatactatgcatgttaaattttatgagttttcaacttaaaagatttgacaatgagtagattagcatctatccataaatatttgtcaagtcacttctcttctttccaagatgaagggattaattaaagattatatttttaataataataatttttcttaagagcaaactaatcttctaaatattgatgaccttcgaggttattttttgaacaattggactcaatctttctctctacatccattgggatcttcccgttcttcacaatcttccactattaattttaccgaacaaagtttttagtcgcagaatacccaaagcccaacctagaaggctagaactcaacccttaaagcatccacattgtttatcctcttacaaatatctttattataatttattataaaagttaatgttattttaattttaagtcatttattagctaaatgtggtgtttttaaaagtataaaaatgttttgcgagacatgaaagacacggatctccctattaaagggactaaataacaatttatttcattttctttttttttcaaaaaattttaaagacactgtattttttgtgcaatgaggatggttaatatagtttagggttaaatatgttaatatcataagaaaatgttaatattttttaatagtgacttgcatgtaaaaaaatttcacaatctcttgttgatttttaaacatgttaatatagttttcacaaatttttgacgtgccacaacattatcgtccctattgagtgtatatattcggttt

SEQ ID NO: 21111 - DNA, 557 bp, Arabidopsis thaliana landsberg
  unsure (1)..(557): unsure at all n locations
taactacttacctgttcaatcgattcagttgctaaagtcgattcacattcagacaaaaaatatttagagaagcaacaaagccgacaaggactgttacatctttcaaagacagctcaagagacccattgttacagagaaccaaaagtttcaacctttcaaaaaatgatagaactgaagaaatgtttccttcaattacagtgaaaaatcagtgaacatttttacaaatacaaatcccattaagtatttgagtccaaagtgtcatcatgaaataaattagtcccatcacacacaaatgacaaacagtacaagatgttgaaaaagaacaaaggaccattctcatccagaagaaacaatgttgaaaatgttaagcataaataatcaagattaagacagagaactaaaagaaactgcaaaaccttgttcttgagaccaaacaaaatgaaagatacatgtataaagctcgttcaagagataaaaaaagaaacgcataggtaagagaacaaaatgacatgccctttgctttcacctgactccaatgatcgnctctatccttcttc

SEQ ID NO: 21112 - DNA, 1243 bp, Arabidopsis thaliana landsberg
  unsure (1)..(1243): unsure at all n locations
catacttcttctttcagaactcttttatatctattccatatataaccccccntctcctttttaccttttcattctttctatcaatccaaatatccatcttttataccttttcattcgtttctatcaatccaaaaatccattctattctatatataatcattgatggtctccctgtttaattatcctcttattttttattctatttgataacattcatcttttttctcttttattttgtttgaaaatgatggattttggataaaattttgattataatttggaattttatgattacaattcaaatttgaattaattatcgatttaaaatcgaaattgtcccttaaaagcctcttctaatagccattatgacttagtttttaggattacaattgggattcgaatgaatttgaattttgttccttagagatagtttgtgataaaaactagaagaaaagggaagaagaagaaagaaattgagaaggagaatgacaaagagaagaagaaggcttcttgtttgagtctttagataatgttgtgtttttggttttaggtagaattgtggctaaatttttagatataattatgttgggtttttgggtttagatacaattgctcggctgtctttttgttttaagataatagatctaagcgtttaggtacaattgatacgctcatgtacaactatgtatctgagtttatgtatgaatctaagattttttgtcaaaaaatttaaaattaaaataccatgcatataagtatttttattaacaaaatcactaaaatcaatgaatgttagtcttttattttttaaactcaagagagttttgacagaaaagaaaaagttttttatatttatataactaaggacatttgattatataaccaacaaaaaatcaataattaacaaactagcacttcaaaaaaaaacaaagcaatattctgtataatatatgtaataaacacatttgtagctttgtttgaagatcacgttcttcttcttctctcctttttttaatagacttcgcctccttctttttcttcttcctcccctgcgtgagccatcgtttctctttgccacagttaaatttggattaagggttcattgaattcaatataatttaaaatgagaaatctgaagcttttgttgtttgggtttcttatacgttatcttaaaatttacttttctctctctcccctctctctctctctctctctatctatctctctctctctctctctctct

SEQ ID NO: 21113 - DNA, 587 bp, Arabidopsis thaliana landsberg
  unsure (1)..(587): unsure at all n locations
caggacggaaaagttgctgtcccaaaaaatcccaacctattccagctgagaacaacgaacctgtgaatgttgttgttgccgagagccttgacgacatagttttcaagtctggaaagaatggtgagtacattatttgaaaactctaataatggtttcaatttttttgcgaacgcaagactgataaacatcaatttatctatcagtcttgattgagttctatgcaccatggtgtggacattgtcaaaaacttgctccaatcttggacgaagtggctttgtcattccagaacgacccaagtgtgatcatagcaaaattggtaagcctctcttttatgttctttacatgtcaaactataacttgatatactcctcctggattgacttaaccgtgtctgtgtctgtgcaggacgnnnnnnnnnnnnnnnnnnnnnnnnnnnnnnnnnnnnnnnnnnnnnnnnnnnccatttacttcaggtcagcgagcggaaatgttgtagtgtacgaaagagacaggacaaaggaagacttcataaacttcgttgagaagaacagtgagaagaagccaacttctcatggagaagagtctac

SEQ ID NO: 21114 - DNA, 1941 bp, Arabidopsis thaliana landsberg
gaaccaatgcagtctcaggggatggaagaaaaccctaaagaagaggaaaaagaaggggaagaagaagaataatctgaggtaaatggttatttctgtaaattgtgtttgaatattgaaagtagtgtatagggacaactagaaaacaatgagtataacttaatagtattggtttgtttgattggtgcatgcatggatttatacgtgatcaatcatacattgatttgcattagaaaattggattctgagaaaagtttataatattggtcttagataacgcgaaatattaattttatggttgtgtatgaattttcaggaaggtgatgatgtggaaccaatgcagtctcaggggatggaagaaaaccctgaagaagaggaaaaagaaggggaagaagaagaagaatctgaggtaaatggttatttatgtaaattgtgtttgaatattgaaagtagtgtatagggacaactagaaaacaatgagtacaacttaatagtattggtttgtttgattggtgcatgtatggatatatacgtgatcaatcatacattgtttgattggtgcatgaatttaattgtatgattggtgcatgaatttaatacgtatagtttcaattctgagaaaagttgataatgttgttatgagataactagtacaagtagtacagcaaaatattaattgtatgtttgtgtatgaaatttcaggaacttgatgatgaggaacaacctatgcagctagagaggatgttttttagtccaagcgaatacgtgaagacgtgtaagatagggacgagatgcactgtgcaacagacagtgaagtatttggaggagtttaaagaagatttgccatggttcaaggcgcatccacagtttaggcatgtattccacatgcctgaggagaaaaaccacatgacccaaggcttgtggatgcttttgcttcgcacagcacagacagagatggatagggagtgctggtttgttgttaatggagtgcctattaggtactccattaaagagcatgcgctcttatgtggttttgattgtcatgagtacccggaggagttgcagccgagtatgaagatcttggatgcagaattgaagtttgccaaaaagatctttaaaaaggtatttgggattaagatcattgatgttgagaagaaggtggatgaaatgaagaattgtggagaaaggaagaaggcggatagaaagaagttggctatcttgctttttttgtgcaaggtgattgcagcgaagtcaaaggctgatgaaaacatttagcgtttcttgctgaagattgttgatgatgtgcatgcatgcgagacattcccatggggtcgtttcacatttgatgggtgtatggaagggattaagtcggtaatgaacaacatgaaagggaaagcaaaactgcagacttgtttctccggatttatttttccattagaggtaacaatttagagtattatatataatgagatgcattattagacttaaaactaatacttatgtgacttttaatttgaatgtgtagattttgccatttgaggctattccacatttgggacaaaaatttagagaccctgtaaggttcgagaatgagtgtccgagaatgtgtaagagcaaattctctagtagtgtcatgaaagggttctcgttagaagagataaacgaggagcttggaagtgttttggtacgagttgtcccagttatctctagagttgtcccagttatctatgagcttgtttgttgattatttttgatgtgtgaatttgtataggctatctctagagttgtcccagttatctatgagcttgtttgttgattatttttgatgtgtgaatttgtataggttatctctagcgttttggaaccggattacgaggagaaagatatgttgaggcggattgtagatggtgatcatgttgatgatgggatagggtttgctgcccc

SEQ ID NO: 21115 - DNA, 456 bp, Arabidopsis thaliana landsberg
gggaagagctctgcgcgtcggttcacagcaaactttgccagcgcttaccaacagcacgacgtgtaggcccacctccacgtagtgaggcaggaacccggggagactctccggacgtttatctcccgcttcaccaaggtgcgaggtactatacctcgcatttctgatgcttccatcatcacggccttccgtcaggagtacgtgatgaaaaaatgttggagaagttgaccacgcatgacgtggagactgtctccacactcttcgctctggtcgacaagtgcgccagagccgccgaacgcgggcatggcactcggccccacaaaccggggctgcctagacgggtggctcgggtgccgtccccaggacggtaaaaagaaaaagaagggtcgcggccacgagaagctgtggtcaacactctagtcatcgcacctgcgacatgggggccggggcgaccaacac

SEQ ID NO: 21116 - DNA, 2793 bp, Arabidopsis thaliana landsberg
aatacattctaattaaagagtgaaaatcatgatttctggtgagatagttgtggaaagagagtttgatactgtttttgttaactttaatttagagaatataggcaaaaccaagttagatcatggaagtgtagctcaatgtctgattggtttatgttttgaactcacaagatatgctactaataacaatacattgtatctctaacgggactgtggacctaagaaaatatcctaataggaagagaggaatgtggaaaagaatcaaacattaacaacaatgttatgtagagacaagcgctagtgtatataaagtgatgtttccctgcagcaatcattccttaagactagtataaatgaagcgggccagagatattccaaatggttcagacttcagaggcaagtcaatcacataattgcgatggttgctgtgaagtctctggctacggctattactgttcaagctgtgagtttggggagcatctgaaatgcatcgactggccagaaatcatcaaccacccttgtcactcaaggaatcttctcaagatagtgtccatcaggacaattgactatactggtaaagtatgtcatctttgtaacaacccacttggttatcccatgtatcattgttccatttgaagtgttcgagaaactcgccacctcttactatttatcaacctagttcctaacgatggtatgactagaccttcttgcttggtttgtaaaaaccgttgcatgatgcatgttcccttcctttttgtatacttttgttcagtgacgtgtgttcaatacgcgtttgcaatcatgaatgaggatgattagttgaaaggttcacaagggacagaaaaaagatcaagacgggaaatgcaccaaacttctattttgagtgagaaacgaacgttttgggcttatcatttcatgtgccatgtgccatgtgcttggtacttggaatgaaatatttggtatatccaactgtgtcaagacaaacaacaaataacatatttagatatttgcatatacggataaagtaataaatctgttttttttctttaaattaacacctaacttgttttactcatcatccattttacatacaaaatttattactatattattaagttttcaaaactacatttaatttatttagaaatggcagatttttgttgtctatggaatattttccttttaattttaatggctttagattaacacataattatgtcttaatacattgttaataattaaatgacataagttagtttgaatacaatactagtataaatctcatgaattgaaatatattaaaatagtatataatattattcatagaaaatgtcaatataaaactaactattgatgtttattaaaatgtcaatatataaagtatataatctttattaaaaataccattcttgatgtttttaatcatggttacatttgtcaatttgattatgccaataaaataaattgaataaagttatcaaaacaaacaaataccataaagtgaatgtcgctcggattctcatctagtactaaattagacaatccaaaatattttgatttaacgtataccgaattttacatttaaatttatttatttttatgcatgtttgcgaactacgtaacttataaaaatcacaatatgtttacaaattaacggaataaaaattcaaataatcgtgcgaaaattaacctagttcatatttattttcttttaattttctcttctatgtatatttataggttggtctaattattgaaaaaatcaaaaataaagagaaacaaagacgtaatccaaaatgtctactgcttcactatttagcttcccttcatttcatctcagatccctccttccttctctctcttcttcttcttcttcttcttcctcttcccgatttgcccctccccgtctttctccgatccgatctccggcgccgaggactcagctgtctgttcgcgctttctcagccgtcaccatgaccgattctaacgatgctggaatggatgctgttcagagacgactcatgtttgaagacgagtgagaaattcgattccttttcttcgattttgatttgggtttggttgatttgggtttactttatccgaaaaattcatcttccacgaatctcatttgatccaaaaccctggagaaagcttaagctgagactctctctatgtttctaagatatagtgatatgttttgagaaagatgttgtgctttaagaaaatgttgatttctttatctttgattatgatcaaatgtgagtggctgcttcatgttctgaagttagtattcatggatggcttttattcaattcaatctccctttttgttccgcagatgcattctcgttgatgaaaatgatcgtgtggtgggacatgacactaagtataactgtaagtgaactttgttctagtctcgtcctatcacgtagtgttatgcagtaaaattcatgtgcttgtttgcctttctcctatgactgaactcactgaactggattgctgttttatctttttctatgcccctattcaagatactgataccttatcaaatctgcaggtcatctgatggaaaatattgaagccaagaatttgctgcacagggcttttagtgtatttttattcaactcgaagtatgagttgcttctccaggtatgtacatatgcttgctttgaagtctagataagtcaagtgctgtatacaaatggatcacaggcgtgtgactgggcatggctaagtcataaaagaatcacatttttaagagaaaattaattcaaaaatatggaggttgatcatggct

SEQ ID NO: 21117 - DNA, 981 bp, Arabidopsis thaliana landsberg
atatttcttcaaattattcccagttcatagattagtttttaatcccacattcagaaagaaattcatattatttagatatcataaattcacaatttagcaagctattcatattatatagaattcaagattccaaattacattttaatgtcaaagtacttaccataaaaaactacataatgtttacacacacatgattttatcagtaggccaagccacaatactacctactgcatcgacaatggtttgaatttcagagtttggtctccacacagtagcatctccaatctttgaaacttctacacataccttgctcgcatttggacctaggggcatatggtggactgtgtctgaagggttagaggcacatactcttccttctgcaactctttctcttccgttcttgtaatctaacatgatgcatttcttcttggcagatttgctggtgctagcagtactgtggcttaagctctacaagattcaaaaacaataccaagcattcaggcagaaataataccaagcattcaagcagaaataatacttaagtgattttataggctgtaagttaaagtgcagaaatttactgatcctggtcttttatctgctgatggtggtaatggtcttttttctgctgatgctgtttcataccgtggaggagatgaattcacatattttatactaggaagtggccatgcaatgttctcatttagtacatctcccatcacaaactttcctggacttggtctccacaaatatgcgtctttgttaaacactttctcaaccttaacaattccagcagaaggaccaagaggcatattgttcacaagatctagttggtctgttgaacacaactgaccctcaccaaccacagaatcagccatattccaatcaattatgatgattttaacggctgatgaatctttagcctaaggcatgatgcataaataataagtgactagagtcagtgtttaggttcagctgcac

SEQ ID NO: 21118 - DNA, 482 bp, Arabidopsis thaliana landsberg
cataatttcttcacaaagcagctggcttaactccggatgatccttggcgagtttgcaggagagcttgtattggaactgttgatatgaatctggaagattacctacaactgctgctctatagcctcctgaaccttctataccatcctcagcccactcacgcatagaaagtgtctcaagcatttgaagagcatcatcgcgaatttgtctagatggatcgactaccttgtagagaattagacttaagagcctctggatttcacattttggtatttcttgtcgcatgtaaacctcagccaacacactgaagtacccatcagctatagccgcatcagagtagtaacactgggaaaagtacagatgaattaggtcatgcagtttagaagagtctaatcaaggatgtagtcaaacagatgagcaaagcatagaagtgaaaaaagcttattaagagaattcagatgcttaaactggagctaataaaacaa

SEQ ID NO: 21119 - DNA, 1427 bp, Arabidopsis thaliana landsberg
ctcttcttagctcattcttacattttgactttaaagttagggtttttaatttccactcacttttttttttcgttgattagatgatttgcacggcgattgcagcgttaaacgaaccagatggatcaagcaagcaagctatttcgaggtacatagagagaatttacactgggattcctactgctcatggagctttgttgacacaccatctcaagactttgaagaccagtgggattcttgtcatggttaagaaatcttacaagcttgcttctactcctcctcctcctcctcctactagtgtagctcctagtcttgaacctcccagatctgatttcatagtcaacgagaaccaacctttacctgatccggttttggcttcttctactcctcagactattaaacgtggtcgtggtcgacctccaaaagctaaaccagatgttgttcaacctcaacctctgactaatggaaaacccacctgggaacagagtgaattacctgtctctcgaccagaggagatacagatacagccgccacagttaccgttacagccacagccacagcagccggttaagagaccgccgggtcgtcctagaaaagatggaacttcgccgacggtgaagccagctgcttctgtttccggtggtgtggagactgtgaaacgaagaggtagacctccgagtggaagagctgctgggagggagagaaagcctatagtagtctcagctccagcttcagtgttcccgtatgttgctaatggtggtgttagacgccgagggagaccaaagagagttgacgctggtggtgcttcctctgttgctccaccaccaccaccaccaactaacgtagagagtggaggagaggaggttgcagtcaagaaacgaggaagaggacggcctcctaagattggaggtgttatcaggaagcctatgaagccgatgagaagctttgctcgtactggaaaacccgtaggaagacccagaaaggtaaaatatcattcctttttgtctctgcgattacacagtgattatagagaacttgaatatttctagtcaaatagataagagaataaaagttggaacttttgtcttgtgaataaatgtcactttccattctcaacattgtctctttcgagcgtgtgtgtggagactagagagtatctaactaaataaattctagagtttaatttatattcgtgtctctgcttttggcctatacttaatctggttttgtggtgtactattaatctaagatatctctttgtttggtaatcaagagcaacttggtaggtggctcgctttagcaaccaataattgttcagttgaagtgtgagaattacatatgaacttatcttttgagacagacatcttatcaagttttgtctgttttaagcagaatttagttaattcagtcaaagttcaagagtttgtgta

SEQ ID NO: 21120 - DNA, 655 bp, Arabidopsis thaliana landsberg
attcagggtttacccgataccatcatgcttagagtaagctgctgccttccgttttgtgttgtgattgtgtctataagtcttgatcatgaggggtcacttacatgatggcacaagactccgagcgtatgccgggtaatgcatgatgatgcattaaagtgatgttccggttataagcctttgtggctatagctcggatgttcatagttgtgtacgtgtgtgtgggtgtgcacgtacgtgtgtgtggtagcatacgtgtggagaacatgtatacacgtatgcgggagtttgtgctgatgttgtggtgcacctttttggtaaggttgggagtatgttgggcccaaggttcattcatgtgtctagtttggctgcatattctggtattattataagtatattataatacgtttattacgtgctctgtgatctctgatggataagtttacctattaagttgattaaccctagagatttatttgtgcatagacccagctcactgagtaatcttagattactcatgattctacttgtcttacaggtacccatagtgggatgacatagcgggaagacaacactaggaaatccagaaataggatgtttacgttcttctggaaaataccttgtatatctagattaacaagatcgatataagatatat

SEQ ID NO: 21121 - DNA, 570 bp, Arabidopsis thaliana landsberg
  unsure (1)..(570): unsure at all n locations
ctggaattgaacaaaacattattacacgacaattgaatatcaagaggagagaaccaattggttttatttagcatagtgaaatagtcctcttacattattgaagagaaagaaaaataaacttgcacatcaactttaaaactgaaaaaaaacatttcgaacttgacttaacttcagtagacgaattgcaaatcttgactatttgtttgattcatcctctgctttctcgaccttcgacatgaatgtaaccggcttcttcgggtgctcatttacggtcaagttaaaaatatctggctttgagtaatgtccaaccacatcgaagtataacttggctcttgctatatcaccaagatcttgatgaaaaaaataacgctatcaatatgagtagcttaaaaagtcaacattttcgatagcctaagatgaatataaagaagactatgagagtgtatatatataccaagatcagctgtgacgagaccctctgattcatagtttgggccggcgagaacctttgcaaaggtgaaatatgacacttcacctgcgagacagangacatgttcttagtgctactat

SEQ ID NO: 21122 - DNA, 1005 bp, Arabidopsis thaliana landsberg
tttgttggattcaagacctaaagctgatgatgatggtaatatacattttttatctgcattaaccttattaagatgaaaaaccaagcacatgttcttcattcttccctccggctccggtgaagctacttccgccggaatagccacctttttttgaaactttttcaatattcctaaaagcaaccgaaaatctgaaactcatcgattcatcgagaaaccaaagtcatcatcgtctaacaacatggaagaatacacattattatgagtccctcgatgatccatagaaccaaaatcatcttcagattctccttctctcaacatctcaaccatctccacaacttctctcatatccatcctcctctcttcttcttcttcgcaacatctcaaaccaattttcaacaaattaatcatttccgctttacaattcttcttccctttcatttccttgtcgaacacgtcacctgttttcttctccttaaccatatcgttaacccaagtcacaagactcatgttagaatcataaccttgcgttaagtaattttcagggaatcttcctgtcaaaacttccaagatcaacacaccaaaacaccaaacatctgtcttcttcgttatgatttgtcctttcgaaggtctatactctggcgatttgtaagctgtcatgaagttatgtgcgtgctctgagctcatcacaggtcttagagcgtaatctgttaacaatggctcgaatgaatcgtctaaaacaatattcgatgacttcatatgaccatgagggattgttagtgttggaagctcgtcaaacaagtaagataaaccctttgctactccttttatgatctttaaacgtgttatccaatccaatccagcggaattattcgctgcgaacatataattcaaatagttagtattcacaaaaagttttataaaatgtcaaattattaacaattcttattcaaacataccatgaagatggcttgccaagctactgttgggcataaattcagtgactag

SEQ ID NO: 21123 - DNA, 553 bp, Arabidopsis thaliana landsberg
cctccactacgttggagtcgttgctgatgaaagagcgaagaaactgggtggatcttccgccggagctgacgacttcgatcctgctgcgtcttagcctgactgatatactggacaacgctcagaaggtgtgtaaagagtggcgacgcatttgtaaagacccttcgatgtggcggaaaatcaacacgcgagactgcctcatgtacaactttgatttcgtgagcatgtgccgtcacattgttgatctcagccagggtggcttgctagagatcaacgttgatgaacacttcttgagcgattctctcctcagctacattaccgatagttctctctctcccttcgcaagcacgctagcaacctttgaacggtttttcatggaaatctccaaatgctatttagagaattatgtggcttttatttgatttcactgtctgtgaattagacacaaatggtcctagtacatatattttgacagaaaagaaatctctaaaatgtgtttgttcatttttccctgaggattagctagggctaaaatttgataacttataatcgttga

SEQ ID NO: 21124 - DNA, 645 bp, Arabidopsis thaliana landsberg
  unsure (1)..(645): unsure at all n locations
cacgtgttcctcttttcaacacatcgtgccatttaaaaccagagattgctctatgcatggcgtttttacacaccaaaacggcacccttgttgctcagcttcgcaaacctcagcgttctgacgaactctcgccgcttcgagtccaccaccaagaaatccacaccgggaaactcctccatcgtgttctcaacagattctccgaccaccacaacctccgtcgtaacaaatcctctcatggccaacacgtactcaagtttagattgctcgtcaggtactatacacacgtgtcttccacccgtgtgagttgcagcaaccgcgagtccgacgctagtgtgcattggatcgccgcgtgaccatgtctcaacgatcagcctcgcgttccatccagccgctgtagctgataaaaattctgccactcctgactctttgtcgctcttacactatacacacatatatttacatgcaaaatcaaataaagattatataaaaaagcatgtaattacacacatatgtaatctagttaaaaggcatactgatttaacggtgtcgatgtaggcagcagaagcagtatctggcgaccagacaagcttcatagtgacagtganatggagtttgatgatctgggaagaagacgatgaagaagtag

SEQ ID NO: 21125 - DNA, 577 bp, Arabidopsis thaliana landsberg
  unsure (1)..(577): unsure at all n locations
tgctttcatctctagaatgttatatattcgttaacagatgaaatgaatgtgatgatctgactgatggacaacagtatgggtgaagatagaggctggtgctgcatcagctcatgtaagagcaaggctgagannnnnnnnnnnnnnnnnnnnnnnnnnnnnnnnnnnnnnnnnnnnnnnnnnnnnctggtctttcctcaaaggaggattccttcttgattctccttgtaaacaatccatcctcttctttgaggtagattctatatannnnnnnnnnnnnnnnnnnnnnnnnnnnnnnnnnaaagactgtaaattttctgataatgcagacatcagaggacgatggtaagatccaattacaagtgacgagtgcctctcttcagccattcacgcaggagcaatggaggaacaaccaagattacttcataaataccgtaatacacacactaatttctaacgttaaaatcgcaaactacattctttatgtggtcctccttaacacttattttcaggcgagaaaacgagcagtgacaattcacgtgtcaaaagaaaccggagagagcgttgaaggagcagaggt

SEQ ID NO: 21126 - DNA, 765 bp, Arabidopsis thaliana landsberg
cgatggctgagttatattttatgatggatgatttatggtttgtgatggctaagttatattagtgatggtttagttttgatttattgatatttgagttatattttagtgatggcttagttatggtttagtgatgattgagttatggtttagtgatgtctaagttataattattgatgatagagtttaaactaactaatgtgttttattttgttatagttgcgtgtgagtaaaatggttataaaggatgatgtaagagagttatttcatacgtggccaaatcaagtagaagacccaacacttgatcacttgatcgaaaacatacatgagaataagtttgttaaaggttatagggatgtgaagagaaatgagaagaagaacaaacttgtaaatggtaaagtagcggttgagtctgaatctcacgcaaagaagcagaaagtctcccacagtgagggtggtgaatattatgaaggagatgcacaaaggaagaagaagaaagaaagaagcaaaggtagtgatttgtgaacaaaagtgagggtggtgaatctggtgaaggagatgctcaaaagatgaagaagaagaagatagcagctaaggtaagttatatggtctatggtgagtttatattttatgtaatgtttggctagctatgttagttttttttttgtatgtattgcatggtgttcgttagaagaattatgttactcgccaatgtgttggttagagcagtcgtgtaagtacgtaccaagtttttcttcttatttcagc

SEQ ID NO: 21127 - DNA, 994 bp, Arabidopsis thaliana landsberg
  unsure (1)..(994): unsure at all n locations
tgcaggtcgactctagaggatccccgaattgacacccttagcaggtgcgtacaatcctggtggcgtcggccacgcggttggccagtagaaaccctgtcggaaggcattcccaacaagggctcgaggtgctgcgtggtgaccgcaagcccccgagtgtatttcttttaataactcctgaccttcggcgatggatatgcatcgctggaggatgcctgaggggctgcggtggtagagctccttcccgtccccgagcaagacgaacgacttggcgcgccgcgagntctgccgagcttcggctcggtccgaggggcagctctcctcggtggagatattgcaggtacggggtctgctagtctcgattaggcgggacccattccgctctccctcgacgcgcagtgcctcaccctcgggggccgagggtgcctcgggctgagccgagggcgcctcgggcagagccgagaccttctcgggctcaggcgtgtcgtcggtcttgacggagggttgatgtaggtctcgagagaagacgtccgggggaaccattgtccgtcccgaggctatcttagccagctcgtccgcagtctcgttgtagcgtcgggcaacgtggttgggctcgagcccgtagaacttgtcttctaggcgccaaacctcgttacagtagcccaacatttgcccnnnnnnnnnnnnnnnnnnnnnnnnnnnnnnnnnnnnnagacgtcgctagatggcggagagctgccctcgctcgaagtggttccgcgggggtttttgatatgaccgttgattgacggcgtactgttggattgcgggtttccgaagcgccgcgccctgttggattgcgggtttttcgaagagccgcgccctgcctataaaagggggcaggggtcggcgctttttgaacttcaccttccgcgctccgcgaaaaccctagccgccctttccgccgtcttgctgctcgtctgcccgccgcgctcttgttcgccggagatctggctcg

SEQ ID NO: 21128 - DNA, 530 bp, Arabidopsis thaliana landsberg
gagaaagagaaggactgtgctcactcgatctagcagtaggagtagaagacttctgcagtctcgaagttttttcgaccgcggtgctggccgcaacagggggagagaggtcgagtatcctcagagtggtgctggccgccacatagccgatgaggtcgagtacccacatgctggagcttatacagaacagggcgactcgtcaatggcatgggagcaatcaccggcagccattgacgaccaactccgttcattcttcgattgaggtaagcgcctcacttcaccattgtattataccatctcctgtttttattttgtttctgtgatttgttttgtcctaggtactctcttccaaatttgatcacacagtggactgtgtgatttcagtttgggggagggctcaggaagtgtgtgttgcattgtatatactcttgagtctgcattcatctaaggcatagaaaaaccaaaaaagatttgaaaaatttcagaaaataatttcacaaaaacagagtcttcatgtagttgcattacattta

SEQ ID NO: 21129 - DNA, 594 bp, Arabidopsis thaliana landsberg
  unsure (1)..(594): unsure at all n locations
tacaaaggagcatacttactatgaataaaaagagtgaattcaaaagacaatattcacaagaagaactcatgtttaatagctcgcactaataagttggatatttgcttggttactagcagcgaaagaatggaataccttagtaatgcagtaaaagactcggccagcatcccatatacgacggcctataatatactccctgtcgctacaaaagaaggggaactgcaacagtagcggaagatatgagtaaagagatgggagaagaagcaaacagaacgaagaaaaaaagaaacaagtagcgacctttcgcacccattgcacaaccatagtgcccgtgtccttgcaacgctcgagagtagaagaatacaaaagcatatcatcccacttggaacggaactcatcatcccaaaagaagtccctgaccatctcgggagtggcacctcaaacacagttctgctacggtactggggaggccattctggcatcatcaaaaattgatatgattcaacttggaggaacatgttaaactaaacttaaaagaaggagggaggggggtcctcaggatctcgcnnnnnnnnnnnnnnnnnnntgatgggg

SEQ ID NO: 21130 - DNA, 899 bp, Arabidopsis thaliana landsberg
ccatgcacacacgtgagacaacataaatttagacaaatcaattaattatgtgtacacactctatacaagttggcttctcattaattcaataccaatactacaacaaaatgtatgacgtcagaaaaattgcatggtttagttatgtgtaactaatttttctttaaaaatggttggactgttcctcattttttttataagagttagcactgaatatattcagatttcgtagaaacaccttaattctagaaatgagttgatttattggtaaataagtttctaaattttattgcaactaaaaataccgaaactcaatgaagaagattagaagtttaggcacagtaaaattcaaatttggagctttaacaatgcgttaactctatagactcatgaccactttgccactcattgttacagtgaccaactggcaatagagccagtaacaatcagggccgtacacaaaacacacatgagacaagactaattagagaggtcaattcgcttagatatatagcaacataatgccaaagcttcttattgacaaaaagtcaaattggatattctcgtatatatatatatatatatatatatatatatatatatatatatatatttttttttttttttttcaaaggctggaccattccaacagtgatcaaccgctgaaatgttacatggcaatacatttgataaattttgtttcttatttatttttggacggttggaacggagtctgaccatttctatatgtttcttaagttgacaagacatgcatataattgtactgtgtacgtgaccccagcattaacagtcactattcacatagtggcaaaattgtaaatataaaaacgaaattctgaatcacatataaatgaacgattgggacattgattaattgtggt

SEQ ID NO: 21131 - DNA, 685 bp, Arabidopsis thaliana landsberg
tgtcaattgtattgctttcttcacttactagtaagaagtgattatgattgattatataagcaataaaattacgaaataagttaagaaagattgttttaacgaatgaatagtgttttttaatttacagaatggaaaattacattaaattgctaccagactatagataagaatgtagacaagaagaaacaggtctggcttcttaatttttttggccacataaactctttttcctctaaacaattggattaaactcttgttggtaatatattcacatttttatcataacgaaaagaacacgtacgtaaataacgctttctcttgatatgagaaaattattactactttgcttcaatgtatgtgttatgtaaagaaataagcttatattcaacctttatttataatgaaatgttggtgagtttattttctacttgtgagctgtacaataacgtgataaccccacaaattacacacacaacgtctgctcgtagctgatattaaaagataagatcttggcttattaatagttgatggcttgtttctccaccacatattttttctctgtcaatgtctaatgtatcctaagttttattcaaaaaaaaaaaaaaattgtatcctgagcggctgctttggctttgagctaatgctacatcgatcacatgcatgggcggatggttaatctgactcg

SEQ ID NO: 21132 - DNA, 607 bp, Arabidopsis thaliana landsberg
tattaagttgcagattcctgagagacgcaacgacgtcgtttcccagattagacccgagtgaacgactcagtaacgaacacgacgagtccgagtcacctcgtggactcaccggcggcgagttagacgacggagaaatcgaaaactgaaacgctctacgaatcgtaggagacaaaacgtcgaacgaatcaacacgatcagggctttgattaggcaaaaccctaatctgatccggcgaatgagcaaagaaacaaacacgacggcgacagttaccaccgtctttacacggctgagtccggtaacgcgccgggtgaagccaacactcaaaaacaccatgagaaaactcacatgcgtctcctctcttgcaacaacctttacgaaactcaggacacgccgtaccggagtaatgaaacttcctcggatcacgacggcgagctttttctccgggatgagcgtaaggacactccgtccaatcatggctccggcacgagcacaacgtctcactttaaactcatacatccgaaaatgatcgcatgtataagcatcgattggtgaatcggacccgagagatctggatctgaatcaggatcaggttcgtttgacggaagat

SEQ ID NO: 21133 - DNA, 647 bp, Arabidopsis thaliana landsberg
gaacaataatattctcaactaataaatctacaacaacccctatataaactagatcatacggaattagaatttaacaccgctaaatgattctgtaacgcccgttaacgactggatttgattccaccaataacttatatctgaggtattttgtgactacaaataattagatgaggtagttttattccaatctaaaaatattgggtattaaacttccaaattaaaattagtttgtttgttttttaactttttcccgtttgcaatggaggtgttgaaaactcaaaaaaaagctatgtgaattaataagttcatatatgtcaaaacttttttttggggtccatatatgcaacatgtcatcatgttattgggatgtacgtttcacacacgttctctgcaagtgaagagttcactttcttgagataataacacttgttatattattattggcatttgagattttggagattttttatcccattttatctatttttaatcaattattatacaattaacaatttatatataaaaaatatttatatgaaaaatcataacattttaatcttttataatataaacttggttaattcgacacataataaacaaacattttaacttattttttattatctcaaaaaaaaattgtgttattt

SEQ ID NO: 21134 - DNA, 574 bp, Arabidopsis thaliana landsberg
gatatttataagaataagtagttaggtcaaaaaaatatgcgctttagatattattcgtggaatttaagtttatggcatatcacaaatccgataattataggaaaatgtttagcattttccgtaaaagtgtgtatgtatataggggatacttgtgaaaaatgtaagatagttgcaaaagacgatcgaaacaaaatattagatgtgctataattatggagaaaatgtaagataattctaaaagaagatccaaacaaaatattatatgtgctataattatggagaaaatgtaagataattccaaaaaagatccaaacgaaatattgtttcatgcataactatggagaagtggtatatacttcattgttaacgaagatacgcaatatattgaatgaaattaatacgattcgtttcctgaagttcacactgatgaatttatgcatgaaactacaaaatcgtagggcttgtaataaatctattcaatggccaggattaaacggagaatcccattctaaacaaacatgataaaaagaacagtgtgtttttttgggaaatacgaaatcgaaagggtaaaaat

SEQ ID NO: 21135 - DNA, 1646 bp, Arabidopsis thaliana landsberg
acccctagtataatatgggaagccaaactcctatgcatccttcccggtctccaatgcggcattctggaggtttgtcaccttaatttcgcagtttcaagatccaatcatttgtttgtgtttttgtttctcatttgacaacatgtttgatatgtttatgtaaaaaattcagctacacctatccatgatggaatgaggacacctatgcgtggtagagcttggaatccttacatgcctatgagtcctcctaggtactttaacatggccactcttcatttattcccataaatatttcacattctgagcaagtgtctcaaaccaaaatatggtgttgtgtctcagggataactgggaagatgggaacccgggatcatggggaacaagtccatatgaagcagctacgcctggatcagattggggtagtagtactcctggtcgtagtagttacagagatgccggaacaccaataaacaatggttttgtctactaccttttatgccttaacggtttcttgctttgacgaatcttattctcacacacttttctcatgcagctaatgccccaagtcctatgacaccaagctcaacttcctacttacctaccacacccggaggacaagcaatgactcctggaaccgatctcgatgtcatgtctctcgatataggtgcctgcctatctcttagttttataccattggtgtttttgattctcatattcttaactctaccaggtggagatgcagaaaccaggttcatacccggtatattggccaatgtacacaaagctggagaggatagaaatcccggtgttattcgagatgttcttccggtttgtcctctttaaactacacagaagaatgttgtattggagtaaacattttccagtttactgattatgtaagcctctttttcctttgtggtcatcatcaggatggctcctgtgtagtcgcacttggacacagaggtgaaggcgagacgataagagcgacacagaacaaagtgagcctagtttgtccgaagaagaacgaacgtgtgaagattcttggaggcaagtattgtggttcaacagctaaggtcattggtgaggacggtcaggacggtatagttaagctagatgaaagtctcgatatcaagatattgaagctgactatattagccaagttagttcatgagtgaccccattaggatcgtttatattttgctaattaattactctttacataacattcttgagatttatttaattctttgtgactttgcaactttattaacatatatggtttgacgtaatctttcataaacgactcttcttctttctccattttctctcgtctatctacatataaatcttccaaagaagatcacgatcacacaatatttctattgttgtacattactatataaacataggatacatagatgaagtgagctctagaaatgaaatccatggtctcttctcctaaacgaaggtctttataagaaaaacgtcaacataatttcttctcaattcgttcaatgtaaaatcttatcattgtttgtacattctactatgtgtgtttgcagcaagagaatggtgagagtagcgatcaaagtcagaccaatctacgaaccctggagtgcacactaggtgctcgacgaaatgtcccagta

SEQ ID NO: 21136 - DNA, 683 bp, Arabidopsis thaliana landsberg
atatacacatattttctcctgaacttcaaccacctcgagtttatattattctcacataaaggacagccaattttacccattactttgcagccaacaagattcccataagcaggaaaatcacttatggtccatagcatcattgccttaagagtaaaagttgttttattgaaatcgtcataagttaactcaccacaattccacagctagcatagaacctctatgagtggctctaagtagacatcaatactattgcctggctgttgaggcccaagaattaacatggtaagcatgatattctccttcttcatggataagtgaggtggcagattgtagtttactagcaaaataggccaacaactataccttgtattcttcatattgaatggattaaatccatcagtagaaagttcaagcctcagattgctttcttctggtgcaaatgatgggtatttgtgattcatttgatcccatgtgaatagatataggttaaattaatcgtaagaccactctctcaaataaagaggtcagttgcagcacttagggatcgaattcacaaagctctcggaacacgcaatagactaaagttttgaattaagctacgtaaaacacataatgactctaaagagaaacaaaagtaagcaatagacgattggatggttgtgaaacaagatattaaagcgcag

SEQ ID NO: 21137 - DNA, 1679 bp, Arabidopsis thaliana landsberg
attagtatactaacaaaataaaaatacacataatagttacaaatatacgaacagaatcataaaagacatttctccttgaggctaacaatagtgtctctaaggcttgatttcataggagtgaactctactcccaaatttttcactttctccacacacacttggcatatcatctcattcatctcactttcttcattcctaacaaaatcattaacaagtaagtttttcaaaatctttcattaaatttataaacttcataagatgataagcaaaggtagagctagggaaagagatctcacgtatcagcaatagacaaatctgggaacagcttccgaagaatgtctataatgtcgtttacactcatatttggaccatcgatgatgtatctgccattggctgaaggagtctccaacgctttgatatgaaccaaggcgacatctcttacgtccgagaacctgtagtatcttttattgaaagggttcttaccatttatgaaatccacaattagctctaccgaaaagttcagagttggttgcaagagtggtccgaatataaatcctggattcaacacgaccatgtcgattccgttgtctttggcaaattcccacgctgcattctctgccaaaattttggagagtggataccaattctaaagaagaaaaagaaaagtgtaagaaagattccaaaatctcgaaattgatatgttcacaaatcacaacaaaacttaagaacctttgtctccctgcatagacttggatcggagaagaaagtctcgtccaccacatcgcttgcctccacaggtggctgacgaaagagaaccgcagccgtggatgatgtcagaatgacccttctgacagagggagtttctttgcatgtattaaggacgttcatagtaccctttaaggctggatcaatcagctcagtctgataattattaaaaaaaaaaaacacacacattttgataagtttctttacggcgtcgaaagcaaaagattttttttttaaaatgtttcaattaaggtgttttcaaatttttaggtgtagttattgttcttttttcttctcaattttgcccctatgatatttattatttaaagaaaacttaagaaacatttaataaacataaggttataattgtcactttagaaatctctttaacatgtgttaaaaaactaaaacttggatgaattcgaaacagagtgagtagttaaaattaacatgcattggattcaccacaacaaatttgaagttgttgaaaaacctgaggatctttgacggtgaagaaaactggagatgcggtgtggaagacagcgtcacatccttcaatagcttgttcgaaagaagattcttccaaaagatctgctttgaacaatttgagtctttcttttgcaccatcaagtgcaagaagatgttctgttttcttcctgtccgctaaagaaaaatataacatatacgtcaaaacacacttcaagccttcaaggtgacttacttactttacctaggttcgatgagtgatttacgtctttaattacttgtactctcctacagtcctacttggtacggaccggaatgatgtctctcaactttccatatttggtaatattattaaaatgaaattatatgaaaacactaaaagtacatttgttttttaatgttttagaaaatatatataaatatataat

SEQ ID NO: 21138 - DNA, 1489 bp, Arabidopsis thaliana landsberg
  unsure (1)..(1489): unsure at all n locations
caggggtgtgcttcatgagccacaattgctaacatgtgatttagttgggagctgttggagaaaatttcatgatctggaagagaaaatataggtaatcatttggctctattctttctgcagcatatatactatcatacttcacacacttattcacctgatatgcagagccaatgttggtcaagaaaatggaggagattgggaagcagatagttgtaaggtgtggaggtttacctctagctataacagttcttggaggacttctggcaacgaaaagtacatggaacgagtggcaaagagtatgcgagaacatcaaatcatatgtttcaaatggaggtagtagcaatggaagtaagaacatgctagttgcagatgttttgtgcttgagttacgagtacttgcctccccatttaaagcaatgtttcctctactttgctcattatcctgaagactatgaggttcatgtgggaacactagttagttattggatcgcagagggaatggttatgcctgtaaaacacacagaggctggcacgacagtggaagatgtcgggcaagattatcttgaggaattagtaaagagaagcatggttatggttgggaggagggacattgtaacttcggaagtcatgacatgccgtatgcatgacctcatgagggaggtgtgtttacagaaggcaaagcaagaaagctttgtgcaagttattgattcaagggatcaagatgaagctgaggcttttatatctgctttcgaccaatacatctcgtagaatttctgtccaactacatggtggagcagaggagcaccatatcaagagtctgtcgcaagtgaactacataaatcctcgatctagatctcttgtgtgaattataaagaatcaaggaagttcatgggcacttttgggtaaggtttccttcacaaagatgaaacttcttcgagttctagatctagagggagctcaaatcgagggagggaagttgccagacgatgtaggagatctcatccatttgaggaacctgagcgtgagattgacaaacgtgaacggaacgtacatcatctattggaaacttaaagttgatgattactctagacttgttcgtgaaagggcaactgtatattccaaacgtgttatggaagctgcatcggctgagacatttgtgtatgccttcagatcttgatcccaaaacaaagctggacttgagtactctaagaaacttgcagcaactctgggattttcctgttggaaagtgcaatccaagggatcttttagcaatgacaagtcttagaagattgtctatcaatctttcttcgcagaacacagacttcgtggtggtgtcttcactaagtaaagtcttgaaacgtctccgtggcttgacaataaacgttccatgcgaacctatgcnttcaccagtagatgtaacacagttggtctctgcatttactaatctctgtgaactggaactgtttcttaaactagaaaaaactcccaga

SEQ ID NO: 21139 - DNA, 714 bp, Arabidopsis thaliana landsberg
gtcctttttctcagtttactcgtacacatacaaaaaaaaaacgaatgatgatagttttcatactttgttcttcacgatcgtagtaattagggtccaaaatatgatgagtactgagcattattatattttcgtacatattttgtaaccaaaagaggcgacgcataagaagagtaccactcacatataatctagtcttttagatttgattttagaatcatttacaaattatgacatttaaggtttgttgattacttgattttgtcttgttttgaataatttatagattttgccattattcatgctataataaaatgatttaacatgtgttttacttgttatgtttgagtttagtcggttctatttgtttttaggatttaatatttgatataatttacgtatgtttgcaaaaaaatattttgtaaatgtattttttaaaattgttaaatacgcaaaagaaaatagcaaatacgcaattcactgatgctctagcttataaaaaaaaaaacaattaacaaatcacttagctaaggaagcctaaatatctagttccttttttcggttctagaattaataggtactctctttttttaacaaataaatactcttatttgcctccttatttcttctgctctttaaaatcttcaacatttttgtgccccaaaataaaacatttttttgtagaaaatattatggttcaggaataaaattgttttt

SEQ ID NO: 21140 - DNA, 1522 bp, Arabidopsis thaliana landsberg
tttattatcctctacttcttcttgttcttcttcatatgttcgaccctattttctattgcagcttgtatggccctttctctagttcttcttcttctcaacttcatgctctctgttcgaagagacaaacgcggcatagttttaggattttaagggtttttgtgacgataaagattccttttatactcccgatgattaaaatctcataatatcccttgtttcttaaaactttttgcttaaatataatctttttcccaaaactaatttgatttctttctaaaaacaatttggaaaaattaagagaatttatttactttcaattatgtttttgtttgttcacataattgtgccacaccctttgaccaagttttattttcaaggattgacaaagtgaaaggtggtttcacgttttgtcttttcagctaaaatttgaccattttgcccttgctgctacagttgagaaactgttgaatgtacggtttagttagtcaggtttagttaggtacactgttccggtttagttgaaattatttttgtttcacgttgagggtttggatgtacagttagaagggagattttttccattaaaaacgaaatgacatcaacatttaatggcccaaaaaatttagacgtgactcttgttagaattaatgcaaaatcatcattacatgttataatattataaaattattgataataattgttaagttaaagatgaacccaggaacaaacattaattgcgaacaaacattgatgctcaagaagtgttgatcttgtttatttacgaagtttggagccaagataagcattatcgtgtaagtaataaagttttaaagattttttttgttataacacatatgatcttcattgtgttcgaaatcaactttgttttttatagaaaaacccagaaatattttatttccaattttgttggttgaaaatgctaaatgtgtaaatatatatgtttataagtgtgtatatcaaaattctatttgtttttgtatatataatcatgttttctgttgcatttaatgagtttctcctgaatttatgatgcagttgggtaatggatattctcgtatttactatggtcggggagtggagatgcaaagaagaagaatggaaatttgaaccaaaggaagacatgtttggtcgttgtgtacgtgttaaggaaaacatgacgtacacaaaatttgtacgtacactaagcgaggctttcagtctgaagtacacagagatcaatcacataattagttactcgatgtcgggaaagatgttagtgattatagatactaaacgccctcctgtctacattgacagtcaagtggggttggatacgttctttttgattcgtggtcggtatccttctctcaacttgtttgtctttttcattacaaccgtcaagacactcgggaatgatatctctaggactcatggtgacgatgctgaaagtgaccgtgtgtgtgataatgtttcaaatgttgatgaaaataatgaggccgtagatgagcaagacgacgttgaa

SEQ ID NO: 21141 - DNA, 428 bp, Arabidopsis thaliana landsberg
acagtaaaaaatataatatgtaaccaatcaattaaaatgcaacgacaacacacaaaaacaatgatacaaaaatattggtattaataaaaacgagacactaaaacttaaatcgtcatataaaaataaaaatggtacacatcgtttttctttttggccgcattctttcttaccagatcttccaacattttactgtaccactatttatctatctgactaaggtaaattttatgtttatgtggttatcaatcaatatgattgactaattatttatccagtagacaaaaaaaaaatattaatttttccacacgtctctttaattgcacgtgtggaggagcgagagacatgacgaagttgagcttctaacacatgtatgttgatcacttgatctttacttggtgaccatttcatttttcattaatcataaaata

SEQ ID NO: 21142 - DNA, 481 bp, Arabidopsis thaliana landsberg
accttctgaaatatggaactgattggaccattcgaacaggtagcaaatcctatcaatattatcttcatatccacctttcctggtatacaatcaaattataagaaaaagattctaccaaaccaggtttttatggaaataagctgtcctgatggtggaaatggaggaaggaataactcttccctagcaactcacgaggaaattcatccaaccgggatgataagtgtggttgctaatcttacaccttggtcagatcataaccaaagtccccgtaacatgtatcagtgtcaggtattactagaaattcgatgcaaattttttatgattatgctgctggaagttttttaaattttcagttatacagatggcgaaacaaaccatggcgtactctactcaagcactccaatttcgtgccgaccagaagatttaccacctgcaggtcatttcctatcttactcttagaaagctgaaagtacatggtaca

SEQ ID NO: 21143 - DNA, 2688 bp, Arabidopsis thaliana landsberg
cggctacctttgggcagcgtttagaccagaacaagcatgtcaataaggaaaagatcgaagaactcatgtttgaggtccagaaagttgggtctctaagcagctctgatattttccctgctggtgtgggatggtttatggactttgtgtcaggacgacataagacacttcacaaagttttcgttgaggttgatactttgctaaatcatgtaattgatggtcacttgaagaatcctgaagacaaaacaaatcaagatcgccctgatatcatcgactcgatcttagagactatttataaacaagaacacgatgaatctttcaaactcaccattgatcatctcaaaggaattatccaagtaagcataaaatctagttcacagttctgtcaaaactcagggacttttatctctaaagtatcttatctcttaagataaatatgttcttaaccatcttgtgtcattgttgacctagaatatatatcttgctggagtagacacaagtgccatcaccatgatttgggcaatggcagagcttgttaagaacccacgggtaatgaagaaagctcaagaagagatccgaacatgcattggaatcaaacagaaggagagaatcgaagaagaagatgtcgataagcttcagtacttgaagcttgtgatcaaagaaaccttaagactacacccaccagcacctcttttacttccaagagagacaatggctgatatcaagattcaaggctacgacattcctcggaaaaccattcttttggttaatgcatggtcgataggacgaaaccctgaactctgggaaaaccctgaggaatttaacccggagagatttatcgattgtcctatggattacaaaggaaatagttttgagatgttaccatttggttctggtcggaagatatgtccagggatagcttttggaatagcgaccgttgaactgggactattgaacttgctttactactttgattggagattggctgaggaggataaagatattgacatggaagaggctggtgatgccacaattgttaagaaagttcctcttgaacttgtcccaattattcatcattgaatgatgttccaactctataaataaaaatgaagttatatatttgcttgtcgaaacagaaaaatgttatgtaacatatatttttattacaagaccagcaggacatatgtaatgcctggaatgcttgtgaacgttagtctataagactataacctaaattgttattgtcgtcttttggtatttatatcaagggccaaaaatccttgacgactcaagtcacgtttgaagtctctacgagacaattgggcttaacttgaacaatggcccacaacccacgtggctttttagcttctacgttacgtcaagaaagacttattcttgatctcatttgctgttccaacagcttcagtactgttcaaacaacatctgcactttcattaagatgaacatctctactattttagattttttgggatgaatggcttgactattaccctgttcttttgttgatcgctgcgacaagcaccggcggcacaaaatataaaagaaaaaagaaggagagatgaaggtgagatgaatgaaagagtcgcagcgatagatctgaagagataggagaaagggaatttgagacgttgaaaattccagcgtctacggaatggccgaattacagtcgctgcggcagagatgaaagagaggagaaatgaaagtgaaagagagatgagagctttttttagatcgcaggtagctgacgtaacgatcaatcaaagaacagggcccacacatcccccagttaaattttatatatataaacctcgaataatttatcgaaaattcatcattgactttgcactattgaaactgacatgaaatagagagttgccgtgcaaaaatcatcctctgaagtctactaaagactccaaagtcttcgagactgaaaagtctagttgatccaaaaaataaaaatattgaaaagtctaatttcatttctctttaaatttatattcttcttcacttagtaaatagagaaggaaaaaaaaaaaaaaaaaacagagcaagaaaaaaaaaatgtcaattttcctctgtttcctcttgcttttgctacttcttttagtaacaataatcttcacaagaaaatctcaatcctcaaaactgaaacttcctccgggtccaccaaagtttccgatcatcggaaacttacactaccttaacggattacctcacaaatgtctcctaaacctctggaaaatccacggaccagtgatgcagctccagttaggatacatccctctagtcgtaatctcctcaaaccaagcagcagaagaagttctcaaaactcatgacctagattgttgcagccgaccagaaaccatagcgtcaaaaacaatatcttacaacttcaaagacataggattcgctccttacggcgaagaatggagagcgttgaggaagctcgctgtgatcgagctattcagcttgaaaaaattcaactcttttaggtatataagagaagaagagaatgacttgttggtcaagaaactctctgaagcttcagagaaacaatctcccgtgaatttgaagaaagcccttttcactctaagcgctagtatcgagtgtagactcgctttcggtcaaaatcttcacgaatccgagtttatagatgaagatagcatggag

SEQ ID NO: 21144 - DNA, 723 bp, Arabidopsis thaliana landsberg
gaagagaggttggtgggaatcagctatttgtattaatagaaggaacagtgtatataaaacatcatttgaagctttgaaattccctacaacttcctaatgttatagtcttgtttgagaatatatatatgtccgccaaaaacagttgatgattattttaataaacctcatctctactttctcttcttagttctttacatgagtcctaagttgttctttggattccccagcttgctgtgaaaaagagggttagtttttgctgctgttatttcactgatgaagacagaacatttaaggtcagattgatgaatgaacaaggagaatttgagtagagattggtaccgcgtaattgaagaaagggataatagcgaaataaaaatggaaagtaacaagaaatctaaactgtaaaagagactcacattttctgatccttttggtatgaaatgtggaatgcgtctacgcatgagaagacatgtccaagacacatacataaagagagacacacacacaaacgcctctatccacattttattttccgatcgaatctttgtttatgtatcacctaagctgataagaaagcttatgtgttaattttagtgttgtgtaatctctcactaaactccaatctctgataaatttctcatgtctcaacaacctgaagcgccttcctctgttttctccaagtccaaaggttattcatgaatcaatttgaacatggctccaatc

SEQ ID NO: 21145 - DNA, 387 bp, Arabidopsis thaliana landsberg
caaccaaaagaaccggaactcggatgtgcagtcatgaagcgagtagcctctccaacaaaccatatcgatcacatagtatgtgtgatccggcggcataaaagaacagtaacaaatcacctcttagtaagatcaaaactgagggtaaacccgatagatcagtgagaatgaagaatcttttacctcgtgaacgatacagtctagtatagagtacgagtttgcaaggccagaagcgccttttttcctcgcaccaccaggtaatgcagaagggcaaagatgcatagtagacccatttcgtactcaactaacagttgttccatcagatgacactacagaacatctcttcccaactggtcttgctaacacatagcgtggacaccagccgaattc

SEQ ID NO: 21146 - DNA, 2165 bp, Arabidopsis thaliana landsberg
  unsure (1)..(2165): unsure at all n locations
acccggaagccctctaaaatcctcgttgaatatggaatatgcactgcgattgaaagcatgaaaaaagatcgaacttattcaggtgtaacgctcaaaagagaagnnnnnnnnnnnnnnnnnnntcaacaatactcatgaggataccactttacagctaataagaatactagcagaatcttatgcttccagaatcctaagacttttttttcacatctccaagttaccaatgatgtttacgttttagataagtgttatataatttggtatctggaaaatgagttgctatgtcagtcagatcaatggaggctaagtgtttttagaaatgtacatacctaacatcaccaggctgtcgtttaccaagattgagcaagatgattgaaaatccagtccctagtatctgaaaccccccgtgataacaaagaaagccatcaaaggagattaaacagaaacgacttgttagagacactacctctctatacaaaatgtctcatattcaatggcattgcaaaaacgttgggcattttcaggaatccagacattgaagataaagatgacttacaaatatagggcccagatcccaccgatgtgcaataggcgccaagataaaccacaaggtgataataacccacatctttagacttaaagagaaaagtcccataagaatgatatctagaagatcatcacacaaccacagatcaataaactatttgtttcataagttcttggacattgcagatgatgcacatatcaaagattaaagagttctcacctggcagcttcaacttgttacgcagaaagtagtataacttcctcttccaccggcttgctgacggtgggagtttaaacttctgcaatgccaaaagagattttataaggacagaaactaaaaaaccattctttaccagttaagaaaccattctttaccaaatcatcatcatcatcatcatcaaatgtctcaactccagctggtggatttggtattacagcaacaataaaggaatctacacaataaaatcaagacttgtgcataacctaaagacgcatttaacaaacacagataagcattgatgcttataacattttcagcagaacctgtttaccttggtccttgagcgtaacgtataaatcatctccatcttcttcgtcttgcaatgcctttccacgaagaatcatccttaaagttgaaacgggaaatttacccttttccgcaattgcatttctcaaatcacgaatctaaaatcagcccaaggatcaatcaatcattcccttcgtacaaaggaattcacttagagagataaagaagaagaaaattctttactttgatatgagacgccactcgaatttgagacggccgagctgggccgatggttttgtacgtgatctcgacggtgccattgttggttgaatctgagctcagctcttcggttgaattcatcatctcaccacgaattgtatgcaatcaatgagaaattgaggattagggtttcgaatttgggaattgaaaaaaacagagtttgttttctcacttgctacttctccgatgacggagagtcgacttgagttttcaatattttcatatctgtccttacatatgtttttaattccacttttaaccccaaaggtttcagagagtataaaaaactccaaaacattggaaaagcaattgtaagagcttctgcgtctaaaagaaggtttgggttacacttttcatacacaccatatgcataggatgaggccttcaatttctgccttacatatcaaaagatagaacacacacacaaataaagcaaagaaacagaatatctttgagatctcctctttatttggagaagacaaaacacagaacaagaattagaaagaagggagagaaagcaaaaatggcactaagaatgtgggcttcttctacagcaaacgctctcaagctttcttcttctgtttccaagtctcatctctctcctttctccttctctagatgcttctccacaggtgtttgtaattgtgtatgtagttgtgtgtgcatagctttnnnnnnnnnnnnnnnnnnnnntctctgttatttttttagttttggagggtttgaagtatgcaaattcacacgagtgggttaaacatgaaggctctgaaccaaaattggcatcactgcccatgctcaggttcttattttt

SEQ ID NO: 21147 - DNA, 599 bp, Arabidopsis thaliana landsberg
ttcctgatacaggagtcagtcaagttgttttgcacagagatatcaaagcttctaatgtcatgttaaacgaaaattttcaagcttttctaggagattttggaatggctaggtttgatgatcatggagctaacctctctgcaaccgcagctgtaggaactataggttacatggctctcgagctaatatcaacaggaacttccacaaaaaccgatgtgtatgcatttggtgcattcatgcttgaagtaacatgtgggaggcgaccatttgatcctgagatgccagtagagaaacgacatctggtcaaatgggtttgtgaatgctggaggaaacattctctaattgacgctatagatacaaaattgagagataaatttacactcggggaagtcgaaatggttctgaagctcggtttgctctgtacaagcattataccagaatcaagacctaacatggaaaaagtgatgcaatacataaacagagaccaagcattgcctgatttctctccagatactcccggaatcggagtttccacttcgatggcaatggggataccttgtttggaaacacttcacttcagtacctcatcacatcagaccata

SEQ ID NO: 21148 - DNA, 4947 bp, Arabidopsis thaliana landsberg
cacatacatggcacagaaatactaaatttatcatgcattttacttttccaaattacacacgcaagttacacagattatgcatgtactaggttcaaccttaggtcttacaaacaatatttcacaactttttgtagccttagcatatttacacacaaaattgctatgacttggctgattaaaaagttaactatatttctttctagataatcttaacggatcatcggtatagatttccttacacttagaatactcagcatcttacccactaaaagtttctcaaatatttattatactttggccatataagaatgattttgatttttcattttaaaatttaaaagaagttgacccctaaatagaattaggttgcttttttgttttttatgaacgacaagtcgataatctataggctcgtggcattaaaccaattttttacttaagcggtatgtgtcaagtggtgactggtgtgatacattacttacctacagttgtctctttcgtttttgtgtttccaagatgaatcaaagtataattgtttaataaacttatttttgtatctaggatgattcatgcactatatggtttagttacttgtgagttagctagttacttagttttcaaaatttggaacatgagtcacatgtcgaaattctaatgatcaagagcaatatatattcttaaatgtgactttgatagtggtgcatgattcatgaatcatcctacattttagaatatagtaaactaatagagatttcaatacgtgtaaagtaaaataaatatataaatgcaaatgtagggttcgccaataagagagctttcatataaatcccaacatataataaagtatatttttctctttggtttcactttaatcaaagtttacttgttcacacaaaacaagtttatttggtcctcaaaagtagtaactaactaatagtaccacgatgatcgtttacaccaaattacaattttttatagaaacccatgcaagactaatcttctatcaatggtttcaagttttcaaccgtggaccgagcgtcatgtgttatactaatcaaaacatattaaaacacttcgcctttgtaatatagctacgacttttgcattgacaaagaaatcgaaaagcttgacttttccattgtgaggaataagatctctagcttttagccaagtggtacataataacatcgtactttcgtccactttttagatgcttttattacgtttcccattaagaattcaagagaaaatttaaattgttttaactctatgtaaatctagaaaagtcaaaattattatggagaaagaataaactcattatggtctcccaaactgattttacaaccgattaaatgaagattgtccgataccggtaacaaggagttggccgacggtgaagcccttcttgagaccgatcacagcctacgtgaccgatgtggtgccttattcagagttcagtcatgaagctcgtacacggtatgaagcccctcgtccctgcacttaaatgaaactatgtagttttgcccaaaaaaacccaaattgatattctacttccctaaacctttaaacacttgttgtaaacccaggaagagggtgtgatctccgtttgaactcacaaagaagctgaagaagaagcctagagacgcatcagccatcctctatcttgatccaaagttttgaagacaccaaatcccttcgtttctcttcttttactaagatctatatgttaagtttttaccttttgtattcgacaattaaaaataaaagtaatctctaaaccttgttcagttcatattcatcttattcttatgagtctattaaactttgctttgatgaatcccttagccatgctagagtagtttttttagttgggtttaaaagggaattaaaagagggacaagaccgagtgttaggtggcaatatctagggttttgtttgatcgtttacactgtcatctttctagctaagatttctcttaatgcatgtagtgagcctcatgaacggaaagtcggctgttttatgtcccacctaaccatcagtggtgaattcatacctaaacattttctatgtgctaatacacacccaagttctgaaaacattcaaacttcatacccgaatttacaagaacgtgtgaaattatacatggctgctaacgtggatgccacttccttgtattgttgttaaaacgtgtgaaattatacatcttttaaaccgagatttatattttcactagggtcgacccaaaaaaaaaaatgtcatgtggaatgttgttaatttagttaaactgatcttatcatatttaatgtatggtttttaaacggttgtatttctagtcatcatggacctaattatttaggtatgtctgggcatttggatattcgggtcgggttcgtgttttccgggtttgggcattttcaatttagaaatctaagacctgaacccaaaattttgtatcaaaacatatttaaattacttaaaaatacacaaaaaaattctaaaaacacttgagtattttactatctcatctatcaaaaagtagataaagtacccaacaatatacaaaatatcttaaaataaaaatattttaggcacttaaatttttgtaaatatgattattactaataaattatttctatgaatatatattttggatatgttggggtacttgatcgggaccgggttcgggttttgaagtgtaggatccgttcggatattttaaaattttgggttcagatcgaatcgggtatttcaggtcgaattcggttcggttatttggattcggatattttacctaaacctaattttagtaatagatcctagcctttgtctcaagacagacctcttgtttaaaggatcggaagaaaacttgaagtagctccttctatttcgttggagacaatctcattattatcattttaaatgtgaactatgattgagttgtactatatagccatgaaaaatgttaagttataatctaaaaaccttttttcctttaaaatgtgttaatcactttttatgatgttaatctggtatgattttatacatatctttttcatttctgtctacatggttctgaattgaaaagcaggtaatagtaagaccatccttattacaagtctcttactataagtcttaagtataatataattaaaataatatgtgaatagtttagaagtgtttcttaggtaagagataaaataaagtttaagagcttcaaatcattacaaaaactcttagctataatgtttttcaataaaacaattcatcataatagttaaaaggctaccattaaggttcttctaatggctcttatgagttcgtgatatacatcagtgtttcaatgttttttccgtttttaaatgtaaccataaactaattttaagttctgatggtacgttttttttttttttttgcttcttttaaccaaatgttgtaaaagcatcttagaaatgataagggataacacgtctcgctatcttaataaatcttgtgtcttcggcttatagatgttaaattagaaataaaaataatattaagaaactaagtttctaaatgattagaaaactaagtttctaaatgattagaaaactaaaactgagtcgaacaaccaatctgcagatgggggaaaggggtttggttctcggaagcaacaccaaaattttccttcatcacttggcttgcaatgcatgatagactaacaaggggtgcaagaatgagaacgtggaacacacaagtggatattacctacaaattttgtgcggaactggtaagacaaaaatcacctttttcagtgtccttattcaaaacatgtgtgggagaagctcacgaaaggcctacttcaaagtcattacacttcttatttggacctcattgtttcgctcctcacaggttcatttgttgggaggaaaccacttctgcttctgaaatacacgcttcagatcacggtacacaccatatggagagaaaggaacaatcgaagatacggagaggagaaccctatcacaattgtggccattggaaaaaacatcgacaaaaacattcgcaatcgaatcactcttcttcagaaacaagaagcccaaaatatgatgatttgtttgtattttggctttccactaggttttaattggcatagctaagacaaagtatgaacctaacaactcaaacaaaaagcacttgatgtaaccatggtttttttggtgaataaaattttgcatttattgaaaaaaaaaaatatatatatatggttaataacaaattaatatggtaagttagatatcaattcttatttgttcagtttgattggttattctattttttgaaaattaataatgtatttttgtttttatgatttaattaaattacataattagtatttaagtttttatctttaatgagctgaattaatttggtaattgaaattatacagagggatggttactttcaattatgaacttccaaaataatagtatatgatgttttaaactcttttcaatttaaatattccccattctattataataattttaaaaataaagtttaaaattgattatacttgcgcgctataactaaaccattcaacaaaataactaaataaactaatataaacttctaaatttagatgattgttaagtcaattttcccctatcattcggatttggattcatcatggttttatttataatatatgaccctcagtctatactttatagaattagaagtaatgaggctctacttcgattagtttgagatctgattttcttttcttagtcaaagcttttaaggtagtctcattttaaacaaccaaacacaattagctatctcattaattagcattttttggcatactaacatctttataattaactttttaaattataattattttattaagatatttatgaaaagtaacaataaacaatagagaatataaatgtaaactttaataaa

SEQ ID NO: 21149 - DNA, 572 bp, Arabidopsis thaliana landsberg
tcttaaaacagtataggcctcatatttactgggcctagattaaacatgtacatgttgactttcacctgcaaccagattacaacagatttgtagcaaagagaagatcacatgcatattttgtcttcaacatgaacattttctcggaaacgtgcagaagcaacaagactcttctgctccttcctcaatgacgccacttccttctggaaatcactggttttctcaagaccagacaatagaacatcgtatgtccccaaagaaggcattatctctcgctctctcatctctcgtaatatcttcattgctttctctggactccctgctgagatgtaaacatccatcaacgcagtgtaagcagatagacccttatgatcatccggacgtaagtctgaagcctatgcagctaagctaggtcttctaccaaacccgagcatgtggatcagcattgctccatggtacacaccaagcgagtgttgggattacaccatctactcgaccacagcagtgactacagagagctcgacaggcctcacaatgaaagcagctaacgcaagatacgctgactcctcagatga

SEQ ID NO: 21150 - DNA, 1430 bp, Arabidopsis thaliana landsberg
tattttagattaagaattaaaattaatatgtttacaagtaataataaaaatataattagatgaaagcattggtattttaggtatttgtattattacaaatcatttggatggagatagagataagcaaacgaacaacatctcattcggatggtctagttaaatgaacctactaaaaatgaaacgaacaagagtcgaatgaatcatctaaatggacatgttgaatgaatcagttggatggatctgtcaaatggagaaacaaacagggcctaaatcaataaaatataaacaagttttttttatggtacttttattgataaattttgagaggaagcgaaattgatcctatagaagatataacacatcatggtgggggaagcaaaattgatcatacaaaagatagaactaatagtgatccgaagcgaaatattgatgtgttaaatgtaatttaaggattccccatattaaaacatcgtattaacaattgtttaaagttttaaatgttgattcaaacatattttcgtataagtccgtctcgtaataaaatctttcacatgttatttattattaatttttgttcagaagttcataatattataaagatttattaattttagatctattaattataatatttacaattttctttttggcaaataccaattataatatgtaaatacatatattttctacatcgatggtatatcttttcgttataattagagagtattattggttccaaatttacaaaaaaaaataaataattattagagagttttttataatcttgttgattagtttttgcattgtaaaattatcggtttagactaaatgaaattatcaattattagatgtctagaatgcaggcaacgtaaggtacgagaatgtttggaccggacgccacgtcccattctcacgaatcggatggtgtgtatttgactttttcccaatgggcggcttcttaaaacttatgatcttatttaattagggaaattaattcggttattagtataataattaaacaatctaaagtttgagtttggttggatcggaatcttcttcacacgtcgatcctgacgttagcacagttgagttttcaagcaatgttcaaagttccccacatctctctatacgttttctctccttcctcacattgtttttggaagtcaccgcattagaccttttcttctcttaaatctaatacaaacttatgaataattagtgctaaacaggagattagtcgagtcttacattggtttaaaggcaaagagaggtaagaggagcaaccacttttattcgaatccctttattctcacactttgctacctgctgaacaatggagatgaatccattatcaccactaagctcgaatttataacagtaagtgacaaagttatcacacgtgtgtgtgtatgtatagtgatccttcttta

SEQ ID NO: 21151 - DNA, 1413 bp, Arabidopsis thaliana landsberg
catagttccccataaataaagtagtttaatccttggttcttatacgaaccttattacattttttgttcaattgaaacatttaagacaaacatatgttcttcttacaaatctacaacacaacaaagtcaccatagtagagaaggaaattaaccacagagttcacatcaataaaagtacagaaggacaaaccttgtatgttcttcaacgaggatcagagaacgataactcggcaagagctcgagcatcttggaattttaaggagttctctgaggatgacacaacatttctttctagaacaatgatccaatgataaagtgagtttcttgaggattggtgagttctcaagtaagtatctcactaattccatcttccccttgtccaatgcaaattctatcttaacatactcgagagatgataggagacaccgaggtccagatataatactagttctcttccttggaaagtaatcagattcctgatataacacctaagtgaacgaaacaagtttgagtgattgatattaccaaagaaagttgataagttttaagtaaacaaatccttaccaagaccagggattttaaattcgagcagctcttaaaaaagaatggcaatatttcccatcttttctgatagaattcaacactgaagaaagataagttaggaaacaacggcagtggttcacatcttgagtaatcataaatgacctacaacaaaaataaatacaagaaaagtatcagaataaagttatacatgataaagtaaaacaataaaatacgaaatcaacaaacgttacctcaagagtacatgcagcgattgtcatagttttgacacgagagagtccgacaagaaaattacgaatcatttctctctttggcagatcatccggatcaaactttttcccccgacaaaagttaaactcaatatcgatatccgcctctacaagggaactcagattctctattatgaaacttgcagtcatacggtgagagagcgttagatcctgaagcttgggagtatcaatttcaactattagttcctcatattcaggacccatggtattggggccattatagttgaagctcaatagagactgagatctcacacgtaatacttttacattgtcattgttacttctgcataacgttaagcttttgagaactaggcagcctgagataagcatttccaaagccaaatcatttgcaaacttaacccaatctagaacgataactttcacagacggtaaacaaacaaactcaggatttggtaacattacaccacaaagctttaaagataccaaactcttacacacgtaaactattggaggtatttccaatgcaccccactcaagatcgagatgctgaacttttcgtttgacaacatcgttgatccacccgcgccatttgagcattacca

SEQ ID NO: 21152 - DNA, 700 bp, Arabidopsis thaliana landsberg
aatgctttctgcatcactttgattaatcgaacacaccgatatattgcttgagatgaatctcgatcatgtcttttataacactctatccatcgtcgcgggttagtgatcatgatttctttttccatagaacttgaataaatggatcgttggacagcaagtacatcatcatcatcggaccatgaatatgaataaacggatcgttggacaacgagtacatcaccatcattggaccatgtctttggaaggaggaaattatcgtcgatgccagttccttcactcaaaaaaatttgtctattgattcctggatcaaatacccaaatgacttctccaaaccatagatttgaagaaatttcatcggttgagaaccggagattacattggtgagagcaaccaccaaaaccaaactttaggtaagggaatacatcacgattcaaatgaatcgacatgacatgggaaaagagacattgatgggatgaattttctgattcgaatatggcaacgagtttacttgaaaatggtaactgtttgtcactgttctaaacatgacaataaacactgtcactattagaaatcagaaagtagatcgaacagaaataccgattgatgaaaatgtctcccatcacaattattaaaaacagaagaaaaaagaagtagaaaagcaaaaaaaactaccgacaaatgccggcagcctgtaaaaaac

SEQ ID NO: 21153 - DNA, 633 bp, Arabidopsis thaliana landsberg
gatatggtgatcgagaattacgagaaaggagctggatgtgttgtgctaaagattggggatgggctatatgaggttatagaaaagagaggctcagcatttgcagttaacctatgggagagaacgtgtacagggagttccagctcctaactatcccctgctcacatgccatatcggcggctatagaagaagggctccgcgtggacacgatggttagagtccatcacacgaccccccagcttagattttcataccaagcactcataatgctggtacccgacacagaaacgctgactccttcaccaaatgatgtaggtggtggaaaattagctccaccgtatgtgcgtcgaccgcctgggcgaccaagaaaacggagattattctcaaaaggagaattcaaggtaaaatatttgacatcacagctaataaaatatttatatggtaatattattaggatgtaccttcgcttccatttgtagcgagcatcaagaaaaagatgctcacgatgcaagtcattgggacataacaggccaacctgcaatggaccaatatcggtatgcaaatattatctgttaatgactatattatggaatatttagattatctgttttgagtgcagggactgtagaaaatatg

SEQ ID NO: 21154 - DNA, 610 bp, Arabidopsis thaliana landsberg
  unsure (1)..(610): unsure at all n locations
ttttagtaaaatgagtaattttgttggtaaatgatatgagcttaaagacaaaatgatatcaaatttggttagttgtaattatgagaattatattaaaaagataaccaagttcttatgaacagtattcctcgcggatggtcgcaaacagcacttgcatgtactttgcgacgaatttgaattcgtcgcaaatctctcgtcgcaaaacagaattcatcgcaattgtgtcgtcactgttgcgatgaaacagatacctcgcagaacccacacaatataaacgttgcaaagtacacgcaattttgcgatgaaatagcatcaaatttttccgacccaatgttgcgtcaaattagcatcgaatgtttccttgcaacttcgttgctagttagtgatgaatacgcaagtaagtgtgtcatgcagagcaaggaatttgcgagggatagttcaagaatcgagtttaaccctgtttcacaaatttggttttctgtttgaattttagaggctaagaccaatcggaaaaaaaaaaactgaaatcantaggaaatatgaattctgattacaacctgaattgtttgatgttctaataagaatgcatggaaatatttaggttttgagg

SEQ ID NO: 21155 - DNA, 572 bp, Arabidopsis thaliana landsberg
  unsure (1)..(572): unsure at all n locations
aagtttcagaatgtattaagacatgtttcaatgttgcattttcataacttttgttttcaaattattttacaaacgattagttataatccatacaacattacaaaagttacataagattgcatacactcaataaccaattgaaagtttcttttggttcccttgaccaaacataacataagcaaccacaattgtgattacacaaagcaacagaaaacacacatacaaccaccttttacacttgacgagttcctttttcctcgctatggcttcttctttcagctcttgtatctgattaagcatctcatttgtttctgctttaactttgctaatctcatttgctacgatggctagtcttggtaaagcatcttcgacttcttcaaacacgggatcctctacccacttaaacaaatgaccctaatgcacaaacacatagatacattgttagcttgtcaaaaaaatgtcgactcatttctatcctctacatacatctcttttggntgtccaagtattcacatctttattcctaacaaaacgaaagaatggacgtccttttttctcttgggtttttgaaa

SEQ ID NO: 21156 - DNA, 987 bp, Arabidopsis thaliana landsberg
tgcaaaccaagggcataaatgagtacttaagcttcgcagaagcagtgttagataagtcatgtttctgttcattaccaaatagcgcctgatcaagacttccattaggtagatactcatatacgagcatacgatgctctccttcaaagcagcacccataaagttttactaggttgcgatgtagaactgaagaaattgctacaatttctgcaacaaattgtcccttcccttgacgggatcccaccgacaatagcttcaccgcgaccactcttccatcagtaaggtttccctattgaatgtgtttttcaaaacaaaacgtataaacagacactcttctttcctagtatatctaagaatatacagatatcagatatgtcgtccatttcggtatgggtaccttaccttataaacaggcccaaatcccccctctccaagcttgtttgagggatcaaaatcttgagttgcacttttaagttccgaataagtacacatgtaaggctttacgtccatcccaagtagctctgcaaacaacgattcggttatagattaaccaatttacaaaatgatagtcaggtctaattttagggccaaaattcttcagctcaagggcttgttgtattctgattacataccttcatcatctgtgtaccgttttcttctttttcggatagtaaacatgaccacacccgcaaggatgctcaaaagtcgtacgccaacaatgacgcccacaatagtaccagtcctgttctttccttttgatggtggcttattacccacagttggtgtgaaatctgaacatgaatatgttacaccatctcttaggcactaagtagcatcagaagatagtgaaaattagggagaagaaagaattcgccatttgtgttacctggtgttgcactgactgctgatattaatggtccataagccccttggataggtatacaacatgttcctttcccagcccagaaaagatgaacttcgaggtgattt

SEQ ID NO: 21157 - DNA, 3526 bp, Arabidopsis thaliana landsberg
caaatcacttgaaatgtttgattgaatacaaccccttagagagttttctataatcttgttgattattttttcacaatcttttaaaagttttcaaacaatctctatattttgatgatatttttcataactttattttgtaaagaaaaatgtagaaagtcataaactaataacacaataatttaactcattaacaatcatagattattttgttttagttgaataacacaaaacttttaatgactttattaaagtataaatccaataactctagatttatgaagattttaaattagtttttataaatcttaaactaataataccaaactttaacaaattttttaaaaatcatgattgaataacaacagattctccataacatattaactcattaatactctatttaaatcacaaaatcaataacacctcctaaatcagtagcagattttcgaagaaccttaataaaaaccaaaccctagatccatagagtgctcggcaattgaacgtatactcatggatatgacaaccgattcgatgaagaaagaggagacacaaaaaatgtatgagaatcatgattggtccaagctttgatctgatattttgacaaagatcatcgaaagcttgagctctctagatttttaccgagcaaaaattgtttgctcagattggtactccgtttggaaaacatgcgtaaagcggcctcgatgtccatggcggatcatatatagagcaaagtattatattagtacttcattgatgttgttcgatcccgaccaagacaagatttataagaatcttgtcggagtttctgacgagagctactgtatggctagctctggaaactggctcctgatggttgatcgttgtctcaaattctatatttataacttgttgaccaaggaaaggatcgatcttccatcaatggagtcaaaaatacgtggcggacaagtaagcttcaaacctaaaagcaacaattacaattttggatacttggtcgggccttctcgtaaggatgatatagtgccgtatgactatgaagccgttgaatggaaaaaatcattagctattctgtgtgtagacgagacaacatgagattatgtcattgcttagacttttatgcggcaatacttgttctcatacaagaaaggagattattcttggtgtaatctgaatcataatgggaaaagtttggttttgtttgatatggcttgtgacaacaataagctttatttgttgacaatggatcatcacatcaagattttaaatttctatggagattttttaacaggagaacaaaacctgtatccgtttaacttcgttgaggatccgacggaatacgtttggaagaggaagatagtgatttggagatcaggagaggtaccgatagtcttgagcttaaaaaaaaaagtgtaaaatgaagagaaacttttgttttacatctttaagatgaatcttgagagtcgcaactgggaaagagtttactctattggagatgagatgttgatttttggtcgtgggattacagtaactctcgctcttaaagatcttggtcacggaatcaagagtgattcaatctatttcgtcgacgaagatgtttggccagatcatcaagaacatgatcatcgtgtttcgaattgcggtgtcttcgatattgccacaagtaagatcgaatggcctaagaagatctattgtttcattaatcattgttgtgggagttgcttattaggagttattgagtgtaggaagctaatataattttattgaaatttctagtgttattcaatgatttttgaactctatttattcttctaaaaatcaaggacatttccaaagtttcaaaaaaactcacgaccccgagttctctccctgtcccgattatcaagacctttttccgatctaccttctccggcgccggcaaggcctttggttgccggcgtcgggacctttgtctcagtgctctttgttgcttcttcaagatgtttgtctctctttgtttttggccattttctcaatcgtctcaacctttctcccctattctaattactgacggcgatagagctggtgctcgagttgctagttggtttccggtgaacctcctccctttccactctatgcccatttatcctccactgaatttgaatcgattggagtcatcctttagcagcgacacttcctcttttgaaggtgagatggaacgctccgttctgctcagatctatcgaccttggccctctctcgatctcctgcgttaaccttttccaccggatttcgtcaccggagaagaacggcggcattgacctaatttctattgttgtccctctgttggataacctcttttgccaaatgggcccgaacccaactctcttctccttaaggcccaactccagatggtgtcctccaaacatttatctgcaaaagcccaggtttcttcttcttcttccgttgctccttcttagacaaatcttgtgtcgatttatgaaaacaattgttagtggacgacgattggattcaaatcaaactgaattgctaggttggtgtaacctttgttcgagaaactggccactagattcatctaggagggttaaccttaattttcaaagtttgcagaagacttttcccgacttttccctatgccaaggacagttgaaaagcctgaggaagtgcggcattatgatctcgtctctacagagagttgattaccgcaacttcctcaaccccctttagtcgtatcccctgtttaccgagcttaaagatgtacaattcttcaacattagtgaatacccccatctgctcaattctgtgaagttcaggtctgtctaccctatttacgtgtcaagccggctacgaactttgtgtagatttcttaatctctatggcattcgctatgcgagagagaacatacatgttatgttacgactttacaatcgttgtttgcgatccctgatgttaacttcacttagtatcttgagttatgaccttgttggcctgaagggctttgttattcaagtgggccacttccattacctctcctcgttgctaggacttggctatgctcaactctcaacctacaacaaccctagcaaacaatctaaagcttagagcaccatcacctttgctcaaaccattgtcaaagctctacctcgtgtagttcctctcatgcggcgagaaccatgcttttgacccaactaccaacgccaattcgtctcttgacagcggcaatttgttcatccattgacttgctcatggaagaaattttgacaaacttagatctcacatgtaccaacaagttacattgcttttggctcaaagctctcgagaagttattgttgattacctttatctatcctttaatctttgttattgtaattttggggtttgctccttatcattgtattgtaatctttgggaactcagtttcctataacctctatatttggcccttgttcaaatggaatgaaaacataactttgctaaaaaaaaaaaaaaaaaattattcttctaaattcgaattttatcagtttattgaattt

SEQ ID NO: 21158 - DNA, 2654 bp, Arabidopsis thaliana landsberg
cacctgctttcgttaactagagtgaaatttttctagaaataaaatttagaacgttttccttttgatcgagatatgagattaaacaacgtcaggcttgccgaaacgatatttaacagttcttctgacctatcaggatctctgtgtaacattcggggagagtaaatgggttctttagtcatcacaacttcatttgtttaaagttttaaacttaaacattggtagggttaactttgttttaaacctattccgagattattattgatgttgctaaacaaaattgatgcatgaagaccagtgggatgcaaagaagatgccctattttatccaaaatgaaacctcaaacgattactaatcgtaaacactaggcatacacaaaaccaaacaggaacgacagtattgtaaatggtcaataccaatagacaattttatacaaaacagaattatagagaatcatcatgaagatgcagcaactagggcaatcatgaaccaacaaatagcgaagctacatgtaatttaaaagaaacaataaaaacacaaaacatatatgtttaacaatcaaagatgattgtagatcaagtacggattatatgcttaacatctaatttgtagatcaaattcggctatcagatttcaggtacacacaaacatatatgctaaacaataaaagaattggtaacgaatcaagtaacttgcagataagagaagatgcatagaaaactgctgatattaaattaaggccaggataagagagtacacaaaccacaattgcgtaaacatgatcaaaagcgcaaagtaaattggttcctttgtctaagaaagtctcaaattcattaaaaaaaaacttcaaaatgtctcacagataatcaaaacacttattcttcagcgctagcattctcgccggccttgacgttgtgcttccttgcgtacctctggttcctcaggaacttagggtccatctgaaacatcatttcacataaacgcaataatcaaacctccaatactataacccgaatctgaaatcagttaggttagaactgtaataagagacttactcctctggttggggtgtgacggtgtctccttggcttcttgattccgttcttgtgggctttcgccgactggttatgcgccgtgtgattcttcgacttggccatctctgagacacaagaccacaatacaaactattcaattgaataacgaacgaaacaacagggggaaatgaagccagagatcggccgtagatataagaaaagctaacctgagtactagagagagagttagatctgctcggctaggtttactttccgcgatacaaatacggcgtctgcaacacaaaaccctaatttctgattgaatttatagtggactttaaatgaccaacgtgccctaataaatcatatatgggcctctaattaatctatctcgttgctaaatcatataagcccattgaatgaacccagagtcgtggccttttacaaattggggtataaataaagcagcaaaccatttttttcaaaatttggaatttctctgactcaaggaagtgaagaagacgagagatagagaagaaaccttcctgtttcatcagaaaaatggacgatcaagctactctggtagaagacacagacaaatacgatgatgataaagaagaagaagacttgtgcaggatttgccgatcaccggaggaaccaggaaaccccttatggtatccggtgcgcgtgtcgaggctccatcaatgttcatcaagactgtcttcatatctggctcaatctccgcggatacaagcagtgcgaggttattatacaaacctctttttctctaaagaatgaggttcttgttctatagcgttatgtgacaatttcgttttcgattaaacttcaatttctgcgattttagaaagaatatcaaagttatttactagtattttgttatgagtgatgtttttggggattatatttgtgtcatggtgttgggattttcgatttcttctctgtttcttgtaatatgggtttaagaagaatctcgcacaccaaatgtttgatgaaatgctctctgttttcattgtaggacgctccagagagacttccagttcacgagtttctaatacgtgtttgtgttaatgagagcatcaccttacgtgagaatggttgttccttgggctatggcgtttatcttgaacacatactgcctttctttacatcctttgggccaagaagttgttgttgggttcaagagagattatggaatgtctaccaagtccgcatgtttcttaaatggcctgttatacaacggtcatcttgtgtttttcatgaggatacccatacacgagcccattatcgcgagacatcctgctgggtttcaggctgacatcttgattaagaatgtcttaggagatgggtttgtgcttgttttatggaaatataacaagatcgtttgtgagtggtattattctctattgcaaagcttcttcggggacctcctaggctagttggtgttgctcttcacgaacttggagccattggacggctgcttttctttctggataacaaatcttttgatgtaagtctaatgtcccttctagttctcttccttcgtccactctatgtaacttaattaccatatggagcatgttttgaataacaggttctgtttgt

SEQ ID NO: 21159 - DNA, 3601 bp, Arabidopsis thaliana landsberg
gcttcagcaatggcagtcctacaatcacggttagaccaactggaaatggctcgtcagacagcaatgaacgctcaacatacacaatcactaacagagatcagctggggaaaccagatacgaacttatgttctccatgtatgtagataccgaatccacacattttccgttgcaatttgagtttacatgacaataatctgagtaattattctttgcttttgtagccatacagaatggtgaaggatctgcgaaccaactacgaggtctctgatcctgactcggttcttgaaggagacttagatggtttcatcttgagcttcttatcttcttctttagacaaagatgatcctgaacattagtttatagatgttgacatgattgtctcaagagagttctacttatgtttacttgaaacgtctttttattactaaactccgaaaggacttagggggggttattgaacgtaggatttttattgaatctgaaagaaattagaattctatttaaatcttgtgctattcaattgaatggttttataattctactaaattctactgttattcaattgattgaatttgtaattctattaaattctactgttattcaatattaaaattgttttaatgctaatgtgatttgattagaatttaatagaaatcaaaggaaaaaacgtgaagaaacaaatcccaccttttatggtgtgatttggatagaatttttcaaacttttcattttccaccttttaagatgaactcattcattgtttttaaattggcttaaataaaatatatatacagtattccgatattacttctagcatctgtaactacttttgttaaatactgatttaaagatttgtaatccacaaaaccatgaaatactattatctgttttccttttgtttggtccgaaaattatgtggacttaagttgtaaaataatttcagttcactcgagataaactgcgatgaatttgttcaaaaaggaacaaactttatgaaaatccaaacaaactttattgaaatccaacaacataagctaaaaaaataccaaatatccaaacagaaaaccaaataattgctaacataataaatcgtctaaagaaagatacaaatcctcgacaactaagaagaaacttaggccctaatgttgctggaaactatttcctccaccggaaagaagtgtctgttatgcaacataatagagtcagcggcgacaggctcgttgtcttggttcctatgccatgtgtactgcgcgtgagtcctattcataatctctaaaaccgcatggccaaaactcgcctctctatatgctgagtaactcggttgtggatccacgaaactacatcaaccaagacatacaaatgttagtttcacatcaccaaaacaacaaaatattattgaaaaaattgtttactctctttacctgtttgcaattccttcaatgtttcctccatctccgatagtgatgtaaataggagcattaggatctttcacaggagagctcaagccattggtgatgttgtacttaatattggagatacgttcagatctctcataggcatggacatgaccagacaaaaccaaatcaaccttgctgttaacgagccacgactcaaacataactctcatgctctcaccttccatgtaatggtagttattactgttgtaccacggagagtgaacaatgacaatcaaccatggagtctcttctctgttcacattctttagctcttgctcgagccaaatgtattgaggtgtgtattttcctgaaatgagataacttgttatataagaaaactcaatggcattcaaatatatttgatttttcatgtgtttactaattaccgtaggcagaataagaggagaggacgatgatgtgagcagatgcacgtctaatagagtaccaaagaggagatatgctcttcgaggccttgtaggcgttatgataacggtgaatgtagggcttgaaggcatgaggctccccctaattaagattcatatggttattaaagttgaaactactgatcagaaaaaagctataaattgagagaattataatgtgaacttacaatgtttgggacaaaatcaatttcgtgattcccggcagcatagatgaaggtttggtaagcagcacaaggctccaggaatcttccccacgaatcccactttctctgatcatggtttggatggtcatctgcgtaagataagtctccagggaagagaacagcttggcctttagggtttgacatgtaatgatataatgtctcgttagaagctaaagtttgtccaagatcacctacaaaacacaatgtaattattagatcgagttggaagtattagttatatctagtttcaaaagataggtaaaagaaaatttaattaccaataatgccgaaagtgtatggaacgtcaggtccaacctttggaggactagtgaaggaaaattgtctaacggatccatcagttccaacctcatagatgtatttggtatcatactgccgaaaagatataagaaagaaacttttataaaacttttgaaacaagaaagtgatgttgttacttatataacaagttaaattatacaaattacaaacctcgagtcctttaattgtggcgtgatgaagaaaaccagaagtatagtcataaaatcggtaagacgaggtagaggcatgacctctcttctttttcggtttcacatcaccatcaactgccttccaataagtaaccacgtttgaaccagctaggtttaagggggtcacccacgatatgattataccacgtccattgtaatctccttggacgatatgaacctagccaaagatacaagaaatcaagatggattaattgttttgttaagatacaaaatatacaatcagggacttcaacaaaaaagacaaaaataataatagaaaaaacaacgtgtggcctctgtacgtaaaacataattaatcgttactaattattcccatgtgcagaccttactgatattgatacttttaaattcagaaacttaaaccctaaattaccaaacacaaatttatgatctaagaaccagaaaatcaaaaagtagaactaagaaatcaaaacctgttccggagcattatgaccagccggagatggaaaagtttcgagagacatctcagttgatggttgagctgtgcggacaaagttgcttgttgttccactattgattacagtggcaatgcttagaaacacaaaaacaagtaaaattttgttcatcctcatatttgatctatgatcgtcgctgcttaaaaagttttgagtatgtttctttctgttttctgattaaacgtatgggtgacaacgttttatatagaacttaaattgaagtttttttttttttgcaaaagaagagataaagttggattttaaagaatattcgaatagaaataggattcttatagcctagttatagatattaaacggttattgagattatcatggtcgtattttcgaaacaaactttttgggataatgttgcataattaacctcgtatagcataattttatcgcttcttaaaagtcaaaatttggtttcaagtcataaaggtttcataatttagtttaaggggaataattcag

SEQ ID NO: 21160 - DNA, 1070 bp, Arabidopsis thaliana landsberg
ccattccaaaagctagacaccttgatacatcgatcttaggagatgaatacatcatcaagactcgaacgaacaggagcccacatctctttgtcagggtaaaactgaggaaattcccagttttgcacagttattgagtagggacgccattcaaaactgtcgattttcgagttgtccagaatctccctcgcatggctggtttcctgtttcaggtcatgccaaagagccaatcttggctcactctttagcaacggattgggttttggttgtagttccttgaatctctcccatgtccaaacttggaccagcttaaacaaggcagttagatcagtttgggccgtaagtgttgattctttaaaagctttaatgtggtctttcaagagacttagctctccatacaaatgagcaagaacagcaggagcaagagcaatcctagtaccgcttgaaagatgaacagcaatgggcagaatagctccatagagatgatacaagcgtgatggaaacacaaaatagttaagccacaagacaaggaaagccacatgctcaagctcatcaccactgtccatgaatctctccatccatgctacttgtgttacgaaattgactttagctttcttaatcttcttccactctttatccagtttcgccttaacctcctttcctgagctatccagagtggcaaaaacaggtgaacccaaaacagagaaacctgaaagcaccataacatcttcaagtgtgacagctgtttcaccccaagggaaaacaaaggttttggtgtaaggacaccatttctcagcaatacccagaataagatccgggtttttagggattctgtatatggatgccatgactgcttcaaaaatgccagcttctctccaagtgggttcatgtaaagcagccatttctatagcccaagactcgaactttgtgtttgcaaatctccaaccccagtaggaaacactcttagacagagcgtttgagtgaagagaaggagcagaacggttttgacaaggaagcatagcttcagaacccttcataggttttcaaagatgagtttttggtttcagagggaa

SEQ ID NO: 21161 - DNA, 502 bp, Arabidopsis thaliana landsberg
ctcaacttttttctttaaataaattttggtgcttgacgaccatggcaaatgggatggactaactagtttgcctagttgatcgtttctcaggtgcataagtccatctatatgaattctaagccgactgtctcgaataccatagattattccggacaggagaagctttttggaataatcacctgtgcacggaccgtccaggccgttcaagcggaccgtccgcgacaccaaggtgtgcctcgaacatgaactatgcaaaacacgcatttacactgcggactgtccgaatgagaagagagcaccgtctgggaccaagcttaaaccgttcggcctcagacgcggaccatccggtcgttgaaaaactagaaaaacccgaaggtgacgggttcggtaagatgcatttttagcgtcctcgcggaccgtccggtgtgcacggctagaccgtctgcgactgctttatctgacatctgatgacacatttaatgcactatagccattgatatag

SEQ ID NO: 21162 - DNA, 3607 bp, Arabidopsis thaliana landsberg
aaccgctgaggaaaaacggttgatccaactcagtgaccttgatgagatccgtttagaagcttatgaaagctctaaaatctataaggagagaactaagcttttccatgacaagaagatcatcactaaggatttccaggctggtgatcagatgctgctattcaactcgcgcttgaaactctttccgggaaagcttaagtccagatggtctggtcccttctgtatcactgaagtacgtccttatggagcagtcactctagctggtaagagtggagatttcacagtaaatggtcaaaggctcaagaaatacttagcagatcaaatccttccagaggtgacgtcggttcatctccaggaacttcttgatgattaaaagagtaagggagtcaagctaatgacttaaaacatgctcacttgggaggaagtcccatgcctttctctgtacatattttttattttctttgtgatttttgatgcgttttactagtgtttttcatgagatagctgccaatgtttcagtgcaatagatccaatctcagtgtttcactcgaccacatgctgtggagatcgagtgtctctgtgaaatcgagtataaacaaggtttcatttatcactcaatttcattggccacgtgctgatgaggatccatagtcgagtgaattgatgtttgagatcctttatattcaaccatatactcgactaacaatgacttacagaggatttcatgttctcctaattttttcagtcaacagggaactaagctcaaagacaaaacaacagggcaaggaccacacgcgttttcttcctgaagataagatggagagagaatcacagaatacacctccaccacaccttttgaattcgccctcactctacctataagtcaagtctactcgacccatctctatgcatctgttcaccaacactccaatttctctacttcaccataaatcgccatctctcactcgaccaaagaattactcgattcaacaccatttcactctatttaatcgccatactcgaccaattcactatgtcgttcaccgtcacttggttctcgccacaacactcgaccgcaaagagcaaagacacatgagcacaactcgtcgtactcgaccacctcttcgcccccgcagtcgagtttcccatctcggtcaccatcaaagcctcaagaactactcaattacatccacaggactcgaccgcctcacaaccgtaaccaagtgcaccatctactcgaccgtcgattcgtggttccgtccctgcaaattcctcaccgtcacttgacagtttactcgaccgcttgatttcacaagctgaactcgacctcaataaatatactcgaccgtagatttctgttctactcgattcaaaacgttaaagaagaactcgggaacagtttagtttactcgagtactagattacactcgaccaatttggtccatttcattgcctgttgataacgattttggtttcattgttttctttgagactaacctattgacatttgagttttgagttctcaatcttttgcaggagaatcatgagtaactatagtggcagttcttcaattgatcatgactataacatggatgagactgggtcatcgttttcaaggccagaaagagaatatgataacttcaagagaaaagctgaggtagctcgagggaagagagcaatgacatagaggtatgtgctgatagatgaggatctggaggacgagtatatgcctacgcatactcgcagagccacacaacttctgcacaaacctgatgtattgccagttgaggagtatatcaggctcttcaagctgaatgagttctactgcacaagatatccttgctcgactacgctggcacagcttggattactggaggatgttcagcacatgtaccagagttgtcacctggacactttgatggcttactcatatgtagcctatgaataataaacgattcagtttctttccacactacaagtggagctttaccaaggtatgacctctgatgatttggaaagtgaaggagtgagattcttgcaattctatgtgtatggtcagggttatatgctatcaatcaagcgcatggaaggattgttcagtttcccagtggaacgggatctaagcccaagtttgacagataagagttgaaagacttgtggatcaccattggcagctctgtaccgttgaatgcttccaggtcaaagagtaatcagatacgcagccctgtcatcaggtacttcgagcgttctgtagccaacgtactctactcccgagagattacaaggactgtcactaactctgatatggagatgatcgcaatggccctcaagggaactcttcgccaaactaagaatggtatgcccctccagggtgaaatcaatgacacacccctagctgtacttcttctgatccatttgtgtggatacaagagttgggctgtcaccaataaccgcaagagagcacgaggcgctctgtgcataggtggcgttgtgacaccgattctgatagcttgtggagtcccaatcatttctgctggactcgagccgcgagcaatggatatcgagcacctacgtcactgcgaattcctggagtttgcaatggttgacgatttccacaggttcaggtttgagcactctatagacaggagagctaacatccttctccctagccctgaggtcacacggataatagagggagataacattgattttaggcctgaggttggatgcctctactatgagaacgctccgccattggatgaggatgatcttcttgaagaagctgcttcggatgggatggatgaagatagggcagtggagttcgacactagcatgtatcactttgctgaacatgtacctccagcgaggtagagcaagagcttgactgaagctcataagaataacagtaaattgtagaagtggtgcaagaagcaggacaagctgatcgcaaagtgtttcaagcttctgacagataagctgagttgttcttcctccaccactgctattccacaggtacagcctcctctggagatgccatcgaggagatttaatgcacatgcgcacaggcctgagcttagcgagcagagagtcccacatgtccaggctaggcattcgtcattcgaatcccgggaacacaagagaagaaggaaggctacactcactcgatctagcagcagatcacgcctcattcactcgaggagatcactcgaccgtggtgctggccgcagcaaaaggagagaggtcgagtttcctcagagcggtgctggccgccacagagctgatgaggtcgagtacccacctgctggagctgatacagaacaaggcggttcgtctatggcctgggagcaatcgcaggcagccattgacgagcaactacgttcattcttcgatgaggtaagcgcctcactttaccattgtattataccgtatgttatgatttgtttcttcattttttgtttctgtgattggatttgtcctgagtactctcttccaagtttattcacacagtggacagtgtgatttaagtttggggagggcttagaaagtgtgtgctgcatcgtgtataattttgagtctgcattcatgtaaggcataagaaaaaaccaaaaaa

SEQ ID NO: 21163 - DNA, 1926 bp, Arabidopsis thaliana landsberg
  unsure (1)..(1926): unsure at all n locations
ttatgtctctggtttaaaaaaataattaaatttttggaaattagaatattattgttttattcaagagtgtttattatataaaatggtgttataatgaatggagttttattggtagtaaatccaataaatattatttgatatagatttatttcattaaaaacgaatgttattcgtgtcatgttattaaagttatactctatatgacttttaaatttagtatatattccaaatcggttttaaaatgagtaaataagaaagtcaacgaattacaaaactaattaccgcatttattttgtagtcaatgcggtcgcaggtacttactgcttttgctttcgctcagatcatcaactcttctgctgactttacagtagattaaacagataatgtactatatataacagtcgcatctggtaaggtttccttaaactgcaaacttttctagtaccgcatgtccttctctatagaatcaatctttttaactgtatatagtagtattatatgtgtttgcacgtttgatatagtagtaaaagcttttttctctgtgcaactaactttaactttgtgtttctcaggtttgtgacgtctcttctgtaatggaaacatttgttcagagtcgtcatcctttttgataatggtgcaactggacaataagggatcagggactagtacaaaagttaatgtgggatcaagagaagaataagaccgataatatataaacaaatgnatatcgcagccatagcaatcacgttgtggagcagccgtttgtcgtctttcgtgggtatgaaaactgattttaatgtattggttagctcgaaaagccgaacagatacctgaatgaagaaggaaaaaaacagtgtaagaagtaataaaacgataaaagcatagaatggttttaccgatgcttttttaccaagacgtagatggccgtggtgagcatgaagttgagcattgggtattctgggatgattgataatagcaactttggctgcccatttggcacactcgatctgcaccacattgagaattattgttatactaacatatgttaaccataaaggcttcactaaccacattgtgaagtttctttataataacatatgcttcgatttgtagatcccactaaccttaaccagatgtgaaactgtgaaatgtaggtctcgagagttatcttgcccagccacctagagagagatcatggtcaaaaagctgtgtgcactgtgaacaagaaggtaacaataaggaattaagagattgagaatcttacgcaaagagtgtcagggaaaaactccgtagctgttgggtgcaatttcgcagacagatgtagacactgttccagatttaaaaccaaaggtcataaatcaagaaagcatattatctcaagatttagcatgaaccatgaaaatgaagaaaagacaaagttgttggtactgacgttattggaatccaagatgtgtagggatgatatttgttgtacgtaaccttgtccagcttgtatatgtattcataccaaaggtaaccaacctgaacaatatagggaacaacttgggcatcagaataatatcaaatacataagatgaaccataagccagagagaacccaaactcacaaatgaggaaattgcaattatgcttgtctttattgacatctttctcttggcatcacactcctccaatttctccatccatctctctacctgaaatgaaaatgtcaaaaaatattttaatggtagggttcatgagaagatatgaaaaaacgagaaggctgtaggttcaagagttacagtgggatggaaataggcatatatcattccaatgatccatatgtagcggtcaagtcctgatctgaagtgccattcatgtaaaagtggtagttctggtttagctggatcagtgtatcctgtacttgtgtaaggaaaaaaactaaatg

SEQ ID NO: 21164 - DNA, 558 bp, Arabidopsis thaliana landsberg
cgcatcctgcggacccgtggcagggaaggcttgtgccaccctacctcctgaagacggatggaaatcccgaccgtaagaaccaggggcaacccgatgcaagaggaaggaaggagtgggcactcaccagagtcacgcacccttggtcagggcgcatcaaaggctgggagaaggcgctggggtccggtttccccaacgcgacggccacccgcccgtggaggacgtcgaagggaagaggatccgaggacatccgcaagccctccaagtcagcctccggtgtcatctcccaaagcggcaaccatcgctccgccaagggaagcaccctccggcggtggatggcggcaatcactcccgcggcggtgagtcccccttccgcaacgcctctaaggccttgagaaggggttcgaggttcttctgtctttcgtgcggggtcccgtggcgccaagcatcggcggcgacggtgactactcgctgggagaacggcgggagaactcgccgtcattccggagtaaaactacggcgctgcaccctttgttcgaggagcaaggatggcgggaatat

SEQ ID NO: 21165 - DNA, 2679 bp, Arabidopsis thaliana landsberg
catgttaaagtaaacataagattgttttctcttttgagttttttttcttcttttgattaagtcattttttgggttctatcctaaccttggagactatctcaacaatgtctttgttgctctggttctgaccaatagaatcaatgagatcaccaaacaataatgtcattaaaggaaaaccaacaccgtttcctatagctccgatcgaaccaacgatcatcaacaacacatcggtagaatctgagaaggaaaacaatttgtagaacggtacggtctttgtcttttcttccatttctatcttttttgttttccttttttctaactacaaacatgattgattcatttcttatgtctctttcatttgatattttcttaaaatgattctatttaatgtttaatggcccaattgaagtgatctatattattttaagaacaaaactgatcattagttataaaatatgaaaatatcgtcagtcttgtgtcgtcgtgtatgccaccattattccttattgtattatgttaatagtgtgtttaagcattgaacaagccggagttctcgtccctttttagattatcacatgtgatatgtgaaaaatgacagttgcgtagctaaaaagcaatgactaataacaaaaaatgtttggatcaattagaagcattgatgtggagttgaacgagcgaggcataaactccaccttcgatattgatcaacgtctcgtgcgtccctttctctgcaatcacaccgttcttgacgacggcgatgacgtcagcattcttgatcgttgaaagcctgtgagccaccacgatggtggtccggttcaccatcacccgatcaagcgcgtcttgaaccacccgctccgattctgcgtccaacgcgctcgtcgcttcgtcgagtaacagaatcttcggttctttcacgatggcgcgtgcaatcgccacgcgctgcttctgtcctcctgacaattgtatccctctctctcccaccaccgtatcataaccctaaattgaaataagaaagattattttgcttgcgtagtaagtaatctctctgtttttcaaaagtgaataaaagtcttgttttgattaccttttgtatactagagatgaacctgtgggcattagctagctcggaagcagctataatctcagcctcggttgcttcctcgccgccttttccataagcaatgttggctcgtatcgtgtcgttgaatagtacaggctcttgtcctacaagccccatctgttgtcttagccattttagtcgcagcttcttgagctcaactccgtctagagttatatgacctgaatccggatcataaaacctctgtaacagtgaaatcaccgtagattttcctgacccactttctccaaccaaagcaacagtctggaaacaacataagaaataaagaagtgtgcatataattaaagcccaaatcagttcaaaatcgtaccaaatatattgaaatctataacaaaatagtataaaatcggcagagttctaaaaatgtttttttggagcttctacgcaaacacacacgacttcatgtaaaaatgttggagatggttacctgtccggcacgaatgctcaaacagaggtcacgaaagacttgaacatcaggtctagtttggtaagtgaagcttatgtggcaaagctcgatatctccttttacattctccaacaccattcccgattcgtctctcgaatctatcttcgatatcctatcaataattctgaaaatcgaaacagcagcacccttacctttactcgaatcaggagcaaaagagctcgcctgagaaatcccaactgctgttaacgtcaaggccaagaaaacctgcacaaaaatcattaactacagtatgttctcctcaagatccattacagagatttccaagaaaataaacctgaaaaacatcgttgaagtttgtccttccggctttaaccagtctagctcccacgtagaaacaactagcgtagacagagtaaagaacgaaaaaggagataccaaaccctactccgctgattaaaccttgcttaatcccagatttaatcgtatcttcacatcgtttcttatacatctccatcactttttcctccgcacagaaagacgcaaccgttcttatactccccactgcatcgttcgccacctgactcgcctcctcgtactttgcctgcaaacatcattttttataatattttaagttacttctgtaacgagtaacaaaccctaaccctagaaaactcattttttttaaagtaggcatgttcagttctgataaactttcgagttagggcaacataaattacccatttaggtcaagataatacttatgttggtaaggatacgttttcgtacagatacatttgagacaataatttttagtactcagttcgtagaggaccaacctttgcgtctgcactgaagcctttcatgaacttaatttgaatatatccattgattccaataaacggaataattactaagatgataatcgccacttcccagctcgccgtgaaagctatgattagtcctgtcaccaaagacgcaacgtttttaaccgatagacaaagcgagtctcccacaagagtccggatcaaggatgcatcagcagagagcctcgctcccattgcaccgctcgagttcccaggttcatcgaaccacccaacctccatgtgaacaactt

SEQ ID NO: 21166 - DNA, 206 bp, Arabidopsis thaliana landsberg
cctgttggcaagtcgtacaccatcagtggtatgactatcgtgttacagactcaggtttatgattcaatcaacaccattggaaagcgatttggagaacgtaagcaatgagaatgagatttcgttgcttagatggggaggcaaccgtacgcgcacaacaataaaatcgagcattggtgaagatatcacaaagcatggtagtaaggtaa

SEQ ID NO: 21167 - DNA, 907 bp, Arabidopsis thaliana landsberg
agtccttacaaacgacttaatatatatcttgagacttagacttattgatggatcttctatcacgtgtacttttctggtttgggaaacaacttcagtctcatcatgctgattaccctgatagacattcgcaacaacacattatccaactgcaaatagtgtagagagacatattgttaataagaaagttgacagatatcttgcaaatagttaatggataatttgagccaaactatatatagaaagaaagtaaattaaaagaactatgtatattatactttattatatctaatattaagcctgcgccgcccttggactttttcttcactgctgctgccggaggatcacccaccacatcatctctggtcggataaccaatcggcggacttgtgtccggtcctgatgcattctgtgaacgtttttgcactgcggccaaaaagattagttaattatctagcggtgtgtatagaataattgttcatgattatatgtggccaaaaagaatatacgtcggacattgatcatgattttagataataaatgaagaattaccagaagtgtgctcgagctgattcattctgatttgaggagctgaggaatgatggaagggagaaatatgaagtggagcgagtgttgtggacttaatttaaggaagacgtaccaccattttttaatttttcttacaaacatatacagaacagactcatcttagccaagtcgtataccaccactttttttttaatgtaactaagtcacaagtgattgtcgagtaacaaagaattgcggtgaaaaagtaaatgctattttgtgaaatgcaaaagggaagaggaaagcgacgaaaacggcctttttcaacctctattatttgttaaaagccttttttcaaaaaactctgatgtcctgcctttct

SEQ ID NO: 21168 - DNA, 511 bp, Arabidopsis thaliana landsberg
  unsure (1)..(511): unsure at all n locations
tagaccgtgcatacctcggtgaacgtccccaagcaaggaatcggactttgcctcgccgggagnnnnnnnnnnnnnnnnnnnnnnnnnnnnnnnnnnnnnnnnnnnnnnnnaccgggtaagtctccgcaccattttccgattccctgcacgcatggcctctacgtcatcccgtggagctcatcgtgccgtttaattgaactagatcgtcgtggttaggccggaacacccgccgccgacgagatcacccgcctgtgcacgtggtccggccgattccggcaccactgccgtcgagccgtatctcattgtgaccgccatgacctcccgaagccaaccccacacctccgttggacctctctcggcgccggtaagccgtgccgcccttttgctttccgcggttactgtttacataagggggagggaccttcggggagaagaagaaaaggccaagggggttttgtgcaannnnnnnnnnnnnnnnnnnnnnnnnnnnnnnnnnnnnnnatgaatggga

SEQ ID NO: 21169 - DNA, 1130 bp, Arabidopsis thaliana landsberg
cttgatcttaatgtacatgatagacatgcagttagacacgagtataggacgatattttaacattattagtgtcagtttactaataatggctaatactgaaccatgttctcgccattactatacaaacttcacctatataggctatatatatatagatagcttttttagtccaaaacatgtatataaattgtagaagatatgaaagtcaatgagaggtgacttcagatcttgtagagatgtcggacgaatcacttaattaagaaggcacgtctctcaacacacctctcataaatttttctcatcgagagtcgttcgttgacgatcttaactgatttttttttccaaattagtatattgatttgtgttttggtattagtcttgattttaatgtttatgatagacacgagtatagaacaactatacaaacaataatccaaaacaaacgtttagcagtgacaataaaagctaaacgtttagcagagatgagaccgcaagttaatggccggttcgcaaagagagaaattgaaaccgaggaccaagggttcaacacgatgctaatgtacaacacatgatatcgagttgttccttctttctgatactcctatggctaaaaaatataactagaatgcaagcttacttttagtttggaactttggatgattgattatttcgtatttccgttggaccaagtttcttcagaaaaatggtgcaattgtgctatttatttggttacaaattatctttttatagttaatgtttgtaatttaggaagtttgtaatttatgaacattgttttgtgattatatttctccgtcatatatatatatatatattattttatataagctttaaaaaaattaacagagtttagatgaatatatagaaaattttagatgatcatgtatgacaatcaatacatataaataccccaaaaaaaaaacaaaaaaaaactcaagtataaaagttccggtatccacaggcccagcatatatcgtttttttttttcaggtctacctactattaaatccgaacacattagttttttttttaatttgggcttctggtgggacggctcaattcacattcaggcttgagctgatttttttaccaactcaacatcttcactaaac

SEQ ID NO: 21170 - DNA, 338 bp, Arabidopsis thaliana landsberg
tctaatgagataaaaatttaaattaaaacctcaaaatcttagtaggatcatttaagtaaggaaactgcttattcaaattgtcaattaaaaaaaatagtaactttttggtttggtttatttatatacaaaaattttgttgttatgtaattttccaacctcaaaaattatgttctacaataaaaatcattagaatcaaacccaatacaataagattttcctgcttttaatttaaatattattatcttaaaaatttatgaattatttttattacacttaaaatttagttttgaaattgaaaaactaactattataagaattaatgccttaagtgtttttga

SEQ ID NO: 21171 - DNA, 235 bp, Arabidopsis thaliana landsberg
ttaataacatgttttgttcttaaaatacattttttttaaaatcagacatttgttttaacatgagatataatctcttatatccacaacgacattgatggagaattcaggcaaaacgagaaaacaaagaatgagagatagagagatttttatggaaaaagacaaagggaacatgtgggtgaacaaaatagagagatatgatgatctattttatgagagggggtgaagaaattgtagg

SEQ ID NO: 21172 - DNA, 1808 bp, Arabidopsis thaliana landsberg
gtttcgataagatctcacgcgtttgtaccgcttgttaagacaacaactctctcgtctgaacaactttctgtcaaaatcaaaaaaattggtccacaagtcaaaatcaacaaattggaacatcaaaaatggtgaaaatcgaatctgatgttacctttgatcgatctttaaaacgttgttcaacagcatcaaacgagtctagtccattgtagtttgaattttcagagagttcttcgttattcgccattattgtggtcagatttctctgtagatgcttttgtcgtttttaaaggagaatccgaaaacactgaatttttctgttttcaggatattttactttatgcggaattaaaaatttggtgaaggaaaatgacccaaaaatcattattaaactctttatattcattactactggtaattaatttcatgtaatccattaataattaatataatcccctctagcctcttggactttatgttttatcttgggaaatcagatggaatattagtcctcaaagtaaattaattccattaattgcctttggtgattataaaatttaaagactttaagaagagagactgagaaggagccacgtgtcgaaagttgaaacttctaggaccctcttttacgcgggtcgagaaattttctagcgtacacgtatttttctacattattataactagagggacattttgtttaattgcatattgtatagtaaaaagaaagagaaaaagagagactttgtattaaaaaaaaaaagaatgctgcggtataacttctgaactaggttttatgagttcaaaaaatgggtttcttgacaaggtttcacatgttccaacagctttagttttgctttcgaatgaagttggaaagattcagaagcagtgttttaaaaaaaggtctagtaatcgtttatattccgactaggcgctagacgttcaaatgacctaaataactattttgaccgtttaaaataacataaatttcgttttaatatattttttttttgttttgaagtacatcgtttcaatttataagttttacttctacacacatggttattctaaacattcatatgtatattgtttgatatatattaaagaaatactttggtttaacttttatttagaatccgatttaatatttttctgtttttaatatatagcttaatctgatttttatctataaaattatatctataaggttttatgtcgtaaataggggtgtcaaaatgggtcaaaattcatgggtcaactcaactcaattcaacccatgaaccctaatgagttgaaatttttgactcaaatgagttgatgggtcaaatgagttgatgagtcaattggtttgatgagtaaaatgagttgggttgtaatggttaatggtttcaatggtttacccaattaacccatcaagttttgtaaaaattgaattaaaccaactaaaatttctaaaccaatgccaatttaagtctaaccaacacatttaaaccaatttaataaaatcaatatttttccaaatttcttaaatatataagggatgaaattgaaaaaaaagtaaactcgtaatttttccaccaaaaaacataaacccgtgattttcccgccaaaaacgtaaagctgtgattttaccgccaaaaaagtaaacccgtgattttcccgccaaaaacgtaaacccaagattttcccgccaaaaacgtaaatccataattttcccgccaaaaacgtaaacccgcaattcccccgccaaaaaaagtaaatccgaaattttaacgccaaaaacgtaaatccataattttcccgccaaaaacgta

SEQ ID NO: 21173 - DNA, 2961 bp, Arabidopsis thaliana landsberg
aagaagagcggttcgaaggagataacttttgaagagagaagagatctgatcagttctatggtgaaatgggctagagccatcggtctattcgtgaaggcggcctctgaagataaaggacagtctattgatctggcatcttttgggattgactatgacaacaatgtagaatcccctttttcaaaaagagctatgtatgaaacacaaggaacgttctcattacctcattacgtgaagaatacccccaaaatgggcaaagccattgagcctttcgcttacaaaggtatgtcggacttcttgggtagcctagagagcaagtgtcctgcgacaccagagttcaaagatttctttgtaaagttggaggactatatggcctgcttcaagttggtatcacccgaatcaaaattcgagatggcagtgaaatcggataagctcttcacggctatgatttcattggatggtactaaaggcggatcagtaagttctagctaacatttataacatttacttatatagtgtgtagacgtacgttcctcgcggttttaaatgaatttataaagatggtttccattattttttggccaggtggattcgtggaggatgcttgatggtatgttgtcaatgggaaaagttttggttgatatcaagaagagcggttccaaggagataacttttgaacagagaagagatctgatcagctctatggtgaaatgggctagagctatcggcctattcgtgaaggcggcctctgagcgtaaaggaaaatctattgatctagcaccttttggaattgattatgaaaacaatgtcggaaatggaaaaggtaactttagaaccggccctgttctcatagacgacggcagcgagctctaatcttccaacgaaaaaggttcccaagtaaacaagaaatatgtaacattaatatatggagacagccctgctttgttaaacagcagcgtgctgtagaacatttttggttattgtaaaaactatattaatcatattactaaaattattacaaatcttaactcgttaaacagaagctttacctctatatgtagatctattattcaacagccttacgtaacacaagtgaaaaaacatccgcatcttcagtttcttgtcttacacgctagttttggatcattatctaggtgtcttgaaacactcgtaaactttccaaccaaccaacctgtgttcataaatctcaagcaacctgtatctatattgttctcagtctcaatgttatacactctcttctaacgtaattaggattctgttttttactattctcgttactgttgtggatagagtgtaaacacaagtattttaatttttctcactgtgaaaatttgacaacatataactttctaattgtctccatgactgtttttaaactccagcgtaaaccaagtattttttgccccaaactgcccaagaagggaatgttaattgttagattcataatcaatcacaataccccgaactcgtcgctgtccatgtcctaatacttgtgatgatggttcatatatcaccgatacattctctgggatccgcatctccgccgagtgtccagaaatgcacatcgatcctgacccgtcttgttgccagtacactttcaccattattcctcttggattctctgcgttttctgttccagggatacctacaaatcttgctccacaggtatctgcacattgaggttagtttgtatccatttaaattcttgttcattaattctcaatagtgcatttcatcgacggttacatgtgaaactgattattttgatggaccttgtagactaattacctcgactgcgatgcctgattctaactcgagagttaccatagttccttcaacagttgcgctttctagttcagcacgtctagcgatgttcaaaaacacttcttcaagagtggcaagaccgagctgaatgtctgcgataccaaattcagattctctatcttgtaactccgcgaaaaacccctattcccgttaattatggaaaaatcattcatcaaatgaaagatttaagagataattaataaagctttttatagatggttaccttcaaaagttgctctttgtcgtgtgggattacaaaagtcatgaaagctttgttttcttctgttggctcaacttttagacgctgcatgatgtttgttccaggctcagaggtactagattatttactaactaaacaatactactaaaaaacttgagtgtacatacatacctccttaaagaatcttttcaatggctcgggtgcaccgtcttttttgttttcgatgaagctaacggtagcaacaaatcccgtgccaaagcgagattttaacctgattgaggttccaatgcagcggagcctgcctttagccatgatccctattcgatcacctaaaatatcagcttcttccatagaatgcgtcgttagtataatggcacgacctttctttgattcttgtataatgtcccacacatgtcttctcgtgatagggtccataccagtagtctacaatccacaaatgttagaataaaaaaaaaattgatgtttgtctatataaactcatttttaaaaagaaaaaaaaaaagagaggaatgttgcatattacagaccggttcatctagaaaaaccagcttgggatcaccaatgagtgctattgcaacactcagccgacgtttcattccaccactgtaacttcctgctctaattttcgccgatcctgttagcttcacatctaccagtaacttctctgcaatctatatatacgtaacaatctttttttaatgaaaaggtatgcttagccaaaagtttaaatcagatatttgtaacacacatgaatatgaagtatattttatgttattagggtgatgtaccgatttgatcgatgatggtggcaaccctttgatgctagcaaagaggtggaggtgctcttcactagacaaagcatcccaaagaatatcaaa

SEQ ID NO: 21174 - DNA, 2208 bp, Arabidopsis thaliana landsberg
tgaaccggagttcattcgccggaaaacaactcaggtcttcattgcaatactctcccatcactagatatttcacgtcgcctttttttttggtcaagaaaacctaatctgtaataataatactcgcacacgtcagcaaattaaaatctaactgttgaaagtttctgatatttgtaatctgacggacaagattttcttcatgtcaatttattacccaaagcaaactgtgtctgtttcgcttaccttccccgagttaaacactttgtagaaaccacaaaacctactttttttggtcctcaatattgaatgttgttattggtaacacatcaaagtctttaatggtttagcggcagaaacgataaaaggataggtttggaaatattcttcgggaaaaatgtcaaaaaaatcgcgaactttcaaatttgggatgaaaaaagcataaattttcaagaagacaattaaatcttaaagtttagtttgacttctgataaaatgatcaagttttgttaacttgaccatttagggcatgtcgttaagtttccgtcaaccaaacaatcacagagttaactttccgttagaatctctcttatatcaaaacgacgtcgttttgaaaattagaaaatgaaaaagaaaaacagcaattcaagtgactcgaaatgttgatcttctgaactaatagaggaattcaaccattaacttgcattaacattataatatcttacagacatagtatatatatatatatatatatacacaaaacataataatatacaattaattaaatatctgcaatttattaaaaataacaaaactaaataaaatcaacaaccaaatatatacaaatattaaatatatttaccctcaataaatatttggaaatttcaattatttagtttgctatgttagtttcttctatatttgaaaaattattgatttctaaattatataaaacaaactgaaacttggataaattaatttgtatttatattataatatatattagataaatataaaacataattattctaacttgaaattgatgtaatattaatagttagatggaaaataaataaataaaaattattttagttacattataagaaaaagtgataattgtattaatggtatatatatttaaatgaaaaggattgtataattttaaactcacatatttaatattatatattctaatggtttctgttatttttttacattatatatatatatacatgctctgtttaccataatacaagaatattaatgtagttcaatggttgagtgtctcttataagtccaaaaggttagttgttcgactctccttgttagcaaattttccttcttatattgtaatgtccaaaatgacgtcgttttgatttcacggagattctaacgaaaagttaacaccgtgattgttttgttgacggaaacttaacgacaagccctaattggccaggtcaacaaaacttaatcattttatcaaaagtcaacctaaactttaggatttaaatgtctttttgaaagttcatgttttttacgtcccaaatttgaaagttcacgatttttttgacatttttccccttctaaaatacacaaccttttggtgtttctacattgaccctcaagataatcttcttactcattttcattatcaaaattttaaccatatactatatatatttatttatttattttaccacctatacgaaacagactttaaatattaattatgtaaaatcttcatttaaaaattaatcatggttacaagttaaccacatagattacactttacttgatttacatgatgattagatatcttacacgtacgtcttttatctaaaaaacaatgaaaacctcttaattttctaaaaagaaattatcttattatcacaaaccctaaatcgattatacgagcgaagtcgacatcgaatcggagaattaagggatatatttcattgttttcgttttctcgatataaatcaagacaaccaaaacatcaaaacatcaaaacatattgacaaaactattgttcaaactagtgttccacactaaagattactactagttagatgtttttgatgcaatttgatagattggaggtttgtaaaaagagttttttttccttgatttatatcaccaaaatgagtcaacatttcactgtttttccgaaaaaaacttagtgggtgattgattgggctataactgtagagtttt

SEQ ID NO: 21175 - DNA, 560 bp, Arabidopsis thaliana landsberg
cttcaacgtggaaaatatgatggcttgaagcctggctcacttgatgcagagacgcgtaagcttctcggtttaaaggtattttttcaaccttcctctgcagtattgaaaattagaccagagaaaatgctattcctgattaagcggtttttatcttgtgtaggaactcgatcctcctccatggcttaacagaatgcgagagattggatatccaccaggatattttggtaagctttcatactctctcttgttatcatatcaaaggcatctttgttcatgactacgttgactcttcttttttgtttgtatcacttagctgtagaagaagacgatgatgatcactcgagaataactatatttggtgaggaagagactaaagaagaggaagaagttaacactgaagaaggtgaaatcttggaaaaagcaagccctcaagagccaagaaagataatgacagttggatttccccgtattaacgcacccattccagaaaacgcagattcgtggctatgggaacagaggaatagtaacccaggacatactaattatcataatcaccttcg

SEQ ID NO: 21176 - DNA, 485 bp, Arabidopsis thaliana landsberg
tctagaggatcatccgttagcttactgacattacagaagagcctcgggacttgccttccgtcatcatctttccctcctacacgcagcacgacactctaggcgacaaagaggcacatccagagatcagtcccgactcaaacagaggatgagttcattgaccctgctggtgttcttcgttttgggtcatcctcttcagccatgccatatgacctgcctgttactttgcctatccctatggaaccaccgatttttcagcagtacttggtcgacagcttcaagtgcatttggaacgcaatagctacattgtcttgctgtggttgcattgctcctactcgccatcgtcaacgttcaccagtacccacttttggctccgagcatgagaattagccatcttccctatgtttggttcctgctttcgattaatttttcaatcttgagtcatttttcacttctatgagtcggtttgtgattttatttgagacttg

SEQ ID NO: 21177 - DNA, 1273 bp, Arabidopsis thaliana landsberg
tcgtccaaacaggatatgggatcacgtttgtatcaattcgtaaggattataataataaaaaatataaaaatcataagatcagttttgtggcttgtactggtcaccaaactgattatgcacactgataagcaatatactattaatctttgtccctaacatctgcttgagaagtatttttttttctttttctacagtttatatatgcctcgtcaattctacagcttaagagcatcatcaatgatagtttcttaggctagctcttagataaattaggtattaaatttaatgtttaaatttgattaaatgttagaaatgacttttatataagggccagatttaatgtttcttagattagtttttagataaattaagtattaaatataatattttaatttaattaatcttaattcttagataacttaagtattaaatataattgtttgtcatatttgtttaaaattttatgtcatgtatgttttaaattttatgagttgtaataactattaagttttttaaaattataatgtttctattttttttttcaaattttctttttaagaactccaagttaagattccaccattgcatattgcctaaatttcaatctcttaaccaagttcttaacttcagaattttcaaaatcaattataaaaatattcataaaaactatattaagattatgctaagaaactaccattaatgatgctctaaagcagatagagtttggtcaatcgctattaccgacacatctttgacttggctttttttttttttttttaacgtttgttaatcaccaatcagtcttcttaaaacttgtggaatttttgatgaccaaagatttgaactaatcgattaaatggactgttctttaagttacatcttttagttcttaattacaactgccaaaaatagttgaccggagttgtgttcttttttttttgtcgaaccggagttgagtacaatgtcaatatatgtgaactgttgacaaaattagctttttcctttttatcatgtgaaattggtttctgtcactgggacaataaaaatatttagtttttttaacgactaacgagcattaatattaaccacaaccaaataattaatccaacatacatgagaagacacgagttaattatttgctcgaaccggaattatcactctggtttcaaagaagaacgttaacgtctactttctacacgagctttcatcagcttatccttgagagtacgatgattatcttccctgatcatcacattcacatttctcggatgat

SEQ ID NO: 21178 - DNA, 1568 bp, Arabidopsis thaliana landsberg
ttgcagaagtagaaggaaaaaaaaaaataaactctccaaaacccttactaaaaactaaggaatataattataattatattccttacctaccaagatgcacccaatctttagccaccattctatatgctaaccgtaatataaacctttagtaacctaagcaccataccatatggtgtaaagaaaagaatcttctaaataaacaatcacacaataagtagacaacattcacaaataattcaaacttatatgtctgattcaatcaaagcaattcaggttttaagtacatactactcgattatagtagcaggtttaaacaaatgtaactcaaaaaaatcttcaatataaacaatcacagaatacaacatttacaaataactctatgaaaacaattccgtagttaagtacaattactagattatattagcatgtttaaaataaatgaaactgaaaagaatcttctaagtaaacaatcacacaacaagcagacaacattcacaaatcaaacttatatactaactatgataagagaaaacaattcacaaaagagaagatggttctaacctgtcctgtgaaaagagaaaattgataagcttcgaaatgtcccattaattcgctcagtaacgcttgcaaaacaaaattatagaatgagcaaaatgttttatattcaagaaagtgaatcaataatagtttgacataacaaaataactaaatcgatgtgacaataacaacatgattcagacaacagacgaagcttaatcaatctgcaatgaaattctcaagttttatcacccaataaaaaatcaaacattatcagagccaaaatccaaaatttgcaactcttatgcttaaataaatacacaatttcgaatgcaaaattgttcacaagcacctagagcagttcaggttaccattactaagacgaaattcatatgaattcgcaataaacaaaggcatgcaaagtagacattattttaagaatcgataaagaaaacagatctagggtaacgaattctaaaatcacacaaacatcggttattgagtctcagagattgatggaaacagatctagggtaacgaattgagtgtcaaaggaaaaaaaaaaacatagaaaatgacttgccttcgattcgatctcgaagtggacagatatagagcggattgagtgccagcggaggttccagttgcacggagagctttcacggcggcgacggagaggcaacggagggtttaatcggtggccggaatagtgagttcgtcggacagacggctgaggactgagagagttttctttcttagggttttcaaaaagttgttttgtgtttggttttttttctcgaaaatgactaagtgttatttggcggaataagtattttgtgttcccgctcattaaaactttatatcagcgtttataaagtgctgtaatattaaaactatatcttagcgtttatcaagtgctgtaatataataacgaaaattacatgacatcttcaactagcaattgagtaatccgtgctataatggtatactatcaaagaagacttttttttgtagtgaactactccagcccaa

SEQ ID NO: 21179 - DNA, 1009 bp, Arabidopsis thaliana landsberg
aaacatactgtacgataatgtttcgatagttgaagagttattatggaggagtgaacaaggcaaacaaccgccaaaaacagaggaaaatgagatagcaactaataaggatcctgcagcatgccaaattttgaaatgcccaaatctatcaatctgtcatatgaagtagaacaaaaaatcattttacatcaactcagatttaccttaaattacacaagactacaaattttgtgtgattgaaaactcaaaagttccaaaagaagttaccaattcaccgatgaagattgtagcaaaaccatcagcaacttgaccagagagcatgacaattgcagcatcccttcagaacaaatctcgattaatctcactaacccacagattaaaagtgaagaactttttacaaaaactgaggagaagattttaccttggggagaggccaatttgggttaaaaacaagagaaggtaagtgaaccaacaagaagcagtaatgtcattaagcatatgtccaactccatagtagaacacagacaatcttccaagtggttttgtcgatggatcttcttcttcttccattccgacaataaccgatgacgtcatcaaccaattgttttcaaaagagacaaaatttgttttttttttcttcaataattcgaacctgcaaagacgtgcatgtaaaacccgtcaagaatttgcaattccaaaacctgggatagactaaattgcatctaaagattcgaactttttttatcagagaaattgaggaagagaagagagatttcgaaacgagcaaggaacaaactttcgtatctgcctgtagggtcgaaaggaataaactttcgatctgaaaaatcgaatttgagtcaacaaagcctttttattagaattgtcccaaagtacgggaattagaaaaagaaaagaaaagaaaaaagtaacggtgaatgagaaagtttgtgtgagctctgcttaacgagaaacttgcttcattgtatttgtattaataatacgttacactaat

SEQ ID NO: 21180 - DNA, 1292 bp, Arabidopsis thaliana landsberg
aatagcaatacaaaattgctgatttagtccgatcaggcccaatcacgaagttttgtatgttacggtccctctctaggtggaatcggaacaagatcatcattatatacattcccaaaaatatcatctaatacagaacacgaacaccattctctaactgttaactgacaattttaaacatacaaataataaacacatacaatgttagtggccgtgcgactaattttacttactgtcccatttcacaatgacactatctggagactgtgcaaccaacggtccactcttgttcacatctacaacatccatttccgaaccaaatccattgttctgtatcctcgtcaacgtatcctgcacgtgcgacatacatggcctaagatctttatccgactgcaagcattggaacgccagctcagcgacagcgatcaccgtctgtctcactcttgtatccgtgtcaaacccaagtgacggatccaccatgtcgcggagctcgtggttctggattttaacgactgccatgttcgagaggttgatctcttggcgcggtcttgtgatgtcgactgctggaagtgaagagataagctccattaacactaccgcaaagctgtacacgtcgcttttgtttgagagttgatagcataagtggtaatccgggtcgacatatcccggagttccttgtggagcggtagatacgtgcgttttatccataggaaacagtctagagagtccaaaatccgcaacctaaaatgtcgaaaacagtaaaaaaaaaacacagaaagaagttaagattatgatccgataaaatcccaccagattgagtaataaccagtgtgagttactgaccttgacattgaagttttggtcgagaaggatgttgttggatttaacatcacggtggatgatcttggaggcgtggagatacttcaaggcagaggcagtttcaacagcgattttgagccgaatagaccaaggaagtgagctagggtttgcctgtggaccatgtagatgatcagctaacgtgccgtttgcaacatactcatacactagcagtaagtcccggctctgttttgaggagcatccaaagagagccacgaggtttggatggcgtaaacccgttaagatctcaacttcattcctgaattgctctgctcttttgaagttgttatcgtataaccgtttaacggtacgcttcgtccatctttaagcttaccgtaatagacagtaccaaagcctccatcaccgagttctttagatgggtcgaagttattagtggcttcttcaagttcttcgtaaga

SEQ ID NO: 21181 - DNA, 491 bp, Arabidopsis thaliana landsberg
cttcggctcaacgcttgagacaagtctccatcttctctttcttcaggtaatgctgtatttcacagaaagcgcactgcggcttatagctggaaaagcaataacgaaaaacacgggtgctcgtggcttaagagctcttctagaaagcatcctcatggactctatgtacgaggtaaatacacctcttattactttcaaatccgttttgctaaaaatccgcattcaaactcttttcacatttctgcaaaacatttgtttttctcagattccggacgagggtacaggcagcgatatgatagaagcggttgtggtggatgaagaagcagttgaaggagaagggcgtcgaggctctggagctaagattctccgcggtaaaggagcattggctcggtatctctctgaaaccaattccaaagattccccacaggtaaaaaccgagcttttacttaaccgataacaactgtctggcttgtttgataacctcattatctgaa

SEQ ID NO: 21182 - DNA, 344 bp, Arabidopsis thaliana landsberg
cggtgtcaaatttatgttccgctatctaaagtactggccgcgtattcacaacgttaaatcatggagacacgtataaaccatcctagattcccgatctagggggagggggcttgttgtgtatgcaggaattatcacctgcgagaactccgacttagcaccacatgaattacatatcacaactgagatttcccacgaaaccgtacgatactacggcatgagcccggatatgagtgaaaggaaagagatctactgacgaccctaccccatggtgtctggagagcgcccaggcgactaacgactttgaagaacaatagcattactatttggaaatagcaagtgatcat

SEQ ID NO: 21183 - DNA, 488 bp, Arabidopsis thaliana landsberg
taatggtacttgcttgagagcgagatgtaatagctttaagtactaagacatctgccgtaggtccgggaaaaccgccgagggcactgccgacgtctaagtctaggtaccattgttaccacaagtacgtgtgtttgttctttgtggctgctgaggcctgaacatttgggtataaagccatgcttctttcctcttgtttcgagcattaggacttattagtcggtagcagaatcacttatccgagcgtgagtacctttcgcggaaggtgatgagtgaggtatccgtatcccggaggagtaggagtccctcggctcggttggccttgcggttcaaggtctctctcactcgtcattaggattccgttatcgacgcagtcgaaaggcacgaaagtcgttttggcggaaaacttttctgaggaaaattttgacgcagagggggcttcccctttctagaccgaggcgacgctgggtcggaccctgcggagggcttgg

SEQ ID NO: 21184 - DNA, 671 bp, Arabidopsis thaliana landsberg
gctaaatatccgggtacccatgtaagtatactattctatattttgcattgtgatatattaatattacattaaataaaatagaaattattaattttgaaaatctcttgcatactttggcatttgtatgatttgcaaaaacccaaaaataaaatacaatatatattattaattttaaaaatctctttcatactttaaaaagtttaaattgtaaattttctgtttcaaaacttaaactgattcgttaactctcaaaatttgctcattatttttaaaatggtaagaatgaacatagataactacaaaaatttattaaattcagcattaaatgaaatcgtatatgttaaatatgaaacacctatcataagaaaattttcacatggttgaatattagcaaaatgcattgaaatttatatattaagacagagcaaaaacatttacacatgtaaaaagtaatttgcatatatggtagttgaacttgaattgacacatttacagattgcgggaatgaaagtagtagaaaaacataattacagaggcgtagaagcagggctaagggacctttttttttaaaaaaattttttttttaaaaaaaaaaaaaaaaaaaacccccccccccccctttttttttttttataaataaagggggggggggggggggggggggggccacc

SEQ ID NO: 21185 - DNA, 733 bp, Arabidopsis thaliana landsberg
  unsure (1)..(733): unsure at all n locations
tgaccttaccataatactctgaacctgaaagcaccataatttgtttcactacggcatgaacatctgagacatgaaataaatcacctagagatccctgtatagtgtctgaactatagtaactctaatcatagaatctactactatgaagcgaacaaaaatgaacaaactcaaatcaatttgaacatactgtatgaacaggagtccaacgctcgcttgcaagctcataaccgctaggatcatcaccgggaggatgaagaatagatatgcaaacacgaccatcagaataaactgcaggacaaatataagtaaaccattcaaacgtctgtcttctattcatattcctttgaatccttccccgatcaaaaccgatagagagaaaactaaccgttaggatgccacatatccgaagtaaacctcacggttggcggactattccgatagttttgcggaaatgtcataatcccgttaaagaatcctccttcactgcatttttacaccaagttttaaaccatatgcacaacaagcaaaatctttggtaactatcatataaagagcattgcacataagggtaatttcatctgtgccaatgcaatcccattgacatcaattcgatatctgactatctgaactatatatgagaacaaacctaaatcaagaataaaaaaaaaatccaatacaaacaaagagagaatacnacaaccacacaattatgtgatctacaatgttcaatctc

SEQ ID NO: 21186 - DNA, 829 bp, Arabidopsis thaliana landsberg
catccataaaaacttcaaccacattttcagttagatccaagaatatagacatcatgcatctttaaaatgtagcgggagcattacacaaaccaaatggcattcttatatatgcaaatgtaccaaaagggcatgtgaaagttgttttctcatggtcatttggatgaatcgggatttgaaagaatcccaatatccatctagaaaacaatagtgggtgtgattagctaacctctcaagcattcgatcaataaacggtaaagggaaatgatatttcctagaagtggcattcaattatacacatcctatgtcccgttattgttttagttgggatcaactcgtcattatcattctttacaaccgtgactccacccttctttgggaccacatgaaccggagaaacccatgtgctatccgagatcgggtaaattattcccgcatccaagagtttgaggatctctttctgtactacatctctaaggttagaatttaaccgcttttgatgttcaacggaagtcattgactcattctcaagatggatcctatgcacacaaagagttttcgatattcctttaatatcactaagagaataaccaatagcttttctatactttttcaattcttctattaaggtggagacctctaagtcactaagctcctcattaattataatcggataagtagagtttgttccaagaaatgcgtaccttagccccttgggaagaggttttagttccacctttggagccttgagttcactccaatctccatcaatgtgagacttaccattgttagtttcctccctgttggtcacctctttaatttcaacaacact

SEQ ID NO: 21187 - DNA, 568 bp, Arabidopsis thaliana landsberg
tgattgtattcttctgttcatgaacaggtgtctactctctatccgatgctcctgcactttcgcatggcccttaccttggaactgtatcgctgtgttctgttgtttctgttgttcttctatcagtaaaagcttgcgtttttactgcaaattctcaacttaacgaccaagcctcgtcctctccgtcaaggcaaagactccatctgaaaaagtcttgggggatgccagttttgttcctttcatctgtggtttttgctcttggtcatatggttgttgcttatagaacaagttgcagagctaggaggaaactcttgtatcacagagttgaccctgaagctgtgagtttattattatcatcatgctcttcttcttctctttttgctccaaagctttgatctttgtttaacttattgattgtgttgcaggttctttcttgcaaaagtgtcttctctggttaccagaaagtcccacgttctccaattcctttggtaggaaaggccccaaggttgatggcgaggcaaacgaaagctgcatccttcagtatccacgatgacggagagctactgcgaga

SEQ ID NO: 21188 - DNA, 2518 bp, Arabidopsis thaliana landsberg
cttagtgaccaaacccaaagaaaagtagtgagaaacaaaatcgaggtaactactagatgaagacgatgaagcaattgaatattgctgttgcggttgtagtgacggttcttattggaatgttgggatcatcggaggcacaacttcaaatgaatttctatgcgaagagctgtccaaacgcagagaaaatcatttcagatcatattcaaaatcatatccacaatggtccttctcttgcagctcctctcatccgaatgcacttccatgattgcttcgttagggtactatttaatctctaatccacatttctatttttacttgcaagtgttagatatgttcgtactttatgtacatatataaattaataatcacacattaaaatcaacacatttgaacttcttttttaataaaaatggtaatttgatagtaaattttagctagagcagagtatttgagatttattgcattctttttaatattgacactgattgtttttttaaaagggatgtgatggatcggtgttgataaattcaacatctggtaacgcagagagagatgcaccaccgaatttaacacttagaggattcggtttcgtggaaaggattaaggctcttcttgaaaaagtgtgtcctaagactgtttcttgcgcagatatcattgctttgactgctagagacgcagttgtcgccaccgtaagtgttacaaaactataaactcgtgacttaattcattagttacgcaaactaattgtaattataatctaaaatttgacagggaggtccttcatggagtgttccaacgggaagaagagacggtaggatctcaaatttgaaggaggctacgaataacattccacctccaacgagtaatttcacgactttacaacgacttttcaaaaaccaaggccttaatctcaaggaccttgttctgctctctggtacgttcattaacccgaaatagccaaattggtctccggtaggtttttataaccggtttactatttttttttgttcaggggctcacacaattggtgtctcacattgttcttcaatgaatactcgtctctacaacttctcgactacagtcaaacaagatccatctctcgatagccagtacgcagcaaatctaaaggctaacaaatgtaagagccttaacgacaatagcaccatcctggagatggatcccggtagtagcagaagcttcgatctcagttattataggcttgtcttgaagaggagaggcttgtttcagtctgattctgcattaacaacgaactcagcgacgttgaaggtgatcaacgacttggtcaacggttctgaaaagaagtttttcaaagcttttgctaagtcaatggagaagatggggagagttaaagtgaagactggctcagctggtgtgatcaggacacggtgttctgtcgctggaagttagtaagcttggtcggaatgtggtgtgttatggtcattgttgttttgtgtgactttcggaaaaaacaaatgttgttaatttaattttgttgttgtttgatttgtgtttatgcacccaagaatgatgtgttatggttcaattaatatgtgaatcatttaaatttccaataattcttattattctgtatccagccttctaatccaaggtaaatgagtttgaaactgtaagaaactttggtgtctccttgaatccggcatagaacttttcattattttcacacattcactaagttcatgttcttattgaacacacaacttaaagatacatgttcacagaaataaaacagcttgacaatggcccattatcagccatgtagtcgggcccattatacaacattttcaatcgatttccctagctttcagtttccgatcaagcaatattctccgttacgtcttgaataaatcttttcaaagcagtttctgacgatccaccgtccgttaaagccacgtggcacttctcgctgatctcattcactctcttcctgacgtcactgtcttgctccatcaaacacatgattcctttctcaatctcctctgccgtcacaatctccatctccgacctccccaacaaaagatctcctcgccaatgcttcttgatctccacagacaaaccaagctcttccaccatctcgaaagcgttaaacttctgttcagcgtaaagcggccaaatcgccatcggaacaccaaaccacaaactctccaacgtcgaattccatccgccgtgagaaacaaaacctccgatcgccggcttcgccaatatggccacctgttcagcccatccgataacctttcctctgttagccgtccgatcgaaaaacccttccgggagaatctcctctaggtttgtgaattctccgggaggctctctcaatatattcggagatgcacgacggagagaccaaagaaaccggtggccgcttcgatcgagagctaatgcggtttctctcacttgttcctcactgaaacctcccatgctcccgaaacagaggaacactacagatcttggcggttgctcgtctagccaccgtaaaatc

SEQ ID NO: 21189 - DNA, 615 bp, Arabidopsis thaliana landsberg
tgttctttcattccaaagaaatccatatggaaccaccacctcctcatttctctagagctaaacccccatgtcgtctgtccgatccggctcagcctcacaagctttgccgacggcgacgactatcttatcctccactttctatctgcttttcatgcaaaggcaagcatttgaagggcaataagtactattattactgtgctacttgcgatttggaattccacagaggttgtcacatctttctgccggagataagacacccctttcacccctctcaccctctcactctcatcttattaggttctaagcttaaaatatctaatatacctcgaaattgggaagacagctccggttcagaagacagctccggttcagaaggatcgatcatacatgaagttgatgatgactatgaagacgatggccatgatgatgatgacaaaaaagttgttgctgatggtgaggctgagggtaaggctgaaggtgttgcttctagtgatgatgtttcttccagtgatactggtgatgatatggacgagatgcatttttatctgatggaacttatagtcaatggaaatgctgcagggttttcttagaaggcatatatcattgtctatctgc

SEQ ID NO: 21190 - DNA, 333 bp, Arabidopsis thaliana landsberg
taaaagcatgattctttttaacactactagccataggggcctttcctttctccatggcggagatgggagccttatggcttgttaagtccttggcttccctcattgaagccaagtccatcctttattgaggggtgtctaccaatcgtgtaggcatcccttgcaaactttagcttatcaaaatcactcttgctagtcttaagctaggcattaagactagtcaattcatcattcaatttggaaattgtaacaaggtgttcactacaagcatcaatgtcaaaatctttacatctattgcaaatcgtaacatgttctacacaagagttagattgtact

SEQ ID NO: 21191 - DNA, 102 bp, Arabidopsis thaliana landsberg
caaacaagcacatcatctaagttatctctaccgagaatctagagttcaccccatgtgacgagtttcctgattcctgacccatcagacgaagttcctaaacgt

SEQ ID NO: 21192 - DNA, 514 bp, Arabidopsis thaliana landsberg
tttgaggggatccggaagagaaatactcaagattcttaagttttttttgaaatacctattggctattgccaacgtgatttgtaaaagcttgtgagatgtcgtcaattagaaattgtcactacatttctaaatcatggcattttttctttttgcatcgtaaacaaggctcatgaagaaaagttcaccttggagaatgataggaagagtagcctcctgcacaacagtcattgtctcaaatcccgcatccttgatggcttttagcgataagggagagagtgggaattgatcaaatctgtaaaccatgtaccataaagaatattatcaatcaaacagaactaaatggtcaaagtaagtcacatagtgaaaaataatgtaccttgtcttagacaagtaagaatctgaagttttgacatgttcaccagttggcttatcagtctgaacagccttagcagaagccgctttcttaataagaggctcatcattttcatcatcctcatcactactatgttcacta

SEQ ID NO: 21193 - DNA, 1475 bp, Arabidopsis thaliana landsberg
caatggaagttatgaaaaagtgggcgtcgctgaagaagaagaagctgcaacaagaggaggaacaagtgacggctaaagaaacacagacatggcagcgattaaggaatctgttttcaacgtcgtcttcgtcttcgtcttcgtcggcgaagtggaagcgagttgagataataatgctgacagagatagtagacggagtagtttacaaggtcatgtatgtagttgaagctttcgttctcgtttccacgctctgcttcttctacctctgttgtggatgccacatttgatccaatttttgtttctctcattatattattctttccaattcatacttcctctcttatggggtttagtgttagtcttagttttatacaaataagcttatatgtaatctgatcattccatcttgtagttctacattataatgttagactctgttattcaatttcttcagaagatgataacagagacgacactctcaataacatgggtacaaaagacatgtgaaattggaccaaatttgcagccactactaactttttccctttaaaatttgttgaaatggttatgttcttctatcatttttgtaaggcagggaaacatcaaagtttccaattcatctgccttaaaagtatgttatagtctttttctcaaggaaggtccacatgcttccacattacggatgtaccagcctaaaagggggtttaccatatcatgtgaatgtatcaaaaataattcttagggactattttcttgatcatccatctcatcaagaatcacatattttccagtctgacttggagcttgtaactgcttctcttcctctgttttgtgccccttttgtagtttatcatatctgacaagacatcaaaagcatacaccgttcggttccaatatacaaatttgacattgtattcatttctcagcatattagatgtttaaacaagcaagagttacttacttgtaccagttgaacaaactgacaccaaccataatgatcatcagacccacacctttcagccacgtaaattcgtcatggaagtaaaacactgcaacctgttttgcacagagtcaaagaacaacacaatgaagattttacatccccaaatatatcagcagcagcactgatacaaaattcttctggaggcagggacatgtagtttaagcaaattctatagtgaatgagaagccagttctaaagacactagttctgttttatcgagtattgacctataacaacatcaagaggccagacatgaactcataatccattctagaaagcaaactccaaacaggtgtgtctatttatatggcatatgaccaatataatctcaccatcttaagatatcagtcccttgtctagaacatcaccgcaaggtttcaatcaaatatagttcagactttcatagcttaagaatacgaggaaagtagaacttacaagctagacctcatcagttagatattccaaaaagattatg

SEQ ID NO: 21194 - DNA, 1068 bp, Arabidopsis thaliana landsberg
  unsure (1)..(1068): unsure at all n locations
gagctctgtctagctgcagagaaaagagaaatatatatgattataagaatcacacaatgtaatagcatcatctgcatacatatctgtcttgactgcaacagcttgataatattatataaatcatctgaactacacgtggttctcaaattttttaattcagatactagtttaacaaaactaatcaaaatttcgttcaaaaaaactaaggaaagtgctagaagcgtactaacaagcagtaaacgttgttaaattaatcattacatgtgtcttggattcagtacccaaaatctttcaccggatttttctcatacttcagctacttatacagataattagtaagataacatctatttttaaatatatcagatctgaagcattccttgagccattgctactacaaataaaagagtttattgttctttgtgcgtgatctttttcctctctcatcaagcttagctggctgcagaaaacaaattatgaacttatgatgatggtaatcacagcctaacagcatcataatcatttacttttcattgtctttacaaaactggactatcacaagtttgtaatattatattaatcaagaatcagttcatgttgtagatattctaattcagacattactttaacctaaatgatcccagcatcagttaataacaaaggcaactgctaaacaaacagaaaagaaagtactcaaaagtaaaaggcatcaaaagcctagggaaagccaagcacccaccttttatagaatattgaagtagctagatagaatcaagttcaggcaagtcaaatagagaaattgcagtcttaatttcataatgtgataagaatactacaaataaaatacataccacatttctcacactagtatatttaagtctatatcgtcctatttactttttgttcacacagaatcgcatctgaaacatcgataaaattttcctgaagaagcaatagcaagttcttccataattcccaagtaaacgggtacccccaaccacanaggaacaaagaagacacanaacttgatgatcacatatttgagactagctacatatattcttaatt

SEQ ID NO: 21195 - DNA, 577 bp, Arabidopsis thaliana landsberg
cgacgcaggcggtgctgtcttcttgtcaggccggtcagtggagtggcgaagtgactgcggtcacttcggctctgtcgactgaagggcgcgcgtcagatgaaggtgtcaggccatccttgcattgaatgctcctgcgatacggtcggtcggtgtggcgatctggccaaggttgcttctcggcgaagactgggcctcgggcgagccgaaggtgtatccgttgcttgagggggccctcgggcgagacgtgaatcctccggggtcggctgcccttgcccgaggctcggctcgggcgaggcgagatcgtgtcccttgagtggaccgagccttgacttaatcgcacccatcaggccttttcagctttgtgcagatggggttacagctgagattaggagtcttgggggtaccataattatggtcccgacacctagcaatatatatatggcatgaaatccactcgtcgagcccctttcaaaattcgaaaccccacccacagattcgatccaaaactcccggaatcgctcgctaatgttcacaggtggttacaaattcggcgagcaattacttttgaggtacatga

SEQ ID NO: 21196 - DNA, 583 bp, Arabidopsis thaliana landsberg
ctgaatgataaacaaaacatcaagtcaatttggactacaaaaacacaaagcaagcttcttcataattctcaaagctttgatggtgaacccaaagttcttaacagtttttggttttgaatcgtataacaaggaagcactacgttactcttcgggatctcgttgaggttctagttttatattcaatcatacacatgacatctactcatatttcactccgaaatgctaacccatatcgactacaagaaaactgttaactacccactacaaccgcgactacataaatagtcgctatatttggtgactatttggctacaattatacgactaatttacaactaacaacaatatagtcgttagttagtcgccaaattaccactatagaggcgagacgccttagtagtcgctaaagggcgactattatatgacactccctaattagtcgccaaatgttgtcgtaaattagtcgctattttgcgattaatatacgacacgtcgtaatagtcgtaatttttcgattaaaaacccacatgttatttcgtttttgtaaggttggctgtaccctgtttttaatacgacctacattt

SEQ ID NO: 21197 - DNA, 754 bp, Arabidopsis thaliana landsberg
caaaacaacccaagaaaattaatttatagggggcaaaaaaatagaaaagatactagggttttctttttaggtgatgatcaagctagctgagatttaatataaataattaccaggatttccagggagatttctctttttcttaacaagaggaggattgatgagagattcatcatgatccagggttgatgagctctgtggctgagcaaaacctgatccacttgagattgtttgaagaacttcacttgtcatgtcttcttctgggttcttgacttcttggaagagaaattaaaagtaggtttttgtatagttcagagagagagagagagagaaggagacaaaaggttaatataagaaaaagattagaaatactaagaaatctgcaagttaactatgaacgagaaggaaaaaacaacaaagacaaagatatattgggttctccacttatatatggcttttgtcttaacctataccactctatattagctcctatatataagtgtgtgtgtgtgggtatattagcaccttgatatgttaaactgttgcagccattttgattaaaatatgtgggtaatagtatttttcttttcctttatgagattattttaaaagagcaaagtggatggcggtggaaaatcataagctgaaagtgatagcagcagagccaataaaatttcataatgcagagatagaaaaaatttaccatcccttgattactttataggcacccctatgcttgcagtttcactatgaatta

SEQ ID NO: 21198 - DNA, 1152 bp, Arabidopsis thaliana landsberg
tattaaattaaatttttaaaatttatgagtttgatatagaaaaattgtataaacataagataatatgtcatatattaaagcaaaatgcatataaatttattaataaaaagacattaaataattcatattcacattaaatcatttatattagtctctcgtttcttctctttctctcaaagactctcattgtgtcttgtctcacatctagttaccaccactatcactcttatcatattattatgattcatatcccacgtagatatatatatatatatatatatgtgatgggttacttttgctcttcttctctttatgtcaactccgtttggcccaataaaagcccaatgttgtgttttggtcaaactcaataacaatctccaccttttggcaacaacacacttccacgacgacatcgacatctccgacaaccaacgtcatctcgtgaaatcaacaccactgccggattccaacctccttcggcgaacataggacttttttcccgtcagccatcgtctcctcctttccccaccgagttctctttttctcgacatggagaagatggagcttgcctttcgatgacaaaatcaaactcagattctgactactttgatggctacctccggcgaaagcaactgcaaaccttcaccttttcttggttgctctccgttctggtgaaacaagagacttctcttcgtctctcatccaggcctctcgtccgtgacacatcacaacatcacaatcatcttcaccatcaattaactccggctgcgtttaactccgccgaatcggaccgccaccatcaccgcacaactcatggtactctccaatctctcattttctcgttgatgtgatgattagagagtatctcttctgaaattttgagacacttcaaattcaatttcagtctccattggtgagctccacctcttttcccgcgaatccgaccattgattcatctgcaaatctcaggtaaatctaatctctctctcgtctcttcttcacacttagagattaagatcttctgagaattcaaaattttcgaaagttgacaaatttcaattttgttaccacgtggggaatgtttcgacgagctccattttccactgacactttcagaaatcaaaggtgagcaatttatccccccaattctat

SEQ ID NO: 21199 - DNA, 530 bp, Arabidopsis thaliana landsberg
tgttcaatataaaaataaaatataattaaaaagtatgagagagagtagaattagtctcccaagtgagaaactctaagaaacccataaaaacacttgtatatcatttattgatcaaatattattttattgttaaaatttaattatataactaatatttattaaaatactaatatcttttttttttagaaaccaaggtatctcagtgatggagcccttggtattcaatttcatcgacccaaatcaaaatatataggatactagatagagagtgactgaaggagagaaaaacaaaaatggcgattgtttccgtctctaactcttttctcactttcaattctcccaatcagctccgatttagccggtaatattcttactgcattttgttttttttcttttggtttcgcttcttatgtctctaccttgcatttgatccacacaaaaaaaaactctatcttggatattgcagaagaagattctctgccatggcttcttaactctggagtgagagtcgctgaaggagaggcaatttg

SEQ ID NO: 21200 - DNA, 918 bp, Arabidopsis thaliana landsberg
  unsure (1)..(918): unsure at all n locations
ttaaaaatatattanatntgtagtctatttcatgcattagatantatatctttctcattctttttctaaatcatagttactaattgaagcagtagcctataatgtgttgaaaccagtaacgtgtctaattttttaagaaattaattaagtaaagttactgcaagaaattgaaacatcagattgtcaaatcataactcttttaaagaaaacattactttattatacaagattgaacatataagcataaatacaaatagattatttgtaatttgaaataagtatttctttgcagttggcaaatagtaatttaacaaaaacgaaacaaaattcaccacaccaaacaaatacaaaaaatgagaatatatcaaaaacacaccaacttgcttcaaacatacattcttgaggtacttgcgtttccgatttctcaagcggcagaagatgcagcaggagagtaggaaagtggtgcttcggttaccgaagctataattgttgattccaaaacggttgcttccaaatctgcagggcttttcggtttaaaatcaagagactcgtcattgtagatatcccaccatttcttaattaacattttgacgtcttctctgtccatgttaggttcttctcctgtgtacctccatggcttggatccctttcattttagtttcaccaataataatcaatagatgttaaaatgcaagagaaagcattggcagaactatcctcatgtaaatgcattcccatataggacaatactttaatttctgtttaaagaaggtttaatttggaataaaattaatttatattgatgtatatatatagatttatagtaatagagatactaaatttcccccaaactaacattttatatgctcagcagaataaaagtcatataccatatattatataccaattttttttttt

SEQ ID NO: 21201 - DNA, 341 bp, Arabidopsis thaliana landsberg
cgtgaaagacagaccatcggttttgagggccgaattgtccgtgatcaaagactcatgaactttgtgtgtattcatcatttaaactctatttaggatttagccgattctccatcggctctagcattacaggaatgaaacctttcttatctatacttatgaactgataatcagaaaaatctacccctgtgagacatgtagcagtctcataagtccagagtacaggggaatcggccacagcgatgcaggccgatacatctgcatgtacttgttctacctcatcgcctacccattgtattagcatttgatgtaatgtagaaggtatacattgattggcatgaacc

SEQ ID NO: 21202 - DNA, 1650 bp, Arabidopsis thaliana landsberg
tgtgcccttgatcacttctttttacccaaccatgttttgattaatcataatgatctgcataggttaattttgatgggacccaataggttaccctagtttgtctatctttgtaccttgtttaccactgaactttttgggtagtacttgctagtgccttaaggcggttttgggtatgaagatacattattcatgattatacttttgttatccgttgttatttactgttcatgtcaagatcattaatgttaattggaacatagagcttaacttgagaaacacgtgccaccacaagggtttatggacgcccttggctgattaattaggaaagctagtggaggactaccttacccgaaaggagcaagggcagtaggggagtggtcagtgtagggaggtccttgcttgattttgctgcgatggcggtcaggcaagaaccctgcattggagcttcctataaactgtagcgggttttctgaagctagtggaactttgtaaaggcctcgtagtgttaccctgcctcacctcctcggtagaggtgtatgggaagtcgcgatcccttggcagatgggtaacatgacttgtgggtaaagggtaccacctctgcagagtgtaaaactggtatactagccgagctcacggtcatgagcagctcaggactctctgatgattaatttatggaactaaattcaatttgtcatatgcattgcattgcaggtgatgttgttacttttgttctactatttaattgggttggtatttacttatacttagtaactgctaataaaattttgaccaattttaaaagcaatgctcagctctaactatcctctttggtaagccttacacttcacgtgagctcccacctttggcgagttcatgcacattattccccacaacttgttgagcgatgaacgtatgtgagctcactcttgctgtctcacacccccccacaggtcaagaacaggtaccgcaggatgaggcgcatggaggatgctgcgatgagttcgtgagagatctaggccgtcgtctcccagtcaactttgggttgctggaccgttgtctccttataatgtaattatttatttattttgtatagaacttctattatatagtaaagatgtgacattcgatcctgtgccatgattcatcatatgtgtgagacttggtcccagcacacctggtgattatgttcgcgcctgggctttgggcccctaaaacccgggtgtgacagaagtggtatcagaggaatgttgactgtaggacgaaacctagatagaactggacatccattctttacttacctttgctactatgatcttttctaaacttatcttaatcctttctcatctatttccgctatactctgatcattcttacgttttccttctaaagacaaatgtggatttcacactttgaaatcatgtgcctaaaatgacctttaggaataggagacctactcttaggaccaaaaacaaaactatttttataggtatctatacgcttgaatgtttgttcttatgatacttgtctgatttggatctttgattgagtgtgatgagttgtggagtaatgtccacaattacatctgcatatacatataaaaatgtttataagataaactagaccaattaagaataccaccactagaataaa

SEQ ID NO: 21203 - DNA, 1637 bp, Arabidopsis thaliana landsberg
cttcgattcctcttgcgtacttctattacatcttacccttaacgtgcttaatcaattccttatgtttttgtctattatcctgattatcttcttcgtcctcgatggcgtctgtccatatctcctctcatttctttctctccatatagaatgtatcgtgttttgaaacacataccgaagtacaaaccttgtagtggcgtcaagatctttactcactaactccttcataataacagcataataacatgtattacatgaatgcatgtcacaaacgtttataattccctttttttttgccaacaaaacgtttataattccttgtatgaagatattttcgtctaatttttaacatccttttttagttgatttccaaataaattataaatttgttctaaagtttagtcatctgcctaattaattaacttgaagttctatattgctagaggcatttaaaggtcaagtccttttcaagtggtaactcattgaaaatgacactaatgttttttgcaacatttcacaagaaaaaaatagaaattttcatgattttggcttttgtggtctactcttttaaaaaaaggaatccttgaaatgtttgcatgcttgtttttagtatcattatttttgctgtcatacacttgatggaaagagctttgacacttctttaccacaatcactttataactcataactacattaaattctgttgttatcctaacttcttctgttaaaaaaattacttagaattacacataagaactcaaaaatgcaaattttctaaaattactcgtctatttcaagtaaagtaaacccctcaccaatcttaatttcacacagaatttaatgttgattgaagcatagtaaaagtctaaatgagtccttattttttatttttacatcaagagtactattttgtttgcatcacatatcttatatctttcttataaatacaaacgatccggtgggtacaaggcatcaatcatgtaaaagaggtacaagccggtagtgaattttgagtcggtcggtcttaaaatcgcctaaatttactcttctcgtattcaaaagattttccatatctcaaaaagtagtgtaaaactgaatcacttttcttgttaaaaaaaatacaataaaaacaaacgtaagagaaagggaaatgaaataataataatcaaaaaagaagaatttattgataacctaactaacaactaaaagatgaaaacacgacaccaacttctacctgcatactaaagtttcgtctttaaatgttgcagctgtctccttacatttcacatcttccttgtttcttctctctctctctctcccctcaaacttaaattcacattttaatacttgttacttcaactataataataataataatctttcttcattatatattttcctctcctctcagatcttctctctcaccatcttctcttgagatcaagattgagtattcttgtctcaagaatcgatactcgagagctcttatggaccaaaatggtcataacgacgaagcagaaacagtttcatgcggcaacggcaactgcaaaagcaagatcgtgcctggagatgatcacggtggagatgagagtagtggtaacaaaagacggcagaagagaaaaacgcaacaaaagacaata

SEQ ID NO: 21204 - DNA, 192 bp, Arabidopsis thaliana landsberg
acaatgacttgtctgcaattacaagaatgtcgaaaaagtaacgttgcttgatgatggaatcgctgccccacgaggtcgtagagtgcatcctagagagacttgatgcggatcctatgctgagatacaaggctgtatcgaaacaatggaaatcaactattgaatctccattcttccagcgaagacatgttacac

SEQ ID NO: 21205 - DNA, 2305 bp, Arabidopsis thaliana landsberg
gcgcatcacaggaagaatgggatgaccacttcaagacccctggagctgctgcatatggacctcttcggacccgtcgcctatctaagcatagggggaagtaagtatggtttagttattgttgatgatttttcccgcttcacttgggtgttctttttgcaggataagtctgaaacccaagggaccctcaaacgcttcctcaggagagctcaaaatgagtttgagctcaaggtgaaaaagataaggagcgacaacgggtccgagttcaagaaccttcaagtggaggaattccttgaagaggaagggatcaagcacgagttctccgctccctacacaccacagcaaaatggtgtggtagagaggaagaacaggacgctcatcgatatggcgaggacgatgctaggagagttcaagaccccagagtgcttttggacggaagccgtgaacacggcttgccatgccatcaacagggtctatcttcaccgcctcctcaagaagacttcgtatgagctgctaactggtaacaaacccaatgtatcttactttcgtgtattcgggagcaagtgctacattctagtgaagaaaggtagaaattctaagtttgctcccaaagcagtagaagggtttttattaggttatgactcaaatacaaaggcgtatagagtcttcaacaaatcatcgggtttggttgaagtctctagcgacgttgtatttgatgagactaatggctctccaagagagcaagtttttgattgtgatgatgtagatgaagaaaatgttccgatggtcgctatacgaaccatggcaattggagaagtacgacctcaggaacaagatgaacgagatcaaccttcttcctcaaccatggtgcatcccccaactcaagacgatgaacaggttcatcaacaggaggcgtgtgatcaagggggagcacaagatgatcaaatgatggaggaagaagcggaaccggcaccttcaacccagttcgagcgatgattcaaagggatcatcccgtcgaccaaattctgggtgacattagcaagggagtaactactcgttctcgattagttaatttttgtgagcattactcctttgactcttctattgagcctttcagggtagaggaggccttgctagatccggactgggtgctggccatgcaggaggagctcaacaacttcaagaggaatgaagtttggagcctggtgcctcgtccaaagcaaaatgttgtgggaaccaagtgggtgtttcgcaacaaacaggacgagcacggggtggtgacaagaaacaaggctcgacttgtggcaaaaggttatgcccaagtcgcaggtttgaactttgaggagacttttgctcctgtggctaggctagaatcaattcgtatcttgctagcatatgccgctcaccattctttcaggttgtaccaaatggatgtgaagagcgctttcctcaacgggccgatcaaggaggaggtgtacgtagagcaaccccctggcttcaaggatgaacggtaccccgaccacgtgtgtaagctctctaaggcgctctatggacttaagcaagccccaagagcatggtatgaatgccttagagactttttaattgctaatgctttcaaggttgggaaagctgatccaactctttttacaaagacatgtgatggtgatttgtttgtgtgccaaatttatgtcgatgacataatatttggttctactaaccaaaagtcttgtgaagagtttagcagggtgatgacgcagaaattcgagatgtcgatgatggccccgttgaactacttccttgggttccaagtgaagcaactcaaggacggcaccttcatctcccaaacgaagtacacgcaagatctgctaaagcggtttgggatgaagaacgccaagcccgcaaagacgccgatgggaaccgacggacacactgacctcaacaaaggaggtaagtccgttgatcaaaaagcataccggtcaatgataggatctttacttcccttatgcgctagtagaccgaatattatgcttagcgtatgcatgtgtgctagatttcaatccgatcctaaggagtgtcacttagtggcagtgaagcgaatccttagatatttagttgctacgccttgcttcgggctttggtatccaaaggggtctacctttgacctaattggatattcagattccgactatgctggatgcaaggtcgataggaagagtacatccgggacgtgccaattcttaggaaggtccctggtgtcatggaactctaagaaacaaacttccgttgccctatccaccgctgaggccga

SEQ ID NO: 21206 - DNA, 544 bp, Arabidopsis thaliana landsberg
gagatgaacttctggaaaccttactagcattctcctgatcctccgccaatgctcatttttattaaggtttccaagaagtgcataagtaagggttgcttagatgagatgattaagctcttcaactgaaaagctcattacatagatgttgatagccaacagttcttgagtctctctctccgggaacctttcaagctcacaagcactctctgagagaaacacaaataaattattacataatacacctcaactaattaacctataagtgaaccaatatccaaatcagcaaaatttctgccaaaatgacttaagctaaagttacaaattcaaactgttataccttggctgagatcatcaacgccataaccaccggcatggtttgataactgcatttttttgaaacgtttatgtcccgtagagctctgttctctctctcttcaggtatcaactcaagttccctcattcgtttctggtcatagaataaacataataagagccagatatagaagacacaaagaagatcgagagaaacaccaaaacacacacc

SEQ ID NO: 21207 - DNA, 613 bp, Arabidopsis thaliana landsberg
  unsure (1)..(613): unsure at all n locations
cctcttgaacttggagatatggtgttaagtatgtatgtggtttttcagatggccgggacagcgtcgtggccagaatgagcgcgttcctccaccgccgccatcgcctcccactctgcaggagctgatggctcagcagaatgagatcttgaggcagctagctcagcgtcagcaccacctcagcactatggtggtggagaccatcagcgtcaccccgcggtactacctaccaggagttcctcagtactcagcccccattgttcacaagggcagaggatnnnnnnnnnnnnnnnnnnnnnnnncgagtggtggaatccaaattcccgctactccatggggcttgttcagaggtcactaaagtcaggttcgccacccagcagcttcgtggacccgcaaggacttggtgggaccattttcttgccatgcagccagaggatcgagaggtggaatggagggagtcaaggcagctttcaggggacaccacataccagccgggattatggccgaaagctaacgagtttctggcactactcagggcacatgacagtgttcagtatgccaagcttttaatgcttgtccaatatgctggatatccacagcacggatgagaagagag

SEQ ID NO: 21208 - DNA, 1671 bp, Arabidopsis thaliana landsberg
gaagtacttgtaggaaccctctgtttaactgcttgcatttgcgctgaagtttctatcatgacagatgcccgcgtagatcttggttcaattggcatagacgtggctggcacaatgcatatgttcaacttgaggaagcaagtcaacgactagattgagcaagcccttctgcttatccgaaatcactatcaaattacctacacctaaacccaaatcattcttcaggtgctccacaaaccaagcacatgactcattgtccaccaccctaactacagcccaagctataggatagatcctattatatgcatccctccccatagctgctagaatctcaccctttaattttcatttcaaaaattccccatcaaggtcaatgatagaccgacaacaattaacccatgttcttcttaaagcctcataacaaacataaaacttgccgaactgttgtttatcacacgctttaggaattgtcacgatctctgtgcgggtttgcttattagaactctaaagttcagcctcataatcccataacttagcaaattgcactttttgtgtttctatcaccatatctaaagccaatattcttgcttttagacatatccacttagacatagaaagtgtgtacctcatcattatctcatctttgatgtcagtccaccgcaaacaaggtcgtcttctttcttcatctctgaacatcccatgttttaatattcttgctttcccactcttagaatggtggtgctcatcaaaataagtttgcactatccatttccatgtacgcttatgtgcgaagtagtaaatcttccaattgcaactgtcatgactacatatagctgtcaactttgtcgcaccccatctacacaacttcacatcataatttatcgttataacatacctcaagagttgatctttgaactcttcaccactattaaagttctgcaacatccaaaggtaaggagatttatccttcgagaacttctttcgtgatgatactctttctgcttggtcatacgcatcccattcatcatccgtgcccattgcatgatctggacgctctgcatcacaacattgcgtctcaaattcatcttcatcatcagattctttgacaactgtatcttctggaactttgttactctcttcatccatagcttccgcagcttctgtaccattatgaatttcttcatagaaagcttcaaacctaggattatcgtgcattctttcttttataggatcttttccatcatcttgtaatccttgattataaccatttgtttcagctgtagtctcctcatcaatctcttcgtcatcatctactccttcttcctcattgacttcatcatcatcatcaggttttcgagaggggaaaggtccaggtacagagatgtcattgtcaatgtatatatcgacttcgccgcctatcacagcctctcgacttagctccctaatcccatcatctttgtcggcgccgataactcttgttgaactattgttctcttgtggaagcttgtaccagttcgcttctgcttcaccattaactccattttctttgcaaaaagtctcgaagattgtccacgccatcagatctggatccatcaacaagtctttaacttcgaccccttcagtgtaattgaatgaatgaaattacggatctctccctgtagttttgtgagtttc

SEQ ID NO: 21209 - DNA, 569 bp, Arabidopsis thaliana landsberg
cccctcatgaaaacgacggagtacacgtaagcaggcaaggccaaccgagccgagggactcctacgcctccgggatagggatacctcactcatcaccttctgcgagaagtaactcgcgttcggatgagcgatcctgctgaccgaacaagccttaacgctcaaaagactttctgccgaaacggttttttggggttttctcggctacgtcgatagtagaatcccgcggacgagcaagagtacacgtaagcggcaaggccaaccgagccgagggattcctacgcctctgggatatggatacctcactcatcaccttccgtgagaagtaactctagctcggataaacgattctgctaccgacgagcaagccctgatactcgaaacaagaggaaaagaaacacagcttcacaacacgacgatagtatgtttgggcctcggcggccgcaaaaaacatatgcatactacaggcgaaccgatcctgcaggctcagacgtcgatggagggggacaacagcacctcggcgtaactccacttcgcgacgtcgaccgagcctggacggaacacgggcgaaga

SEQ ID NO: 21210 - DNA, 344 bp, Arabidopsis thaliana landsberg
ccggaatcgtctgcacaaacggccgagtcacaactcttgtactcttcggaaaaagtctctccggttacattccattagaactcggtttactcaactcgctaaaccggcttgatctagctcacaacaatttctctaaaaccataccggttcgtctcttcgaagcaaccaagctccggtacatcgatctgtctcacaactcactctccggcccaataccggcccacaataagtccatgaagtcactcaaccaccttgatttctcctccaatcatgctaacggtccactccctgagctcacttattgtaactctgatagccctccttcggagccatggaattttctt

SEQ ID NO: 21211 - DNA, 156 bp, Arabidopsis thaliana landsberg
gagatgcctgcggatgcagcgttcaaaactccttgaacgatcagagccgttggtgaagacttatcgtatgtatttgctattcccattcccacaacgattcctatcggtgtcgctattgcgaagaacgcctacctaattgttactgacaaacactcg

SEQ ID NO: 21212 - DNA, 1012 bp, Arabidopsis thaliana landsberg
ggaaacatagatcaactcaatgtttgggagatgacacgacacatcagcaatcatccagacattgttttcaatttgttggcaagtccttaggatcatagattccctcggtggcaccaatggtgacagtatgtgcagttgctcataaatctgttttatttatcatccaatttgttttcaccaaatgctcataagtcttaacaaataaaattttaaaatattgtaaagattcataccactcttgagaaagtttttcctcgatggtcaacggaatccaagacgtgaatcgttttagcttcgttcacaattgttggaaaaagcctcgcccatttctcctgcattatattgtaaatgtagctttgagaaaacatgtatgtacgtataagtttaatagaaaaaggtattacgatatttgatcattcatttgttgatgtcagcttagtacgtaccgcagttaagaagatgtcgatcaagtttccagcatccatttgaaccaccacgacatctttagaagactcaggacgaccatttgtgttagtcttagtaaaatatttctcatagagccctggatcaatgacgagcctatcatcaatagacgactttttccacattgtatcatccatttgaatgaggctcaaaacctctgacaccgctttttccgctgcttccaacattgcaattttctccagttgagatagtggttggaaattctgcatttccagcggctttcgcggctgaggcggtgcggtggtgttcatgtttccacgagtgtatggtcctctaaatatgcttgaaggctcggggagacggttagaagaggttccgtacaatgctggacggttcttggacgttgatgcatggtttgatggaccatggagatagggtgtggcctcgacgttatgcattgagtgacctccgtactgttttaggtagtttgagactctttcatactgaaattcatattttgatcaataaaactatatgagtgattatattttttcatgtagagacgatt

SEQ ID NO: 21213 - DNA, 411 bp, Arabidopsis thaliana landsberg
taataatataccctgagagagtttttcttgttgccgaagtcacaaatatgagtaggtttattatcagttaaccgatattcatgcataatccaatctgatttaactccttttggtggtttaccactgtaaaacactagagcctttttaactcccacttttttactaccaccaccgccggttgaaatcaccggtttatctgtaccagtcgctttccaataaccggaagtcgcagctcggttaggtctagctccgtagggatattttcgatctctgggactgaaaaaataccattcttgttcttcaaacaaagcttaatctgtcacaatcaagatctcacatagataaacacaatttagtgtaaaataaaatgaaacatatctgttcggatcttgatcttgggcttatttcaac

SEQ ID NO: 21214 - DNA, 349 bp, Arabidopsis thaliana landsberg
ttgtctcagctttcgcgctgacatgactatggctagtgctagtttttccatcgctagataacaggttttagcgtctatcaacgttttacgcacgtaatagatcggtttttgtccttcgtgatcttctcttaccaagacgccgtgtacaggtacaacggttctcattctttgggttttgcgagtataggtggtttggtcaagtatgctttcaatttcttgaaggcttgtccgcaattctcattccagtcaaactttttattctttgggaggagctgatagaacgggacgcatttatcagtggaccaggatttgatactggtgagggtggcgatacggccggttagccttt

SEQ ID NO: 21215 - DNA, 2200 bp, Arabidopsis thaliana landsberg
attttctcatggttattttcaaagaatacaaacaattttgaacttgaatttgaaaactgatttggaaacaaaataaaccaattattacaaaaaatattagcttataaatttcaaaacttatatatatatatatagatatatatgattaatttatatttgaggaattcttagtttctcacaacaaaaataagttttgtttctaaaaataacacacatttgcaaatgttctactaatagcataaatttagtgttaaaagattaatatttttcttttaaagattaaattattttcaaaaagttatatagaaataatttatatttgaaaaattctcacaaatagtacaaaaataagttttgtttctaaaaataacacacattttcaaatgttccactagtgcataaatttagtgttaaaaattatttttttcttgtttcacaaagattgatgttctatatcacatcattattttttttattgctgatcaataaaaagaagagagatatatagttaatattattaaactaacaaaacaaaaatttttaaaatataaaagttgtttttcttaatttgtgtgaaaatctcacaatatcaaatttggcggaacaaatggaataaatattgttccaactcaaatcacaaaaatgttgaaaaataattcaatattaagctcataaaaatgtaaacttatcatactatgatgtgatttagaattgtttagaaatactttaattaattttattttttaaataaagataacatagtcattttatcatcaataactaattttatctttgacaatttatgtgataggtactataattgtctataaaatttacttttatactagtttaatatatatatatatatatatgtatattatattaatatatttgttttatcacgaaattgtcgctatgtggccatatttttaatttttttttgtggcctgagggcgtaaataattattttatttggatacaagattgtaacttcattcatggatcagcagctccatgtgttcacctcgataacgaaaacgatattttgaatatagtcaaattattgattggcgataacgtattgcttctacgaatgttatggaattaattaattaatttcatgtacgtatcatattttcttttttgaaattttgaataacattttaacactttttttggccagtagtgagctgttttatgttttctgatatagtttttctttacagcttattaaaaaatttagtcatgtgatatagtaaaaatttgcgtaattatcttaatttgtgtgaaacatgtcattattaagatagtttatcaaaaacatgtcattattacactttttataaaacataatgaatatcttacaaatctactatttaaactaaacttattcatagatttggtccatatcattttatacttactataatttttattaagtttacttgattttaagtttattgaaaaagtgtgggcacaacaacacacatgcatgtgttggtggtggttgagaaataaaataaaaatgtgaattacaatagcattttcccctataactaacaggttgttctacatgactaaatatcttctaaccagtggcattttcataggcaattataaatagtatattaattagtgtaatatctaaaagaaaaaatgtatataagacaataaaaatacatgtatttaaagctaaatggagaaaaaagaagcaaaagtgttatgctagagattggatcccggaggtaagggtgtcatcacactagaaactaccaattgaactgttggtacttaacaaaattttatgcaaacgttaatatttaattatttaaccggggtcaagtgaccctcctttttcctaaataggtccgcccctgtttctaactaacatatttcttcaaaaatgcaaaaaaaaaattgagatttatcttgtcgcaacttttttttttttaatcattatcatgtcgcagtttgatggacccgtgattttgagtttcttcatttttttctatatcatgaatactatatatatatatgcatatataattgaggttgagtcagatcaatttatactgattagatgttaagaatttgaaactttgaagcgtggataaagggatataataatgttttagggattttaggaacttatgtctaaaacttcgtaatcaaagtataaggattctgggttcatcctttt

SEQ ID NO: 21216 - DNA, 337 bp, Arabidopsis thaliana landsberg
gtgacagagacaaagatccgaagcaccaattgtagaaacaaacgaagaagtggttgtggaagaggcagagaagaaagatgaagaaaccgagaagaaaacagaggagaaagacgagaagacagaagtgatcacggaaactccggtagttgaggaggaggagaagaaagctgaggaagtgaccgaaactccggcggttgtggaggaggagaagaagacagaggtggttgaggtgaaacagactgaggttgcggctgatgctgaattcactgtgtgagtgtgcgtgattacagtaggatgaaacaatgtattgtgtgtttttttggactcagatggttct

SEQ ID NO: 21217 - DNA, 561 bp, Arabidopsis thaliana landsberg
atagaaatttggactagacaataaataaaaatattcaccaataaactaatcttagtcaagtcaagaagtgaaaattaattgttaacaatactttcctatataaagggtattgatatattattgttgaccaaggaaaaggtaagttcctatattttctacaagagatttattttccttgtcagatttataatatatatacataccttatttcgatttgtccatagatttttcagattattcgaatcttagggtttcaacaaacaaagagagatgagtgaagccaccgtgtggtctgatttacccggagaactcctcgatcatatagccaacggtctcttctccaaagtcgagcttctccgattccgtagcatctgcaaaaccttccgttcctcggttgactccgacaagaattttctcgaccacctcaaacgcaaccgtagacgccttctctctccttacagtactggtaaaacgtgttcgctctctcccgcagctttctatcgagtggttctgtcgtcatatccggacaaaggatggcttatcaaactccaagatgcctat

SEQ ID NO: 21218 - DNA, 1360 bp, Arabidopsis thaliana landsberg
cgaaaatcttctgtataactcagctgtgacgtattggtattccaccgccaaactgaacatttgaatatttgagggtttagttattcgaatcaattcgaactcgtttgaattattttaaatattaactgttggcgtgttcgtgtgaatatgcacccaatcattattggcggttccccataaaaacagtttttgtaatctcgataatgatataataattgtttctcgataaactcagcctacacaaatgcaatattctattctatattcgtaagggacatcaatagaaccaacaatattgcttgtatacaaatgagcctagttataacatttggtttgcttataagtaggtcgaacatctaaatcttctgacataactcagtcgtgacgcagaaataactcagccataactatgttataactcggccaaaccctaaaactgtcttccttaagccatcaattggtacaatcaagtaattaacatatcataatcacattccaactagctcataatctatatactttatccaacatcttactttatccaacatcatactttatcagacctcatacccaaaaacatcattcatagaagtttggtcaacatagtttgtcaatcgacacttagtgcattgtgtatttattttctgttttgatattctagatcttgactctaatagagccaacaatttgatggctagtttgaaatttcataataacatttggtttctcataaatcgatcaaaccacaaaatcttctgtcataactcagccgtgacgtattggtattccaccgtcaaactgaaaatttgaaaatttgagggtttagttattcgaataaattcgaactcgtttgaattattttgaatactaactgttggcgtgttcgggagaatatggacccaatcattattggcggttccctataaaacactttttgtagtctcgataatgatataataaagaatattaatatgtttgtaacccagccgcaaagctttaataactcagccacctctaaatttattcaccaatatacgactatatagatttagtgcttcagtgtcctactaattgacgataagatgatagcgtagagatctcttttccacggagactctagtgttgatgagaaaacggtttcagaagcaaatgaggtatttatctcgaccatctgaatagtacaaatcgttagccatctaatgtggtgtatatcatctttgtgttaatgtaggagctcgatcgtatggaaataaggataagaatgaggtacgacgaaaacaggaggcgcgataaggggggtctgatcaagtgtgattgccatgctaaggctttctgtgccacttctcgggaacctgttaca

SEQ ID NO: 21219 - DNA, 2460 bp, Arabidopsis thaliana landsberg
tctaatatatatttatctatataaacgaaattgggatatatatgtgagggtgtgagtgagaccatggcccatgggggtatgtagtgtgactcaaaaggtcaactaacaatttatttaaaagtaaaggttagttacttagttatagagttcaataccaaatccataccacaattttcaactcccatcgaaccacttctttcaatttttattttcattggctgattttgtattgcagccgctattatgctgcgactcattagctaggtcttctagtttacgtataagaggatatgcagaaaagaacattaaagataacccgaaaactttactttagtataggtgacatcatatctattgtattttagtttaggactaaattaatttttaagaaaagaagagaatattatctattttaggatataatacagaagtccgtaaattaaatttatacgccataattccaagaaaaaataataaaaatgaacttatgcaaattaattttaaggaaaaacaaaaaaaaaacttatgcaaattaaaaacgtacatatatttgaacgtaaacgtgaatttcattagagaagaagaatgtgaacatcttctaagtgctccaacttaaagaagaacatgaatttaaatcttagttaataactatcatttttagctaattcttcccaattaaaacaaacaaagtaaaacagaaatattgatttgcataatttttaataatcaaatcataaaggatcctagtttcgaattagtctagtgggtgtaccaaatcaacttaaccaattgtgagttttttttttttctccctcctgctgactctaaacctaatattagtttccactttagtaaaatataataaaattttgtttaattgctaacgaattcacgaagacctctgttgtttcccgcttagtgtgtataaatacgactcctaccttttctccaaactcatctcacaaatctccaacacagagagcttctcacagtgaagcaaacaatggagtcttttcggcgattcttcttgctatccttcattgccctacttgcctacttcgctttcctcgcttctgctgaacatcacgtccatcaattcgtggtaagctagctactaatgttacattaaagctttttggtatgttcttacgtttatagaatgcccttaatttaagtttaaacgacgatgactttagatcacaccgacaccagtgaagaggctgtgcagaactcaccaaagcatcactgtgaatggtcagtaccctggtccaacgcttgtggttaggaacggtgactctctcgcaatcactgtaatcaacagagcccgttacaacattagtattcattggtaattcaacagatttgaccatcaacttcaacaaacatatgttatgttatgttctctgttttcatactctgtttttttgctctgtttttgggataggcatggaatcagacagctgcggaatccgtgggccgatggtccagagtatataacacaatgtccgatccgtccaggacaaacctacacttacagattcaaaatcgaggatcaagagggtacgctttggtggcacgctcatagccgctggctcagagccacggtctatggtgctctcatcatttaccctcgtcttggttctccttatcccttctctatgcccaaacgtgacattccaattcttcttggtaaacaactaaacattttgtaacttctaatcacttcaaattatattttcatgatcacaactaataataatacttactaaaataggggaatggtgggatagaaacccaatggatgttttgaagcaagcacaatttacgggagcagcagctaatgtctctgacgcttacacaatcaacggtcaaccaggcgatctttaccgctgctcgcgggctgggacaatccgttttccaattttccccggggagacggtgcaactccgtgtcatcaacgctggtatgaaccaagagctcttcttctcagtcgccaaccaccagttcacagttgtagaaactgattccgcctacacgaaaccattcaccacaaatgtcatcatgatcggtcctggccaaaccactaacgtcctcctcacggcaaaccagagaccaggccgctactacatggcagctcgagcctacaacagcgcaaacgccccgttcgacaacacaaccactactgctatcttacaatacgtcaacgctccaacaagacgtggccgtggtcgtggtcaaatcgctcctgttttcccagtcctccccgggttcaacgacaccgcaaccgcaactgctttcaccaaccgtctccgatactggaaacgagctccagtaccacaacaagtcgacgagaacctctttttcaccgtcggattagggctaatcaactgtgccaaccccaacaggccccgttgccaaggtcctaacgggacccgattcgcagcaagcatgaacaacatg

SEQ ID NO: 21220 - DNA, 1887 bp, Arabidopsis thaliana landsberg
cgggatggatgtagacccatcgggcagggataatcattccggtcctgggagaggtattgattactcgactaaaaggagaggaaccccatcgactgaaagaagaggagaggtggcgaccattttcaagaaccaaaaagactgaactgagggaagccctatgagtcactgaaacgacggcaggagggggcctttgattataaaaaaggggagcaaaaaacgagcttttcccccctttacaatatgaagaaagaaagaagggttgaagtttagaccgctcacagtagttctacctatagaaaagatcatgaaagaggcgatcagaatggtactcgaatccatttacgatcccgagtttccagacacatcgcatttccgctcgggtcaaggctgccactcggtcctaagacggatcaaagaagagtggggaatctctcgctggtttttagaattcgacatcaggaagtgttttcacaccatcgaccgacatcgactcatccaaattttgaaggaagagatcgacgatcccaagttcttttactcggcttttaaggcaataaatgataaactcagttttaattttaatttgatattaaaaaaaaacatatgtatggacaagacccaagaaatcaatacataaaaggtcaaagtgtaacataacatactaaaagtctttctcaagcttaacctttatatggttgctatttgtaatgatatgggacttaatattctccatctctttatgtatctccttggaggatacacatgctacgatttctgaggaattcttcatctctgctccagatttcattctattctcaatgtttctacgagccaacgagaacaatgctacagccctgacaattcatgattaattctattttagaaaagaagaaagtttataaggccaaaaccggttcatacgagttttatatcaaaaacatacatacctttcaaaaaaacttcccgtttctacatgttctctcgtatatttggctggattattacactttcctttacaataattaataacatcgtataatatacatatacaggaatgataaaaacctatgtgtgatctaataaagaaacttgcccgtttgttaggatatgtgatttgatattctccatctgtcgtcgtatctcctcagatacaaatgcaaagctattcttcttatcgatgttctgatgagccgacgcgaacaacgcaacggccctatgactttaaattgagtcccatatcatcttatcatatcataacaaagattttaggtatatagtatgagcaaaattgagaagacatataatacctttccaaactttccatttccgtgtataatcttatgaagcaatcagtttgtttatgctctgctgcttagttttcagaagaacgaaaatttgagagttagctagtataatagttataaaaaaaaaaaaaagagacagcaacatgacatatgtgttatgaaccaaaaattttaagcaaaagcttccctttaacccaactctattttagagaattaggttaatggttggagcttagctattcattaattagtataaagacctatatttatataggccatgatacaacttagattctaacctaaacgtaaaaagaaagcactttaacgtagaaaggaaattatgaaaatcaaactcataaagtaaactacataaactaattaatttaactgtcctaaccgtggactaatcaacctaaccatactctcgtatcaatatgaatgaacgatacatgagtacctgataaaggttcttcgattagtctctctttgtgaggccattttcttgttttgacgtgttttttattagtcttctttgatttatcttcaatgcattacatacatcattatgatggtgcgtacaacc

SEQ ID NO: 21221 - DNA, 1127 bp, Arabidopsis thaliana landsberg
aactccctgtaacctgtcagacaaatgttatttgcgacttaatcccgcgttgcaaactatatccgaatgtccaagaaattttgagcaagggttttaaaatgtcctgacggaagggttgaagaacatgctgcatcaacgaactcgatgaatcactgactacattttgggcatctgttttgaaaattacttcattacattttgagtggaaatttgtgttgttttacggacaacaaacttatataacaaaatattattagacaagtaagatttgttaaactacctataatcacgagaagtaagatttgttaaactactcacgagatcagttatcttattatgggtttagctgtgtcccccgtaagataattgtactttggttgggttaattatattgctctaaacccaacaagacgttttatgacaaataatgggctctttctctaatagcccaatccgttttattgttcagttttggcgccatttagaccggaaaaaaattcgtcaatttaacgagcaagaagactacagaagaattatgaagacttcagcttccaaaatttcaacatagatatcaaattcaaattcgaaaaatgaaccaagccatacacaagagaaaataaaggaaactctccagatatcatcaacagacagatacagagagtcaaggggcattgcatttcttattataactcaacaaaaataagctgaaacaatttgttttcgtgttctatgatgaaataaagccctacacaacaacatggaaacattgaattcagaataagcacaaaaacagagtgtgagagagagagagagaataacctcaaatcaagggactgtgtccatgctttactgactcttccttgcaagcttagtccattcagtgtggtatgcaccaggacgatcggttctctcatatgtatgagctccaaagagatctctctgcgcctgaaccagattcgcaggtaatctagcacgcctgtaagtgtcgaaatacgctaaacttgcgcacattcctggtgtgctaatcccagcagatatagcaagacccaccactctcctccatgcagcttgcctctgaaccatctctttagcaaaatcaggatcaaccactaagctcgccaaattcg

SEQ ID NO: 21222 - DNA, 1244 bp, Arabidopsis thaliana landsberg
gaaggagatagatatatatatacgtaaaccattttattttgtagtttgctttacttgggcttcaatgggctcaatggacttttattcttaacaaaacaaatagggtgggttcaaaggattgggtttggggtgttacacaatccatttaaattgttcaatcccaacctagtagctagtccaaagatgttccaaaagcgagctaaaaacaagagctaaaaccttgtcgttctcaatactttgaagatttcaaaatctatagcattttcatacaagaggcctcactaacaaataataaataggcttgaaagaaaaggttttaaggttaagggtagggaaaaccattctaaaggtgagaatggccattcgggttaacaaaagattggcaaaacgaataagataacccgaatgagtcttttagactaccatgagaatgcatttaggatccataagcgagaaatcaatatcaaattaagtccaaattcatagagatatttcgaaagtcatgtaagcttcacacaagtagaaatttgataggttgagagtgcctctagctgatgtgagaagaagaatgcgatcaggtggaagaaaggcgagagctttcgagaaatacttggggaaggtgatgaagagaagtggctgaagaagtctaaagactcttgtagaattagaggctttgcttctatttcttctttatccttatgtcttaaaactatgcgtttcattttaatgtgtgtgtgtatttaagggttgattccctttagggcaacctcataatatcataacatcaaaaccttaagctttattttattgtcttccttattttactctgtctttctattttgaatccataagccgagtgcgttccttatcaaaattgctttcaaaaaacgcaaaagtctaagcacgggttttctattttttctaagatgatcaagcaacgattaactatgatcaagggctttaagttcaatcctaagcttgaatttctacaaggtaattaaatcattatcccctatgcaaatgcaaatgtacactagatgctactagactcaatcctaaaagagaaaattaatatgcaaacttacatgattttttttggatttttcaaaattttcagatttttttttatttttctcaaaacatagatattgaaaatgcaacactccaagaaataaaatcaaaacaaaacataacaatagatggttagtctctcccccaaacttatttcaccttctcgatgtgag

SEQ ID NO: 21223 - DNA, 566 bp, Arabidopsis thaliana landsberg
  unsure (1)..(566): unsure at all n locations
tccgtacaacaaacaggatcgatagaatgggatcgaggtatcaccagtggatcaggaattctagcgggtaaggattgagtctgattggctgattgccattcctttgctcgagtaatcgcaaggaggtaagcatcttccgccagaggttgcttcttattgaagatcagttggtttcgggaagaccagattgtccaaaaaagccaaggcgagacganccaccacctaatcctgatggagggaggcaaatagccttactcgaagaggcgatcccttcagtgactgaaagaattgaagcgcagatcagaggggacttgaaaggggccaaactccatatcttttgggcaaaaggacacttgaagagaagatgaagaacagattcatcatcgtcacaaaaaggacattttgctgactcagtgatatgtcggtgggtgaggttgaggccaactggaagtgcatactgacctgctttccataagaggagcttagtctttggcgaagtttttaggtccaaatgtgagtttccagttgaaaggatcaggagtacccggggacaaagggatcaagtc

SEQ ID NO: 21224 - DNA, 580 bp, Arabidopsis thaliana landsberg
cgaaatagattaagcaaaatcaagatttgaggatcctccatttttgtttacggctgactacggatttggtttggtgcaagagaccatgctttggactttccttatgtttttcattctctttccctcttcaattgattctaaatctttatatatagaaagatgcatgtaaaggcaggataacgtttttgatgcgattatgcatttttcttactaatcattcatttactttgcatattattagacgagaatttatgttaatattgagttgtactttttggtcttttatatgtatatcgtagatacatgttctaggttaaatcctttgtataaatacagctctaggagcttgagaagaaatcagagaaaacttttccaaatttgtgtgtttctctacacatattgattaccaaacgtaaaaagaaattctgcaggatttaagttttcacctaagaatataaataacaactccttatgtgaaaaataagtatatagctgtttattttatttttccattggaaaaatcacgtttcactatctcttgtgtgtgacgagagtgacgcgtcttagtgttgattcacta

SEQ ID NO: 21225 - DNA, 493 bp, Arabidopsis thaliana landsberg
ccaatggcataactttgtaacaatagatgcccctattcgtgataaatgacgttttctcttgatcttttggtttcatcatgatttggttatatcccgagaagacatccataaaggacaacaactcatttccggcggttgattccacaagacgatctatgtgtgaaagtgggaaactatcttttggacaagctttgttgagatctgtaaagttaatgcacactctatcctttccattcttctttttgaccacaacggtgtttgctacccaattcggatattgtacctcccttatagatccaatctttaggagtttatccacttcttcgttcactgcttttcctctctccgctccgagttttcttcttttttgttttaccggtttgaaactcgggtctacgtttagctcgtgacaaattatatttgggtctataccgggcatatctgctgccgaccaagcaaatgattttttgttcctttttaacagctcaactaa

SEQ ID NO: 21226 - DNA, 1521 bp, Arabidopsis thaliana landsberg
aaaataaacttaaatagtaaaaatatcttcaagacaagtgggacagtacagatatattttgaaatcctccgctgtcatacagcgcagagtacaaaaacaaattatctaaaactatcatgttacaatgtacaagataaaacaaactataaggaccaatttgaaaataactattttagaaaacttattgaagaagacgtaaactatatatagctgattattacctattcaacaaatccctctttttaaacctactcaaagccaaggacaagaaaaaaaaaagagtcgcccattttcttctcattttttttttgctcttgacgaagaaaccaaaaaaaaaaaaatgagagagatccttcatatccaaggcggtcaatgtggaaaccagatcggagcaaagttctgggaagtgatctgcgacgaacacggcattgatcacaccggtcaatacgtcggcgattctccgttacagcttgaacgtatcgatgtctatttcaatgaagcttcaggtggaagatacgttcctcgtgctgttcttatggatcttgagcctggtactatggatagtatcagatccggaccgtttggtcagatcttccgtcctgataactttgtctttggtcagtctggtgctggtaataattgggctaaaggtcattacactgaaggtgctgaacttattgatgctgttcttgatgttgttcgtaaagaagctgagaactgcgattgccttcaaggtactatatatatatttttctgaattttccattatacgcaaattttctatagtgtttgatgtcgtgcatcataattcgtatatttactggatttagtttgattcaataatcatttcattcgtaatttgtctgacgtcaccgtatcgataatcgtttatcaccacagatctcttcttgtaatatagtatgatatctatctacataattagtaaaattaggtcacggtttagtaagtgtactatagtatgttattttgatttttttttttttttactttgatgatcttgtttatctattattggtgtgcatcagtgcatgtgggttcttattcagtaatacgatcaatcaaatcgtcttatttaatgtaattgcaagacagcaacgaaataattgaaatgcaagtgctgttttgtgtggagtgggatgttagcacttattattggtagggccaagctgttttgtatagtattgagatatttttttgtcaagtttttttcttcatattaaagcttcagagataagatattatatcattgtgatgtcgtgatcaaaacattttcaaggcaccgtgattacgggataaaagatggagtggtcctactacatcatatagatttcttggaattttgtagtaaaaagttaataaaaatctcttttgcctttagagtttatagataatgcttgtggagcccgaacaacaatctcacgtgattcgttttttttagttacttttggtcaggtctcacgtgattcgttttatacattgattatttaacttcaattataa

SEQ ID NO: 21227 - DNA, 922 bp, Arabidopsis thaliana landsberg
cctgataagctacggtccggacgtgatgacaaccttcttttatcagcactattgggcctaacagggtctgaccttatcagacttgttcaaaacttttttgccgatgatagtcttttattctataaagcaggcccagtacaagcaaaagagatttatcgatattctccgagcatatggtgaggcttcgggacaacaactgaatactaacaagtcctcggtaatgtttggtcatgaggtgaatagctctattcggaataccattaaactatctctttgaatatttaagaatgggggtatgggatcttatttaggactcccggaagaaattcatggttcgaaaacccaggttttttcctttgtgagggatagacttcaaaaaagaataaatgggtggacatcaaaattcttgtctaaaggaggcaaagaggttcttattaattttgtggcacagacccttccgacatatgttatgtcatgctttcttcttcccaaaggtagtcgctcaaaacttagtagtgcaattgcaatttgttggtggaagacaaggaaagaaagcaacgatattcattggatagcttgggataagctttgcacacccttttctgatggtggcttagagttcagaacattggaagaatttaatcttgccttattagcaaagcaattatggcgtttaattaggtttctaaaacctctcctcagtcgggtgttgaagggaagatactttaggtatagtgatcctatacatataggaaaggctagccgcccctcttttggatggagaagcattatggcagctaaaccacttcttctctcgggtctacgacgaacaataggatccggaccgctaacccatgtatggcaagatccttggattcaatctgtccatacaaggccagcaaaaagtattcttaacataagg

SEQ ID NO: 21228 - DNA, 1975 bp, Arabidopsis thaliana landsberg
agagttctcaaaggcaaaaaccacagctaatctccttttctgtggttgcatatcttgtttgagcttcgtccattgttctactggcgtagtagatgacgtgaagtttaccatgaatcttttggcctaggacagcccccaactgcataatcggatgcattacacatgatctcaaatggatggtcccagttgggtgcttgaacgataggggtagacaccaatgcttcctttatcaaatgaaaagctttaagacaatcttcatcaaagttgaactcagtttccttgcacaacaatctagtgaggggtcgagcaatctttgaaaaatcttgtatgaacctcctctaaaatcctacgtggcctagaaagcttctgatatccttaacggtcttagggggttgcaactgaatcatgacatcgttttttgccttgtcgacttcaatttctctaccagaaatcttatgcctgcaattccttcctaaaccatgaagtgacatttctcctagttgagtactaaattggtttcctcacacctttctagaaccctctacaaatttaacaaacatgaggagaaagaggattcatagactaaaaaatcgtccatgtatacctccattatctcctcaataaaatccgagaatatcgaagtcatgcttctttagaaagtcccaggagcattacataaaccaaaaggcattctcttataagcaaaggttccatagggacagatgaaagtggttttttcttgatcattagggtgaattgcaatttgaaagaaaccactatagccatcaagaaaacagtaatacacatggttagctagcctttctaacatttgatcaatgaatggcaaaggaaaatggtcctttctagttgcatcatatagtttcctgtaatcaatgcacattatgtgtcctgttatagttctagtgggaataagctcatctaaatcgtttttaactacaatcattccttccttcttaggaacacagtgaacatgagagacccatgtactatcagaaattgggtagatgatatcatcattaagtaatttaagaatctcctttttaaccacatctttcaaatttggatttaatctcctctgtggttcatcactagtatatgattcattttcaagatggttcctatgagtacataaactaggtgaaattcttttaatatcagctaatgaatacccaattgccctcctatactttctaagctcatttagcaactggttcacttgttcatcacttagtccattattaataataacgggataaatatcatttggaccgaaaaacgcgtacctcagaccttttggagaggcttaaggtcaacctttggagctttgagttttgaacagtcatctgagctttattctcccctccatggtcgagcatctcagtagagtttgttttttcagcgattaggctcatggtgcatcctgatcttgcttcttttgagggaacgatcaattcctcaaactcttgtggtccttccattggtatgtgggcgtcaaggtactctttgtacccttgggtttctaggtgtaggtacccttcttctccatcgttggttaaggcacttgccaggtgatcctcttctgtaagttcttccagtaattcgtcagccaatcaatccatttcttcgatccgaaagacttgtctattgattgtcggtttcttcatagctttgttaatgtcgaaggttattttcatctcttccccaggtttaggtcgatttttcccttcttgacgtcgatgaatgctcctgcagtagctaggaatggttttcctatgatcaaggggtcttttggctcctcatccatctccaaaattacaaaatcagtagggatgtctattgatccgattttaacaggaaggtcttcgagaactccgtgagatattctgactgatctatcagctaataacagaaagataccgcagggcttgtatttactaaaacccaatcttctggc

SEQ ID NO: 21229 - DNA, 1226 bp, Arabidopsis thaliana landsberg
tttgatttttatcttcactaaacactaattaaatggacgtggatttcttatacgattttttcatgcaacacttaaatcgacataaatttaaatattttggtcttcataccctaattttgataagatataatagaaaatttcgtatatctttttttttttttggtaaaaagttttttttttttttgtttcatctccatatttagaaaatttatttcaaacttcgttctcgtttgtgttcatcttaatttttaaccatgattgagtcattgaccattgctcaaaacatacgcataaaattcccaaaaagtagtgtgtgtcgtgacaaaacccgacccgttgatttacgcggtttgaaactcgacccgaatactatccgaacccgtaactttggcaaaagcacatcgtacagctcaggcacttgtagcacgtcgtctctcctttggtttctctccttatattcgacgagtgactccgattggatcgctatttcgtcatttctcactttcctaaaagaaaaaaacgaatctctctccaccatcatcacctttctccttcacttgcctcagatctggctgcgatttcaaatcttccttagtttctctcgcatcgctcggccgttgacggtcccgtcctttccgtggatctgattctggccccggattctctcgccgcgatctgaggtcaaacatggcggctgctaacgcgcccatcattatgaaggaggtcctaacggtgagttctccgtttttaaatctccgggaatcgagctaaaattttggacgattaacatgtttctatagttgtagtctctgatttctatcgatttggttctgctcacactgttatatgattgattcaagtttcattctgttctcaattctacccgatcgttgagatcaagttctctgatcagattttctctgcggacgctcagatctgtgttatctgaatgtatatagtccttagttttaagttattgtgttgcgcaatgtgcttatctactcggatcttgtaactaagttaatgaactatgccaattgattacttttgttttggaaattttccagcttccgagcgttgggatcggtcaacagttcatcacctttacaaatgttactatggagtctgataagtacatatgtgtacgagagacggcaccgcagaacagtgttgtaattatcgatatgaatatgccgatgcagcctttaagaggcctataactgctg

SEQ ID NO: 21230 - DNA, 1321 bp, Arabidopsis thaliana landsberg
gagttaagttgcgtgaccactatcgtttactttgaaattgtatgaaaagacaaaagaaggtctttgaatatcggataatatatgtgtggcttaagatgcatatacttctaccacgaagtatgttaagtttaagtcatgtgaaggatactacttttgtagccatgtggctacctcaatagtcagatgaattttgacccatgaacatcttccctttcattggattgggcaaaaaaaaagggttcaaagtctacaatactggcttgtatgattgatgtccaaacacctcaatgtaagctttaaaatgcagtatgaacacaggtgcattggtggaagaaaaacaagtcgaacaaaataataaattttaccagctcatgtgcaatttctttgttttacatagatgaagtctcgtccccttgttgaattaacttaagttgaatagtgaatccaataccacttgatctatagtgtttatgattgaagaaaaagcaacttatgaattccaatcgctacaatttcataatcatctcaattccaaacatattcaaattatacctaaaccaagtcgcattggtctagctagtggtaaaagagagaaaagtttctgtaatcttggttcgagtaacattgatctccagggttcgaattctaacatggttttcccaggctccgctgagttggatgccatgtcacctgacatgttaattgaatcaataagcccccttgtaggtgtggcgttagctcttttctttttgtataagtgctcttttgctctctctgtttcagagcttggtgtgtttttgggttaacattgcattatgtaaaccttttttcattggtataaatttaacattagaccaaaaaaaagttagggacagcatcattaaatattaaaaattagaagttttttccaaaaaacacaattctttttttttttttttttatcagatgaatattttaccgtatattggagaagacgataaatttctcaagagaattaccgtttagaaaactaagttctaaaatttagatcaaaccagtttgatagacaaagttccgatccagttttggtttggtatagacatttctacaacaatggatgaaaatagtttttttttttttgtttggattaatgactttcaattttattctgttttatttgttgttttacccatctctaatactatgaatgtattctatttcaacaggtaacataccctatatattaagcgcttcttgtctcattaaataaaaatttaaaacatgaatttaaaataccaaatataattaggaagttaaatttggtggaataataaaaatatgt

SEQ ID NO: 21231 - DNA, 1388 bp, Arabidopsis thaliana landsberg
aatatatctggaaaattaaaaattttacgtgtgatttttaatttctaattgttaatttacatttgaagataattatttgcaagtttatgagtaattatttaaaaatatgagtcatcctaatgttatgtaaaataataatagtatttgaaactttttaaagatgatgagaggttatggtagccctaggacttcgaattattcgggttattcgggtcggtttgttcggtttgcttaaaatttgagttttcaaattctcatccgaattgaaccaaattctaatttggttcgggtcggttggtagtcggttttatcgggtctgttttatggttttattttgcctctgaaaacatgcaaacattgtcaataattcggttcttatatcccgaacaagcataaaaagtacaaaaacagaagaaaccttacaaaagcatacataaagttgtactagtagcttaaagctgagtttgttagtttaagctactagtagagacataccgaatattacataccattatagaagctgccaagctaacattgtatcaagaagctagcatttcatcaaaaaactataacagaaccatacagatatcaagtttgctttagtagttagcttaccagttgtagattctcaaaagcatgctaatctgcatcaaaaagttgtcaaaagagcagcttaatgtcagtactatctaaggctgctgttcttctgcatcaaaaaggacaaaagtgcagcttcctacctacctgtgagaatcataacaaagacatgattatgtaattcaaatcataatcaaaaaagattgaggctactttaagacccaaatccggagaatcatacctgccatactatgaagaatctagacatgagttattgttgaatttcgagcatctacaaaagaaaacagagtcaaaagttatcaatacttcaatagttgagaagaaagaaaaaaacaagtcaaagagtttgtcaaacttacaaagagactcaaagaaatcaacttcttctaacatttggaccaagtttgctactgcgccatcttttttataagaacaccttaaccattgttgtgtgcatagcaaaacctcaaccatgtaaggagttaaagaactcctataaggatccaacacccgaccacttgtactaaaagctgactctgaggcaactgatgaggcttgaattgcgagaacatttctagcgaattctgacaatatagggaaccctgggcaattacgtctccaccaactgagaatatcataaggcagcaccaacttattttctactctagcctcaatttttttcgtcaaatacatttgtaactcattgcagctatctttattaccctttcaaatcaaccgcttttatcaaaataatgcaaggcatttccctt

SEQ ID NO: 21232 - DNA, 334 bp, Arabidopsis thaliana landsberg
tggattgagttagtgttattggaagggataagtactacataaaagggataaatgtaaaaaaaaaaggacttatattatatagcatacgactgcagagtatcacctttgtaggctggagatataattacaagcctctgcgctgatcgctagaaacctagtatttgctaatacgctccgtggcgggctaatctatatcataatcggaggtgaaattcctcgcccaatcacacattaactgctcgggaatcataagccactgatgttttcttctgttacgacctatatccctttggctttcactcaatctaataccggcctatttctttaccataga

SEQ ID NO: 21233 - DNA, 1181 bp, Arabidopsis thaliana landsberg
aaataaatttttcggagattgacacaaatggcactagaaactttattattctaaaaattgcacctttttttgaaacttccaaaaatagcacacaaaatttttaatcctctaaaaattgattaaatagtaaagttttttaataacatttgtgtcaatcccccaaataaaaatgagagcaaacactaatctaatattaaattgaatcaaatttgtttttaaatagtaaaaaaatataccgtaaattagaaatagagaactcaaatataataccacaaacaaatattaaaattaaaaatctcttataaatgatgaaaatatataccctaaattggaaataggaaacccaaatataatactatatactaatattaaaataaatcaaaatttctattaaatggttgaaatatatatcctaaattggaaacagagaacccaaatatattttttttaaatttgtttctaatttattttggttgaatagattttatataaaattatagtattatgaaaataataaatcagtgataatacttttagaacaaaaacttcataataaatcaagtagtgctttttttggaagtttatggaatgtgtgctattattgtctataaaacttgttttagtgctatttttagaaatttctctaaagtttttaccattttcctacaaattaatataataatataatatcaattagttaacctactaaattcctaccaaataagtaaaacctagatctacaaattttgattaatctcacgcttccaccattaaactttcaacgcctccaccaactttctcagctcaatgcgcgaattctcaggaaatccaatgagaccaccaagtctctgatatgtgctctcaataacatctcttcgtgaccttgctttccctccttaccctttgctgcagtttcttcaatctaccatgacacctctacatctcaatctaaatccgatgtctctccgcttcatactttgccgtctgtaagctcatccaatttccatctttgagcctcaccctagattttggtttgtacttcatttgcgaggcttcaatcgatttagtggctctggaatttgctcttggtctgcgctcactcatgtggaagaagaatgtgtggccatcttggtacgggaacgaatcagacgagcttggtccaattcgattcgagttcgagt

SEQ ID NO: 21234 - DNA, 2150 bp, Arabidopsis thaliana landsberg
tgaccgcctggttttgatgtattgattagcagtttgatgccaaacacaacttattaagtgtcttcttttgacttagatgtgtcttgtgttttgatgagtgaatgtgtctttgtcttaagcgtgtgtttttatgtttgaattagatgtgtcttaagtgtcttaagtgtttgttatgattagttgtatgtggttttgagtcttaagtgtttgttatgattagttgtctgtggttttgattgtattaagtgtcttctgtattgcttgcaggtttactcgggacacaaattcaagcctgttaaggaagattactaaagtatggacaaacaaatttgatggtctgttctatagctgatcatgtgttcctcgggatagacgagaaaaatactttctcgattttgcggtatagttttccttcctcttgccttaagagtattaagttaagctgctttgttttcactaacatcctctcttttttatttgtagaaaacacaccattgggatcctttgataacaggtacagttcaatggtattttgaagaaatctttaaacgaaggatgaaagacatggttagcatgataaggactagtcgagagtcccctaaatggatcatcgattctcatatctggaaagcgacgtgtgagtattgggatactgaagaagcaatagcgaggagtcagatatattccaaggctcgcttgtctgaccgtaatgggctcggtcctcacatccatttgtcagggccaaagtcatatcaaaacatcaaacatgaactggttattaacttctatctctgtttttttttaatgtgtctctgtcttaagttcagatgttgtattaagccttgtttatttttaacatcacaggaaaaagagttaggaaggagggtgagtgttggtgaggttttcatcaagactcataccaaaccagatggtacttatgtagataaaaaggcagagcagattgttaaaaattatgagaagaagctgcaagagaagttgtctgaaatggaggcagagacttcaaatgtttcagacggggaatcaagacctcgggagctcacaatagaggatcatactgtcatctttctagaggtaaagtttacattttcacttgcatattgtctgcattttctcaagctctttattaatggtctggctatttttttcataggtcacagagacagatacaagagggaactattatggagttggaagcctcaaagataatcttccggatatagtcactggaaagggcaaacatgcagcagactctacctcctttgtgtcattgcaagagcaactgaaagaagctcaacagaagatcgaagagcaggctgctcataatgctagacgtgaggaagagcaagtccgagctgtggctgaacagaaagacaagctggagcacttggccttggtggaaaagtatttgcgccaaactgatccagcctttctcaactttatggctactcaatcttctgaagcaaccataaccgatcctatctaatcttcaccatctcagtcttaagttaacttagtcataactctcatgaatttctcaaaccttttagttgtatgtcaaattactagaatcttgtattttatatgttttggatattgaatttggtgatttttgaatcttttcaggtttttagtttgttttgaatcatgattttggcttgtttttatgtgttttggaatgaatttggatacaaacaaaatcaaacacccttttttttttttttttggctgaaacggtagtcgattaactgtcgttaattggtcactatttagtcgctaaattgtcgcaaagtagtccatacacgagtcgatatacatgtgattcaatattaacttagtcgtaactcagtcgtcatattatacgactatgttacgacagatcttacgacatcgagtattagtcgtcgcgtagtcgttatttagcgactaatgttacgactatttgggttagcgactatggattcccgacatcgggaattagtcgtaacgtagtcgtaactactcctttaacgactacgttgcgactaatattgcagtcgtaaaccccgtgttttcttgtagtgttggtttgtcataaatcaccctcttcttcctccagttgagcattttgcacaaaatgctaggattaatat

SEQ ID NO: 21235 - DNA, 723 bp, Arabidopsis thaliana landsberg
acattcgttttttacttggaaacaagctagtttggttttgttcatattttttcccatcgccctcagtctcccaggattgtcaggccctaacagttggctaagtgaatcttgtgcttcattcttcccatttgattgaggaccactgctaacaatctcagctgccttttttgcaaacatcacaaaccatcacaatttcaaaaccatcacaaaccaaaatttttcaagccatcacaatttcaaaaccatcacaaaccaaattttatcaagccatcacaatttccaaaccagcacaaactgtcacaacttccaaaccatcacatactcacaatttttcagccgcattcgtattcactggtgttccatctttcttggtctgtgacttaacccagacctttagcctcgtcacttcagctggtccgcactaccagttttctgaacaacacaacatgccactattagtagtaagtttaataaaaactctaagcaataaaaaacataacaatcttctactagtctaaccatccctttgcgactacaagtatgaagaattcggttgcgccttctttccttgtagttatcgcttataacctaaaaatgattgttaattagtaactttctatataataaataaacttagttttttttctaaaaacataccttacattcagggctcattttgctctgtcacgaattttctgcactcaaatggagaaaacattttag

SEQ ID NO: 21236 - DNA, 794 bp, Arabidopsis thaliana landsberg
cgttttttttgcttatgatttataacacgttatcagcatgatgtctttaccgcttgagcgtttatgagataagtaaaatttatggtatttaattcgtttatgtttatagaatagaaatattttagacatcgtgattcgtaagactatgcctttttccggattgatcgttacaagtggtaggctctgcctccttcacgatcaaataaaataaaaaagctatgtcttttccggaattgatcgttatatatatggtagactatgcttccttaatgatcaaataaaaggttatgcttttatcggaattgatcgttatatatggtaggctctgcctccttctatacgatcaaacaaaagctatacctattgaattctaatatggaatgctatgcctcctgaattcttgcataaaaaggctatagtccatctgttattatttttgtgaatttatatgcttaattattttttattttttttttcgacaaaacacttttattgattaaacagagttattacagagccaatttggcagagaaccaaagtcagaataaaaatcagatgaattacaaccaaactttgctaagttatgcgctatattattgcccactctcctaatgaatttaaactgacagctagtgaattttgcttcccaaaaatggatatcgattaataaatttgctaaagagccatgggatgtagacctcgcaaccagatttatcaaagtctgtcaatctccttcaaagatgacaaaagtaaaacctcggatccatgtttgttgtagggcagccaagagcgcc

SEQ ID NO: 21237 - DNA, 1301 bp, Arabidopsis thaliana landsberg
gatatatggggtctattaaaaattgctactcattttcaggtcatcactcatcgtgcttaataaatatcagagtaaaataacttaagtaacgttgatcctatatatcactattggatgatttctattttacgacaatgacagagcaattaatggttttttcttttgaaaagaaagagaatgatgacaacttacttgagtcactgcaattctagaacgagcaagcacacgggagcattgaaaagggactgcactgctagtgcctgaggttcaaaggaaatatggtttgatgttaatgagtggagtgttacagagaggagaagtttcgagagagttaggaatgcgaaattattgttactagtcaaaacacttaagccaatagattcagagatctggaggatgaagacagtattccgagtaatatattcaggaaaacctagagaactgaaaacgagatggattgtaaaattgtgagtcgtctaggcggggatgcgtgtataagacgcaggggcttgtaacgactgtagacaaacccttatagaggcttctttatgggcctttgttgggcctaataagtaaagggttaactactaatctttcatcaaagtattttgggtttctctaccaagcccgattcaggttcttccacggctaaataactaaaagtcaaataaaatgatgtgaaactttaaaacgtgaacccaaaaaatatgatttcaaatgtagtagattcggttttctcctgtggtttgattaatcgaccatcccagcttatgttaaaataattaaatttctgttattcaattatatattttttaataaatagtcttaaatctcgtgttattgctgttataaatatgtattaaaatataaattattattataaatattatacactgtgttattttaaataatatgaatattttgtcgcttggtcatatgcttcaatttttttctacaactccgttttttttttttttttgctaaattttgtaaatattttataaaatggaaacaatttaggttacaaacataatttgaaacccaaaaatatgaatccatggcaaaaaagaaacaactccgttcttagattcgtttttagcgatatctctgaattcactcacaagataaaatgtgagccttatttgtcgtttttatgttgatataggaggaaacctaataggctcttagggatgtaccccttaataataatgtagataatgtagatgtgtagatatttgataaatagaggagaacagctcagattaaaacaaaacaaaaaaaaactaatagatatatagtga

SEQ ID NO: 21238 - DNA, 814 bp, Arabidopsis thaliana landsberg
aacttaacctaattccgccgctcaacttctccatggtcgatatcggtatattccggtctggattccctgattcagctaacttctcctttctccagactctcagtctccgctcaatcatgtaaatccttcttccacattcattacattttgtgtactatatcaaactttcgaaattgctgatttaggttttttcgaatttgggaagatacttgtgcccggagccctacccagagagcaatctccagttccttaaatccaaaggaatcaagcttttccagtttggcattgaaggcaacaaggtaagcatctttattctcctctctgttcatgaagtctccgtttttaattgctctgtaattctaaacctcacttggataattcactaggagaattctcagaattgaaaagtcatatcttgctgcaatgtgttcctgacttagacaacgagatttcgttgcatttatggagttctaagcatcagaaacagggtcccttaactaatggactttcgaaaactttggtacacattacatatattaactggaactcaatactatttctggaatatatcatagttcattcaatttgaacggtttgatttgcttgatatttattgcctaattgttcaagaaatcctgtctcattgttgtttacttgagactactaaaactgtttctgtgtttacttgatccttcatgggtactctgttccaagacatattttataattatgagaataccagaaaaagaacacatctttctttattgttttgcctctttggctctttccgtctctcctgacctccactgatttg

SEQ ID NO: 21239 - DNA, 594 bp, Arabidopsis thaliana landsberg
  unsure (1)..(594): unsure at all n locations
ccccgccgggacggggaccacagctagctctcgtaggatgtcaacgcgaggcacaggcctacgggagatcaccgttctccggcataccaagatggttgccttcgttgggaccccctagatcgacgtggaaacattcacgacttgggccgcagtcctcgtcgtcgaggctgtggctaccgtcagaacagtcggaaaggcagtagtcgcatgcggtcatgaagtcccgcattgcactggcgttaccaagtccggagaaatcccaacagaagtcgggctcgtcatcttcctcggaccccgagggcccgtaggtcgagacgtccgtcagccggtcccagggtgaccgcatacgataccccagagggtttggactcgcctctacgagagcgtccaccaaagcgaagtcgcttggcaggtcgaggctgaatccaaaaggcgtgagatgggaatcggttggtcctcttggtcgacgggcggtgacgaagccantctagggactgactgcaccgtcgtctcaggtacgagggtgacgccagcaagtccttcgcgagcgtgctggcgtcgtcatttgcttggggttggcgtgttcggggagat

SEQ ID NO: 21240 - DNA, 2119 bp, Arabidopsis thaliana landsberg
aaaaaaattttaaaattaaaattaaaattaaaattttttttttttcttaaaattaaaaaatttttaaaaccaaatttgaaaaaaaattaataaaaaaaacctacaaaaactaacgttgaaactaaatatggtaattatagtgagtggtcatttgattccagctctctaataatgagttcaagcataatttgacagtgcctttccttccgcacatactataattgatgtatataagtaatcatgtttggctttaatatttttcatcctacgtatatgcattgacattcaataagtaattatgtttactacgttatcataaatttaatttttaatttttaattaataaatatttaatttgttttcctgtttgttccttatcaaattttggaaggaacaatttttttcttcgattcctcaaaaaataaggaatgaataggaatagtgtaggatccacatgttatagtttggaaaaaaaattactgttgaatggtaaaaaaaagagaaacaataaggaacatgttgttcctatccattcctttcctaaaaagtagtcacccatcgaagtttatctttcaatagcataccttcttgattaattgcttctataaaaaaattcaagatcgttttaattaatctctatatgtttacaaaaattaacaattctgaattgttaaaagcattatttcagaagaaaaagatgatgaatatagaattggttaggtaatccaagatattctgacattcacatgaatcacatggatcactagatgctatatgtcatcatattttcttcttctttggtttttccataaaacctttagttggataaataataattggaaaaaaaaacatcacgatattgttttctagttagctacttttttctaaaatttgaactaccaccatagaacatggtattttataatctataccattcatgggtcctatgtgacttaaaacggttaaaaacatattaacagtaaaaaagcgcggaaaatagtacaacactgtaaaaaaaaaagtggtaagcaaaagacattcacaaacaaaacttggttttgattgcagctaaaaattcggtttggattggtaacttgtatcgtatgatgaatcaagtgaattagttttatggtctctacaagtaataatttattatcttctgtacagtcacttgaaaagtagttaagcattaagggacatattttggatacttgtgtgtatctacattgtacaacaaattgaaaaacagaagaagaaagaaacaggttatctattatgttatctattatgcaacgtgatcattgtggccaaactaacgtctacatcattcgcaatacaaaagaaacttgaatctatgattctgttcattgatgaacaaaacataagtgatgtaataaaactcttagtaagatagacaagaatcacagtacttattcggcagcctcttccatcacatgttccgcggtgattggagccacggggtaataatggtaatgtagctcgccaacgtcgtctccagagagtttcgtccatccttgcggcccaacgtggtacactgatcatacagatttaagaaagtttaatacaaaatttaaaggaaaaggatcacaagatgatgatgtattggcagaagaagtaaggattgatctttaccgctagcaactccaccactagctccatcacggaatgtagcatggtagatggatctccttgctaactctgaggcttcttcaaccgacatatcgaatttgtatctgttaacaaaaaaagaaccataagattgagtggttataatagtaaagcaagatctagttttggtttgggatttgactaaaagagaagtagggcaatgatgatatcttgaaatagatacgtacccgctgtccagaacaccataagcgtatggtgaaccggaaccgacagagaatctgtctcccttaagccgtcctccttcgttatcaacatagtacaatccagggccctatttcaaaaaagattacaattttagcatctcgacttttgctttggtgagtgaaattacagaccgagaggaaataacagttaggatataagtttaggtactgactgtttcatccatccagcaatcatgtgccaacag

SEQ ID NO: 21241 - DNA, 570 bp, Arabidopsis thaliana landsberg
ctattatttcccttttttaatactatttgagcactgtgtgatgatgtccatgttatgtaactgctatgtacgtgaattgttgatcctggcacgtacatggttcgcattcggtttgccttctaaaaccgggtgtgacataggtggtatcaaagtcgtgctgactgtaggaccgctaacctagagtagaatggtcattctaaggattatagacctatgtccctgccttgactttggtatcccttcaaaagttggtcatatcgaccaaacctatgttctactatatattataccttgctgataaactgtgtttcattctaatccttcatttatttatggttcattacttgctggtcatattagttctgttctcactcttatgcttgcggtgtcttttgtagatggctcccttagacacaccgcacgaaagtctgtcatcccttcttaccctcctgtctcgcggagtcctgcttcgtggtcccgtgaccggtcagtcagccacttagagaggctgcatcacgctgcatgaggagcacagggtcttctttccgctccacaggagatagagctgtg

SEQ ID NO: 21242 - DNA, 518 bp, Arabidopsis thaliana landsberg
ggatgcgatgcacatcatccattagcaaggcaatattatcctcaagtgcggatgttcccatgacctattaacattcaagaaaaaacattaatggtgatattaaacaaaagacttgtgagccaagaaagagttaccaaatcgaaaagtttagtatgatcgcagtaaattttgatataagttatccccaatctcacagcttcggttagtccttgttttaaggacgtaagctcagcctccaaaattgtaatggtggagtcatgatgaagtgaacccttggtatgatacagtagcttatcctcttggtcacaaattgcaaccgcaaatcccgttgttccccgctcactaaacccttgaagtaaagcctatacatgtggaatggtgagggaattagttcatccatagacatgttgcaatatgtctgggaagactctttccaatatatatagagggtatccccttttgaattccaaatccaggtaccaatatttatttggatattttatatggaatatcctaaa

SEQ ID NO: 21243 - DNA, 1028 bp, Arabidopsis thaliana landsberg
tttgttttaaatgttaaattaaattatgtgtaaactaattggacacaatatcttgtccataatataaggtccttaagcggtgttctagattcaatatgtttatacatataactttttacatttttttaaaaaaaaattaaaatttgcaattttttaccactattaaaagttttttaatttttgaaaaatatatataatagtaaaaagacttaaaaataaccgaaacaccagaaaatatctaaaacaatggatactaaattttaaaactgaaagaactggaaccaaactgaactaaattttaaaatattcaaataaactttataatcgatcgaaagaaccgaaaccgagtggaaccgaaccgataaccgattgggtaatcgcggaggattactttcaagaagagattcgtgatcttagccgtacacttgtcgggatctgagccgcgcctgtaaggagaaagagagagatggttctagttttaaaatgcagcgttttgtggaaagctcaccatcgacggtctgttactgggccacgtcatcgaaacggataaaatggaaccatccaaaaggaagatagaagtaccaagaagattgcggagagtcgtgaaaagttttgagctttgatcactcactcactagtaatggaggctcttcaattttccagcgtgaatagagttccttgtactctgagctgtaccggaaataggagaattaaggctgccttcagctctgcgttcaccggtggcaccatcaattcagcttctctgtcctcctctaggaatctctccacggtttggcttcaaagtttgcttcttttcgttttttagtttggtggttttgtaagattttctggttatttagtcttctttgtgatgttctgtgttgagtagcgagagatatggagttgggtgaaatcgaagactgttgttggccatggaagatacagaagaagccaagtgagagccgagatgtttggtcagttgactggtggcctcgaggctgcttggagcaaactcaaaggcgaaggct

SEQ ID NO: 21244 - DNA, 1769 bp, Arabidopsis thaliana landsberg
cagtctcaagtattggttcgtttatacagaaatcaacatcaatacattgacatcatattcttaaaaaagggtaatacgtacgaaaaaatagccaaaaaagaatgtcatgatgtgtgtgtttgataatgtgatgagagataaaaacatataatatatataggtttggaatgattaggtcaatatttttggtgagcaagcaaaattaaatcgcgatcttaactaaaatggaataaaatatacataattagaatattttagttatatgttgtaaatgcgatttgtaataataattaaaagtttctataaaatttgatatatgaatattttgtagtgtagagcaattagttatgttgagatattttagaaagattattccgagaatattggcaaagatttgtgaaacaatttgatgtggtaagattatgatattgtgaggcactaatattccttaaaatcaagtatatacttattttacataaatagaaatgtagatatggttagttgatacaaaatcaaattgttgatattctcatatatttcgaaatgaatgtatattatcgataataatggaaagttttaatggcaattgtttagcgttaatcgttttgtaaatatacatttttggatttactaatcaaaccgaatttattgttgtaattgataacagaagaataaattttggtaagatttcattagcatttaaaactataatgattttcgaatctaagtgattatagatatggttagttaggatttagtatcaaatttagtaattaggaattaatgatttgcgaatttcgtagagttttagggattgatttgtgcaatttattagggtagtagttaacaatatctatgtttaggcaaatagttagtgcaatatcttaattgttaatcaaaaatttggccattgtcctaaagaaaatatcttgtctgattgattttgtaggaactaaacattcaatatcgaaattgaaaaaggattttttgacacaaatcgtccccaaaaatgtatatgtagattatcaacaatattatactctgaagcaataaactaataagtaaagccgaagcatacacatgagccagaaaatatgtgtgcctcatctgtcatagcaatgtcatatctagtagaagatatacatttccccgcgtatgagtaaaagaaacaccctttgcagccttgactgtacgtgcaacggccaacatatgcttgtgtgtgcacaaacctccatgaacgttgccagagacgaggtccttcggtgtgaagctggcttatgtggtacatcacaagctctcccactgcatgagctgcctcgactgtgggggtcatctctcagaacatatcgccgattggaaggaagtgcacatgtttaccagtacatgttaggaacaacctattcgcgaagcaggcatatgatcggatggtgagacataattgacgagagtaagaccctaagcgacggtgatgaagttgttggcttgccgaacaccttctaggtatatcgtcagaatcgatcccctatctagcaggagcccgaagtatggacggaagggataatctggttgaagcaagtgcggccaagtcatgaactcgtccatcgctatggcgctgatgtcaccagctttgaccatgttctaaagtgtctcgattggggtctggctcacgagaaggtagtttacgaggatgcaaatagtgttacgccctgaccgcctctatcagtgaggccaacgtcctctctcggacccattggccaccactgtcagac

SEQ ID NO: 21245 - DNA, 503 bp, Arabidopsis thaliana landsberg
gataaaaagtctctattcctagctacagatacaacgtctgtatattgcctcggtcctgttgtcctctcgcataagctcaaaaaaccactgatacaaataggttgaggagcttacgtttggggacgaaggatctctttaaggagcaacgatctggatttgttaacattagtgaaccaacgacatatatgatccacaagaacctcgagttgatgggtgtggttaacatggctctttcgaagctgtttcacaaactccggaattgtatacacgtccctccccctctctaatccaaggcgaataagaagcttgtcgtttttaacccccgtgtgcaaacgggagacaagacggtcaatggtgtcaagatctttgttgagcgcaaaagtacccttggcagcaacatttagctgaaaaatgttagacaactccttcttcttgaaactgtgagggaggtagggagtgcacaagggacctgcaacaacaagaatggtgggaagtgcatgata

SEQ ID NO: 21246 - DNA, 931 bp, Arabidopsis thaliana landsberg
tctagtaccaatgatagtcggcctcgttatactgtgacccaaatgttgtcaccgcaccttgattatagtcaccatctgaatcgtcatctgagtcattggggcatctcaagtctttgatcctctcaaaacatcgtttcttgagatccccaacaaggttgatgttgaaacactggcgtaaatcaaggtgttccaggtgaggacaaccatcaagaatggcgttcaagcccttattggttagcccgttccctaaaagctggaggtggcgtagttcaggcatgctttctgcaattgctttggcattatcatcaaacccactatttgaaaacatgatttcaggggctcggtttagcttcagtgtcttcagattcggacaagaccggcctatatctctcagagactctcctgaaaacaagcagtatgaaacctcaaggtattcaagcaacggtactttcgaaactgctttggcaactccctcatctgttattggaaagcaccttacaagtccaaggcttttaagattacttgacctgcaaataattgttactaaaaaagtcaaaaacataaccttattgagaacacttcgttgacaaaaccactaagcaaaccaaggtgcattatcagagattcagtagaaggatatagaacagataaaaataaatctagtttaaaaagagtgacacaaaatcctccaatcacttataacttcagaattagcaatcactcgaacccttggattagcaccgatcactcttagccctatagttagcaaacactctaaccctagtattagcaccgaccaaattgtctttaacatggaaagagagctagggagaaacagaacctgtcagctatgtacatgatgagatcattagtaccgtagtaccaaatctcgatctcaatcaaaccaccgtggctacgatcaactgcgtga

SEQ ID NO: 21247 - DNA, 2617 bp, Arabidopsis thaliana landsberg
  unsure (1)..(2617): unsure at all n locations
tgattaatgttgttgagcttctactccacgtatacgatattttttttccacgtatacgattttattatacgtatcatatcagtatatcatttcaagaacatataacaaatctatagaaacatgtgaactttcatgtaattcaaataaatattgcgatatttgagttaatggttttcgtaaaactattgtggcactctaaattggttctgtgtagtaagtagtaacatgcggcttttacaataatggtataaaaatacgtttcagttatcatctacgaatattgtgtatggatggagtggaacaaacagaaaatgcagtttcctaaatgattaatttaggttgaaacttttttgttattggttctttcaaaatcggtcgtatttattttaccataattagtcatcatctgatttttgttttggtatgctctttcacctattttacatttttttatcattctacataatttgttttttggccattggaccatttaaaccagttatgatatgcttggcaagcgcatttgagattcttattaatttgtttatttgagaatttgtatatttggccccatggtgcttttcctcattaatttatatatttgagaattcttataataaactaaatatgaaaatttcgtaggtcttttttcctcatttgtaagtttgaaaattctaattataaaccatgaatgggaaatttcgtacctatttcgatctctttctaagtatttcatatttccaatcaatcaattcgagcaaattgttatttttcttaagatatatgtaaaagtacatcaaatatgttcacccaataaactagcaacattactttcaataacttttagcgtttcctaggttacatcatatctaagccatccttagaacaatgactaaaatatatattttttgcatacaaatgtcaaccaaatttgtatcaactcgtaaacattttagcccgccaaatatcttttagccgattatttgtattagagagccattctccacacaaaaacccccaaattatagttggatacaagatatttttcaatgagatatttaaatagagaggttcattcatttatcatcaacagagaacaccgacaataactatagagaccagagagagaaaagataaggtacgaagaagagaaccagtttcgcagaatagtacttgatgaaggtactcaataatccaattcttcaattatttctaaaatataaaccccaccgtcgttttcttgttcctctcaattatttcacaacgtctacatttcctaatttatttatagatctacttatcataatcaaacaaagttacaatatcgaaacaatgtttcgttggatactattttttacctaccatgaatatatatatacaatgactaaaataaacaacgtagtatgaactatgaactcgagatagtatgcattttgatccttgtttgaaaaatcggccgcctacccgtctaggcgggcgcctagggactgatcggatggagtctccagctattttgtccaaatcggaaagattaatcgttgatttaatatttttcgcttagacctgtctttgtttagtccaatatatatattttttttttcatttttataaaaaataaaatttaaaatatccaacttatgttcgtaaattgtatgaaaaatcataaatttgaacctaaaatcttgttttcatgtgtttaatacaactttaaaaacaatattatagagatttcttaattataatagattaatatgtttttaaaatattaagcaaccctaaaattaatcttcgattaatctccgtataatctccgattttcttgctaggcgctaggcccaccctcaccgtccgactagcgcctaacgatttttgaacaaggcataaaactaaatgatgttattttaaattatttatttataaaagaagtaaatatatatggcttagcatcaattatattaattgatgttataattaactagtttgacatcaattaaatacaattaattcaatttcaattagtttttatcacttttttaaaaaaatgattcaaatataagtatacatcatttagataattaatgcatctattaattttgataacatcactttttaaaattattcaaaatttacaacaataaaaccaatgcttattaaagattaagcatcggttgtaaaaggtgaagtcaaagtttacttaatttgcgaatgttccacattgctcccactgtaaacaatgatttatagtttttcttaatataaagtgtgactaaagccgttccaaccatttttggtgccctaagcaaaacaaaaaaaaaattcaaccataatataaactttgaaatttttttagaaaataatcatacaactcctgtaactatattattaaatatagttgtatatataagttgtcatatggatgattaagaaatgctaactatagatatttgattgctaaaactatataaatatgtatatgtatatgtttttaggattatacgtcaaaatttgtaagtttcttttgtttaaaccacttctacacctacatatacttanataaacactagactaatatgatcccttagagaantacatggggctaaagtcatacgtaagaaat

SEQ ID NO: 21248 - DNA, 1598 bp, Arabidopsis thaliana landsberg
ctcgaggctatgaggaaggctattgatgagggtttcaaacttagcttcaacaatgtactgtttcccaatgtttctaatatttttgggcgcttgtggctctgatcagagcttgaaagcatttgtttgctattgtgcggatgagcctcacgagagtacttgctattctgaaatagtaaagaagagtaatgattcatctttatctgctttactgaatattttagctgacctaagttaatctgatcctaaattcgtctctgaatctaattggctaatgtccttccataagaaccagatctcttatcttcctcagaaactctcttgactttcaaactatgttttatgccccattctaaaattctgattctgtcttaaattttaactgatatttttctcatggtagctcatgcaggtctctccaaaaaagggaaaataggtatgtgtccatcctttttcctttcaaggaactaatttcagtagaacatacctaagtaacagcatagtgatacaaagctcttgtctttccgtttatctctaggcatcggattcgcttctggattcttgggtgccactcttatcggcggatgtttactttgtatcttcatccggagaaggaagaaacttgcagcacaatacacaaacaaaggcctatcaacaacaacaccttactcaagcaattatacaatgtcaaacactccaacctccacaacaatctctggcagcaatcactctcttgtaccttcaatatctaaccttggaaacggtagcgtctactctggaattcaagtcttcagttacgaagaactcgaggaagcaactgagaatttctctaaagaactcggagatggaggcttcggtacagtctactacggtacactaaaagacggacgcgctgtagcagtaaaacgactcttcgaaagatcactaaaacgcgtagaacaattcaagaacgaaatcgatatcttgaaatccttaaaacatccgaacctagtgattctatacggatgcacaacaagacatagcagagagttactcctagtctacgaatacatttccaacggcacactcgctgaacacctccatggaaaccaagcacaatctcgccctatttgttggcctgctcgactccaaatcgccatcgaaaccgcaagcgccttgtcctatctccacgcctcaggtaacacatactgaacacaaacacacataacacatacacgcgatgagattagattactaatgatgaattctctgattcagggatcatacacagggacgtgaagactacaaacattctcttagatagcaattaccaagtcaaagtagctgatttcggactctcacggttgtttccgatggatcaaactcacatctccactgctccacaaggtactccaggatatgtagatcctgagtactaccaatgttaccgtctcaacgagaagagtgacgtctacagcttcggagtcgtactctcagaactaatctcatcaaaagaagccgtcgatatcaccagacaccgccacgatattaacctagcgaacatggcgatttcgaaaatccaaaacgacgccgttcacgagctcgcggatctatcactcgga

SEQ ID NO: 21249 - DNA, 598 bp, Arabidopsis thaliana landsberg
tgtagcgaacggtgcatcaccacataaccttgtctgacatgaatgagggacttatcagctaggttttccagtgcaaaactaacatcactatctgccagcaaggacttgatggttgtgactttcatatgattgaaaagacatgcgatatgacgaaatatctcttgatcttcactctctaacccatcatagctgattcttagtattttttcaattttaccgtctatacgtagaccattctcaagccttggcagcatatccatccagtattccatatccctcctccgcaaatatttacccaaaagattaagacccaaaggaaaactgcccgcatgtcttactacatcaactacaagatcctcaaaacctttaggagcatagttttgcttgaatgcagattgacataacatctgacaagcatgcacatcagttgggaaactgacttcataaatatgatcaatcccatgagcagtcaagaagtgcttatcatttgtaaccacaatgattctgctcccatatccaaaccattgagtttgcccactaatgtatctagtaccattatatcaccaaatcacgattaatgataagactttttggtgct

SEQ ID NO: 21250 - DNA, 565 bp, Arabidopsis thaliana landsberg
  unsure (1)..(565): unsure at all n locations
cggtggtcctcgaacagctgcatcgcgtactggggaggcgtcgtataaccggctccctgcagcacctcccacaagatgcggggaaaaccctctcgtgcaagtccgtccatgtgggaatgtgtgttccctcctttcgaggattcgtgagaagtcatctgtgtaagggtaagcgtacgcnaaaagaaaaagcattacaaaagtaaagggaaatcagtgcttggcttttctaaggttacgttgaggtcttgaggtgtacttactcctttattatcatgcctcatagcttttaaagttcttaaccacttaccaaaatagtttaaataaaatgatgcatgcatgctcgtcctaaacgacctcacatcaacttatagggaatagggaaatcccatcccttatagtagcatgtagagctcactcaaatagccacctagctaccgatctagtatcctaaggctccatgctctatgttcatcctattgccttaccgatctatccgacagggtttctaacaagttttacttttcgagaagatggtaattacggtttattgatcctctgtggtggt

SEQ ID NO: 21251 - DNA, 578 bp, Arabidopsis thaliana landsberg
taaaaatttgaaaaaataatatgagcttttgaacaccaacctcgtagtattgtccaaatgggataattggtgaggtaagagagttgaacaacactttatttattctcattccatatttaatatcattagatgacaaggacgacaacaataacatcggttccccaccctctcgttcacgcatctctgccaataaataatcatcaccaaacggagtccagaatttcactagataaattgggatctttgttagtgtgcttccaaacagaggatgatccgttggttggccgctgaacgaaaaaccggcattgaacgatatatcatgagttttgatacctaaacagcgggaatgatctagtggaggtacaacagaccgccatgagctgcagacggatcggaagaggacaatctcgaaagatgtctcaagatgacccacgattagttctagtaagtcattcggaagcaaggaccaatctgctatcattagattcaaacgtaaaattgaagaatcataagttaaggataatgaagaaatatatatatatatatatatatatatatatgcgggtatgattatatat

SEQ ID NO: 21252 - DNA, 1462 bp, Arabidopsis thaliana landsberg
catcatcattatcacttcaagacccttcagcgttgccgtgagtttcaccgttaggtttatggctttttaaagaatctaagtcatcgtctgcatcatgcctaacttccccatatccatcaccaccacttttatagatctcctgatcactctggtcttctcttcttcctctatccctatcttgatccttacgtctctctctttcattctccctcccagtctctctactactagacctagctttatctctactactcctacctctgtagttgtctctattgctttctctatcaatgcttcccttcttcttcaaattctccccttcctccaaatcaagttcaccatcgttaccaggattccccaaaaatggataaacattcttttcattgccgtcctcatcaagatgatgactgtgtcgatgcttgtgatgatggtgcttgtgccgcttggaagatttaacgacttcgtcggaaggagaatacgacctacggtgtttgcggtggcttgattctactatcttatcgctcaccatcagatcgtcgtaaaagatagacaatcgcaaaattagggttagggttcgattttctcccgcgctctctctgtctccgtgaacaacagacttccattaaaaaaattcacattatataaaaattacagtcggcatcggcaaattaaaaggaaatcagaatcgtctatttaaaaaaacaaagggcccaggcccattaataataaatgattaagaggatagagccatcatgtccgttgattattcgaaacctttccgatggatggatgacacgtcatcgatccgcatgaaactcgggtaaccaatgaaagccagcagaagcctctatataaacaaatgtctcctcatcagacgcatctttcaattgtcaagtgattgtatttaaccacaatttcttctcatctctaaagtcagcatcaatggctccgaaagcggcagagaagaaaccggctgggaagaagccagcagaaaaagcttcggcagagaaattaccaaaggcggagaagaagatcaccaaggaaggtggaagcgaaaagaagaagatgaaatcgaagaagaacatcgagacgtacaagatctacatctttaaggttctgaaacaagttcatcctgatatcggaatctccgggaaagcgatggggatcatgaacagtttcatcaacgacatctttgagaaactagctcaggaatcatcgcgattggctaggtacaacaagaagccgacgatcacttctcgggaaattcagacggcggtgagacttgtgttgcctggagagctctcgaaacacgctgtttctgaaggcactaaggcggttactaaattcactagctcggagggtttatatctcttaattctctttccgccttttgaatcgtttaggtgttatcgctttcttctacatctctggtggtcaatctttgaatgaaaagcttcctttg

SEQ ID NO: 21253 - DNA, 825 bp, Arabidopsis thaliana landsberg
agacaaacggtgacaagtggttactactttctaataagaaagaacaaggatggcccctgctcaaggttgatcaaagaagaatgatgatgcttctgctaaatgctttcgagatcgtaatgagaagaagcggctaaaggtagagggagatatttacaccatatatatatatatatatatatgtgttcaagtttaggttttcgtttctaatggaaatgggcctttgttgggtttatatgggattaggttttacaattctcccccacttaaagagaattcgtccccgaattcaacacttcttgttcgactatactctccattcatgcctttagaaaactttatttattccaaacacaatttttaaaacaatttaattgaccattaaagaattgaataaaaaagcatatgccaacaactgaaagttccaataaagaaagaataaattcctaaaagaaatcttcacttaatacgattaaaccgtccactccaacatgaacttctacgaccttggaatttgaatttcaaactttatcttgctcaacatcaagcccctttcgttctacggcgtacacacgaggtcctatggcttgcctcttaggaagtgtttggtttccgtcatttatgttccgttgattcccttccgctataaacgtagtgcactcccgtgcataatggcctggctgcccacacttcctacaattattattaccttccggacaattctccctgatatgacccacttcaccacactgaaaacatttgcctgaatccatccaacaaacccctccatgctgcctattacacctagtacacttggggtaacgggtc

SEQ ID NO: 21254 - DNA, 513 bp, Arabidopsis thaliana landsberg
ccagcccaacacctcagaaggaagagttggaccaggagatcagggatttagaagctatacatcaccaggtgcagaggaaaagggaaaagatgcttcggttagccgaacttcaaaggaagatcgatgaagcaactgaagaaatgtgccacatcgcgcaggacgatcaaggacgagggcctcaacacagagagttttgtcaagaaactccaatcaacgatgatggatggtatgatgatctgtaccatggtaattttgcttttgatgatgcttctcccctggcagcagagttgtaggctaccccatggccaccttcatacaagccaccacagctccccatgtatgatggacacttcgacccgaagcaattcctcatgagctacgaagcaaccatatcatcatatggtggcacactgctgtcatggcaaagtctcatcatggtagtcaggagtgtggttcagaattggtattctctcttcggccgggacaattcatcatggcagaagttgaggacgg

SEQ ID NO: 21255 - DNA, 547 bp, Arabidopsis thaliana landsberg
tgcagggatcacgcaaacccctcatgaacctgtactgccttttagcatcagtgttgacgtcttcaggtgcataacgagatagctgcagaaacctgtccctatattcactaacagacaggggtccctgcttcagagccagaaactcctccttcttcacgatcatcagtccctctggaacatggtacctgcggaaactctcactgaattcctcccaagtgatggcttcagggtcaacatgggtggcgaggtaggactcccaccaggactgggctgctccccttagctggcgggggccatacagaaccttctctctgtcgtcacattgggcggtgtgtagtccctttccactgcacgcagccagtcttctgcatccatggggtcggcggaatgggcgaaggtaggagggtgcctctcatgaactcgccacgtttgtcccgtggcatctggggtatctgacttgtaactggggttggggttgctgttgagcctactgcatggctgccagagtctgcccaatagcctgcactgcctgagtttgcacaagaca

SEQ ID NO: 21256 - DNA, 542 bp, Arabidopsis thaliana landsberg
accgacagttaaccgcacgattaactgcatagttaaaatcttaaaaatataattttaactatttgtaatgcagagatagatatcgaatgttcggataaagattttttaaaaaatagataatatcacatacgaaagaatctacaacatactttttatcttattaaaagcaattaaaaataagattttgtcaccagtattaaatatattgtaatcatcaaataaccataaacgtatttaactgtaactgtaactgtattcaaccgtaacattatctaactttaaccatcttaaccttatataaaatggttaaggttacaattaaaaaaattataaccgtaaccgtaataaccgtaactgtgatcatgctttatcatgctcgtgatgcgttcctttcgatggagaattggataacgatgaaactccattgtatcctctggtggatccaaagccttcatatcgtcatgtgaattcttttgaagtatggtcggattgtaatgcggttctctgggtcctagcaacactacaagattgggtgaagtagt

SEQ ID NO: 21257 - DNA, 1284 bp, Arabidopsis thaliana landsberg
ttcaagaggttagcgagatctttgtcgttatttgcaggtgttctcgttgctattctttcaagtgaaacatcattgtcgaacttcttattgccggcatgaaccttgagaatatctgttctccccttaacgtcaggaacgtcaacacttacctgcaccagaaattataagtaagcacaagctctaggagtagtacaggattacaaaacatatcaatgtgtaataatcagatagtacctgccggtcaaaccgtcctggcctcaacaaagcagagtcaagaatgtctgctctattggttgcagcaactacgataacaccagtgttaccttcaaaaccatccatctcagttaggagctgattgagggtctgttctctttcatcattacctccaccaattccggtttctctttgcctaccaacagcatctatttcatctacaaagacaatgcaaggagcgttctccttggctttcttgaaaagatcacggactctcgaggcaccaacaccgacaaacatctcaacaaactcagaaccagagatggagaagaaaggcacaccagcttcaccagcaatggcttttgccaaaagggttttcccggtaccaggaggaccaataagaagaacacctttcgggatcttggcaccaaccgcagtgaatctctcaggtttcttcaaaaactccaccacttccatgaaatcttgctttgcttcatcaactccagcaacatcatcaaatgttacaccagtgttaggttccatttggaactttgctttggactgaccaaactgaagtgggttaccaggaccaccaggtccacccattccaccaccagaccgtctcgaaagaaggaacaaaccaccaatcaaaagcgccgggaaagcaagattaccaatcaagttgaataacacagaaccttgatcttcctgagcattatgtgctgcaaaatcaatattcttagccctcaacttctggagaagctcctgactcaatccaggtagctgcacacgtacacgctgaatccggttacccaactcaggagaaacggcctccacaatagctatagtcccattctcatacaaatctactttctcaacccttcccttgtctaaatactctaggaacctagaataagacattctagacgaagaaaccccttgtccttgttcgtctgcattagcgtttccacttgcaagcaagccaactccagcagcagcgtttcctagtaagagtttaaagaaacctcttctccatataatgtttcttctcatccaaagaagccttcacaa

SEQ ID NO: 21258 - DNA, 793 bp, Arabidopsis thaliana landsberg
cataataataaagtcgcttgtttagagttttcctctttcatagcaaaagcgaagaaacttcgtccctgtttctgataaatatcaatcagtggtgaatacgccttttccattttctccatcatatatggcttatccagaaacattcttgtatatgtgagcgtaaaattttctcgctattcaatctcatggcttcttcttcttcttcttcttcttcgcttcgcaactgggcataccacgtcttcacgagctttcatggagaagacgtccgtaaaacatttctaagtcatttacgcaaacaatttaactgcaacgggattacgatgttcgatgatcaagggatcaagagaggccaaagtatcgcccctgaactcacacaagggattagagattccaggatctcgatcattctgctgtcgaagaactatgcttcttctagctggtgtttggatgagctattggagattttgaaatgcaaggaagatattggacaaatagtgataacagtcttctacggagtagatacatctgatgtgcgcaaacaaaccggagtatttgggatcgctttcaacaaaacttgtgctggtaaaacggaggaggagaggacaagatggagcaaagctttgactgatgctgccaacatagcatgagtagacttcaaaaactggtttgagtataattatttatggttttctttccctacgtggaaattaaagagaaaaagggcaaacaaggtgttttacgatgattatgaagaggaattatacgctgtgtatattatatttatgtggagcta

SEQ ID NO: 21259 - DNA, 727 bp, Arabidopsis thaliana landsberg
gtttacagtgacaactttcgcgaacgagatgaaatggtacagcacagaagttgtaagaggcaaagaggactattcaacggctgacgcgatgttgcgatttttcaagcagcatggggttgctgtacgtggccacaatattttatggaatgatcctaagtatcaacctagatgggtgaatgctctgtctggtaacgacctctacaacgctgtgaaacgaagggttttctcggtggtctcacgatacaaaagccagcttgcgggttgggacgttgtgaatgagaatctccatttctcctactttgaggacaagatgggtcctaaggcctcatataacatctttaagatggcgcaagcttttgatccaacgacaaccatgtttatgaatgaatacaatacgttagaggaatcaagagattcagattctagtctagcaaggtatttacagaagcttagggagcttagatctatccgagtttgtggtaacatatctctagggatcggtctcgagtctcatttcaagactcctaacatcccgtacatgagatcagctcttgacactcttgccgctactggtttgcctatatggcttactgaggttgacgtcgaagctcctccaaatgtccaagtaattcatatcctccaccggctactgttctgtttcttatgagcacttcttatctatatgtctaatgttgagttttcttgcaggccaagtattttgagcagg

SEQ ID NO: 21260 - DNA, 511 bp, Arabidopsis thaliana landsberg
  unsure (1)..(511): unsure at all n locations
agataatgtgcaaattccaactgaaaccaagtcagcaaatcggcgaattcctttccccaagagtcctaaaaagtcaaggcaagccttagatgatgtcagatgcaaggctatgattgataagctgattgttgagatgcctctagttgaagctattcatctttctcccacaataagaaggtatgttaagacaatggtcactaaggatttgacgaaagaatgcattattatgatgatttcatagcaaggcagcgatatcattcaggaacgaattccaagaaagctaccagatcctggaacctttgtactgagtgtcaccatcaaccacgattccttcccaagagctttatgcgatctcgtttctactgtgaacctgatgcctcgttcaatagctatgcatcttnnnnnnnnnnnnnnnnnnnnnnnnnnnnnnnnnnnnnnnnnnnnnnnnnttctacccgaatctcagatggaattcttatcgatgttctcgtaatgattggagatagcatga

SEQ ID NO: 21261 - DNA, 479 bp, Arabidopsis thaliana landsberg
ggatgttaatttcgtatccgctgctcagagaacccagccgtagctccaatcggccggtctaggacctcgccggagcgcgaccgtgcgtgaacggcgtcgtgggcgtgtcgggtgaagagatagaacttcaggggcatttctgtaagtagtcagtgacttgaataaacagtaaaagaacctggtcgcagttagtctaaaacgcgggggtcgttctgcaaaaccgccagggcgcggggccgcgggccaatctgccctggacttgggccgtttaggcagatccggcccagttccatttaattcttttcctttttctttttcaggaaaactttagaaatatgtagaaaaatgtagaaaaatgctaaaattgtgaaactaattttcctaggcttgttatttccctagaatttagtaaaaataagtttgtgattttaagtgtaagtaagaaaatttaaggtatttaaagtgattaaaaatgttgg

SEQ ID NO: 21262 - DNA, 960 bp, Arabidopsis thaliana landsberg
cttcccgtaacgcacatgttgtatgaacaaaatagtggctacacttgttacatgtgtatgcaccacaatttttgttaaccttttgacgacagactccggacgaccattttccggatggaagagaagaggttaaagagatacgatggtggtgacgacatattttaatgacataggggaaatagatacaatctatatgtactacaaagatacaccgaacgcaaacatatgtggtaaaagattctttaatgaggccacaaacattgcaaggtaaggaagctttgctaggggaaaaagtgagagggtggggatgtctttttgtgtggtctataaaagagggtactggtttcatcgcacaaacaggatgcatactcactttgtaagtagaagaatgataaatcatgtcttggaaacttatatcacaacatacgcaattcacaagggcaaagggagaactataaagttggagagattgaaaaggataggaagggtgtttgatttcaagtggagactccacacattctttgtggaactttttacgacatgtggcacaaaaatagtaggctgtgccaagatttgtgattttgcatgcactacaacagaagtcggcaccattaggttctttattgttgcaccaaaagagagggagaacagggagcttacagataagaccgcggttgtgagaatcaagcatatagtggacttgtggatcagcgcttgggaagtgaggggaaatatcgaacatgacaaagccttggtcatcgcaattagcctccggatctttttggctgtgagttttgacacgtaagagaggacaaaggaaaagaggttggagagggatgtcttcaccggaggaggttgaagaattgtataagaaaaacgttttttcatcaatttcaatcctcatgaaattcaccgactgggttcatggttgcttctaaaaacgatttggatagttgtata

SEQ ID NO: 21263 - DNA, 455 bp, Arabidopsis thaliana landsberg
ttttatttcaagcaactttgttctttcccttttattatttgcgagctaagagaggagtgaatttgtctaaatcccttagtacaaattcattgtttgattacagaatcaacagtagagacgggctctataagcatgtgagatgtgctattttcccaaaatgatagatgttcaaggtgtgtttttttatttgtacaatgagattaataaatcatttatttttagtcaagaagcatcgaagcaagagaacgaaccatttgaaagactcataaaccaaattgagtcaaaggaatttcaaagaagtagtttggtatggacggatctggtaaactggtttcggtacgattgtctggttatttttggtttaaaattgattgggtatgttgcagaagctttgcctcagatggcaggtctctccaaattgatcatccttcgatattattattgatacagaggag

SEQ ID NO: 21264 - DNA, 972 bp, Arabidopsis thaliana landsberg
  unsure (1)..(972): unsure at all n locations
tatcatcttctttataatgtagcctggtgattttgaaaaagctcaacttggactagctcatagggtacagctgagcaaaggtgaagttcaatgttaaccgggtggataacatggttattcaagctattttcatgcttgacacacttgataaggatatcaattcctttgctatgagagtcaggtttgttttcttattgttttgcctttcagattatgtcttgtctgttaccgtaagagaaaatggtttctgagcagctcatattatgtttttgcagagaatggtactcatggcacttccctgagcttgtcaagatagttaatgacaactacctctacgccaaagtttcaaagattatcgtcgacaagtcaaagttgtctgaagagcacatccctatgcttactgaagccctgggtgatgaagataaggcaagagaggttattgaagctggaaaagcatctatgggtaataaactgatgtagcatgttcgataagaatcatgaatctttacaatatatctattgtttctcatgttctaagacattgttgttttctctatttgaaggccaggatttatcaccggttgatctgatcaatgtccagacctttgctcagagagttatggaccttgcagattacaggaagaagctctatgattatcttgttactaaaatgagtgacattgctccaaatttggcggccttgatcggagagatggttggggctaggttgatttcacatgcaggaagtctgacaaatcttgccaagtgcccatcttcaaccctccagattctcggtgctgagaaggcacnnnnnnnnnnnnnnnnnnnntttgttagtctttacaagtttaattacactgcagtaactaactttggtgttaatttcagggcactgaaaacacgtggaaacacacccaaatatggtctaatattccattcatcattcatcgggcgtgcatctgctaaaaacaa

SEQ ID NO: 21265 - DNA, 507 bp, Arabidopsis thaliana landsberg
gcaatatcgagagagacttcgttccaggtcaacggaacatacactgccttacaacacaacgcgaagtctccaaggcgacccgccaaccaccgacaaaaaagtaaaagcacagctctagagcaacgacggaacgaagacagttcccctcgacccggcaaaacccaagcaaacagtcgtaataagtgaagacctgacttcacaagacgaggagaaactcatctcctgtctcttcagaaacaaggacgtcttcgcctggtctgccctcgacctggtcggagttagccgcaccgtcatcgagcacagtctgggcatcgacccttcggtgcgcccaaaaaagcagcggctgcgcaaaatgtccgatgaaaaaacggaagccgccaaagccgaagtgcaccgcctgctggaggccaatttcattgaaccaatcgtctaccctacgtggctcgccaatgtagtcatggtacaaaagaaaagcggcaagtggcgcatgtgcattgacttcaccag

SEQ ID NO: 21266 - DNA, 703 bp, Arabidopsis thaliana landsberg
gtggaacgggagggaatagtttagctgttgaagcatacgatgcttgatatggctttcaacgttcaactcttattttatgggtttggacgcaaaaaaaaaagtaaaaaatattgaaaatactcgagcctttaccagctgattaaactacccatatgattcaattttgatgttgtcaacttatcgctaaccctgtcattactttaatacattaaaattaaacaggtatttcaaatttgatatatgaaatatttcactcgattgaaaatttcagtttgaaaaaggatataattttgttttttttcttatttttattttttggcttatttctactggtttgtaatatacttcctctattctttaataattgattttctaaaaaaacacacatatcaaaaaatatattaaaagctcattataaatatattactttttgtgatttatattttttataattttaaactaataatattagttatttattttaaaatttgatattcatcaattataactaattaatattgtataaaaatctaaaatattaatatttttgaaacactttttttcaaagaaaatcaattaataagaaacagaaatattattttgatcccagaagttacagaggatagtgattaaatctttagatggtgcagcattttagatcattaaaatattaaaattatttagccggggaacatatatatcc

SEQ ID NO: 21267 - DNA, 507 bp, Arabidopsis thaliana landsberg
  unsure (1)..(507): unsure at all n locations
agactttgacgctcaccacccacacaggcagacaccctattttttatgtggactacgccaaacaagagatgtacgaggctgatccagacatgtctacgtgtgcatgtacccgacccagccatggattcaggttggatagggacgctccgtggatctgcatgacgacaccggttgtacgctccttgactgttgcgcatacgaatccgctgtgttcacaccgccaaggaacggaagcggacgtgtttacctatgtgatcgtgaaagctcctacattcgcaccatcttgtactcaaattgcaggtaacccaacattgaaattgaaaacggaagaaattaaaccgtctgctattctatctgaagcgaaataataaccgnnnnnnnnnnnnnnnnnnnnnnnnnnnnnnnnnnnnnnnnnnnnnnnnnnnnnnnagagatgggtgaaaaatgcaaatatgatctatcggaacgagctctcatgttggtgtagcaagaccaatctgaatgata

SEQ ID NO: 21268 - DNA, 643 bp, Arabidopsis thaliana landsberg
actataattttggaaatattgacatgtaatatattatatcttatccctcacgatgaagagttcaactgtgccttgaaaattttaaaattctaatgtatatcatcgtaaaaacgtttacaatatacgtataaatgtcatattgcgtattattttaaactttataagattaatctgcatatattggaggtggagggtaaagctacaaaaatggatgatttaacccttttaaaaaaagtacataattaattaaaatacaccaaataataaaaaaaaatcattaaaataaatagaaaatcttacataaccttggaatcataatacataaacaaaaccctaccgagactagaaactcgtctcccctgcttcgtgctcgtgatcgagaagccttcttcattcgtctttggtacctatacacatgtgttcttcttcttttttgtgtgatcttcgttacgtccactacaagttttattttctttgttcattgcctttgtagatgctagatctgttgcttggtgtaatttggattcgcgggatgatatcgagtttccttgatatatttttcgtaatatgtgataagatatcaaatccgactgatggagttaattcacttgaagtctcaaactagattgagttttgtttgtcc

SEQ ID NO: 21269 - DNA, 238 bp, Arabidopsis thaliana landsberg
tcagagagtatctcagtgctttgccctttggcagtggagctaacatgttcagaaagcactactctcttggacctgtcattcttgaccttcttcaacagtatggaactcatatctcttgtaagcagattggcttcctcggagtgaagtccattgttgaccaagcgcttgacatatctcagaagttgagcagaagagttctctgaagcatcctttggaatggtagtcaagatctctccat

SEQ ID NO: 21270 - DNA, 1987 bp, Arabidopsis thaliana landsberg
attccacatcatgcacagtaatcaaaatgcaactaacgtgcagaacacacagccaccagtatcgctttctggcgctttcacgactcttgagagtcttataactataggcctagcgttgccagaaggttcagtagtagtagcctttttactagagataggtccatcattgcagctcgaacagtaccaagtaccttcaggcatagactgaaatttcaaacaagctgcatatgaaaagagacatgaatgatcagaaccagaaaataatacgagagtttaattctaagcaacgtcgtccctgaaccaaagttccatatgctctatggttgaggaaaccattatggatctgtgcttcagctactttcagtttgaaacctagaaattgcatgtttaatatagtagagtacagtacttttacacctacctgtatgaaatgcttgaggacatccagcacaaagtaacaaatctccaccatccccacaaatagaacacatgtcatcactatcaccagttgtaatgacatgtccattggccagtgacatggctatatcatgcaatgacaatccagaagagatgaagatatgtcgataactgcacaagatacaaaatattcagatatgcattccaacatgaaggaaaaataacataatattggataactcacggttgtcgtctagccgccattccagcatgcgcttcaaattgcgaaggactaatctatcgtatacaaatacaaacgaaaaaagtaaaaatcagtaaaattatatccgaagtttaaaccgagtctgatggacaaccaacatagccactgcataacaccatttacctctctactgcagcagctacatactataccacttccttgcttgtaaccctgtagtagtttctgtatgggaaaaaatgtaagcaaaactaaagttcgattcaaatttcacggaaataagcagtacgagttattttgtctgcaataacaaacctgcgttttcacatagtaagccaattcagtcccgtctggaagtccattaggcataaacagcaaccgatgtaaatcattatccctagaaacagaggattgtatcttttcatcaatatcggatagaaattagagattcaaaggctaacagaaaaaacacaaatgatgaggttgatcaaaaagtaacacaaacctttttctattgcttccttcagaaactttcttatggcaacccgtaccagatacatgagaagtaagcctacaggattagcgaccaaataaatttcttacctccatagataattgtccataaggaccataagtaatacttagattactacagtgattaatttgtaaatgaaaacatcaaatatgcctacttctttgctatccgcttcggctcatctaatgtgtcctttgcatatgttttctctgaaaaataatggttctccacagagcatggagtaaggctctgactctcatcaagaccaggaccaagataactgcagctttcacaggaatcagtttcagatagtaacacaaaatggtaacttaatagtgcattaactaaaagttatacgaaacggaaaaggtacgtcactacagggtccaagtatattactgactatctactcaaataaaatccctaattagtaattacagatcaagttctaaaccagaagtaggaggtgatagtacctgacagtggaatgatccgtaatataattccggtcagacatgctattactctgttggaaacttgctgcaggaaataacaacatatcaggctcagcagtactaatcaaaactacggaaagcgcatagatgcaccaacaagctaaacacctggccatcacctttccaagctcgtaagccctcctcattcagagcagaaccagctacattccttatcacttcctcgagaacaacacgaggagcagtcttcagttcttgaactatgttataaaccgcccttccattctccaaaaatatgtgattattaggatgtctagtttt

SEQ ID NO: 21271 - DNA, 577 bp, Arabidopsis thaliana landsberg
taatctagtataatatgaatttaattttcttagtcttttttaaaagttcgaatcttgttgaagttcatctctaatttttttattgcatcaaaaactcctgatgttgtcttctcgatatgcatctaaaagttgtgatgacatgataattgcttttttatgtatcattatttctaaaagtttcacattatcgtcttcaactttttcaccaacattatagaaacaaatcacaatttcttctaaactttttgaattttggagtatgcttcatttttacctagataatcgaataggctatcgacatttgttctattccgaaagtatatagtgttatattttgcttaaatatttctataaattaatatttattaatttatggataaattaatatcattataaattaataaaattttatggtcccaacattattaatttatagagtttttactgtataactttgagagttaagagttgagagtgtagaaaaaacccaaagattacagagatttacccttttactcctacttgttaaaacaaagctctcctcgtgaaaaaaaagggaaagcttcgtgagctgtta

SEQ ID NO: 21272 - DNA, 885 bp, Arabidopsis thaliana landsberg
actcttaatctttgacactaaagagactagacaattttatttattccaaacactaacaatccaaaaccaaagaccaaaaaaggctatattgagtctctagctaaccttcttcgatgaagacggacaaaccgaaatcagtagctttaagcatagcattctcctctttactcgaaagcaagaaattctcaggcttgagatctcgatgaaccacacccataaaatgacaaatctgaacaacattgacaatagacctaatgataccagcagcagctctctcagagtaatgaccttgagctataatcctatcaaacaactcaccaccagcacacaactccataaccaaatgtatagattgtctatcttcataagcaccttcgatctcaacaatgttaggttgtccagacaaatactgcattatctgaatctctctcttcacatcttctttatcttgcttactaattagcttcctcttaagaatcgatttgcaagcgaatctcttccccgtcgacttctctgtgcacagatacgttactccaaactggcctcgacccaattctttgctcaaagtgtagaacagtttcacgtcttcgtacggcttctcgagtatagctgcagcaccactgtgtttcgctggattccgccaaggtggtggttgattcgttccggtggatattttagacggatcttggtgggtgctccttcttctgttctcgatctcaactgatctttcaccattttgttgtggtttcatcaccaatccgtatttcttggctaagcaattccccattgcccgttcgtctttgctttagctaaataagctcaaaatatcacgacccaaagaccaaagatcgaacctttcgtgaaaatttgcagagaatcagggat

SEQ ID NO: 21273 - DNA, 566 bp, Arabidopsis thaliana landsberg
  unsure (1)..(566): unsure at all n locations
gtggtaggaaagatatccctacgtagcatgtcatcttatttttcttcagcctcggagacctttgggggtttggcaaatgtcattgatcaatgcgttgaaagttacaacattaggattgatttgcttttcaatcatatcacgcaacaattggtcggcatcactccatctaccagagtgacaaaaagagtctatcatacaattgtaagtgagaacattgggaaaaatacctttctcatgcatttcagtgaaaaggttttgagcattgatgtggttcccgtccttgcaaaggcgatcaacgatggcagtagagattacaacatcggctttgatgtggctttgctccatcttcctaagcagattcaaagccgagacaaccaatcttacacaatccatttacaattgttccgtaagtaaccgcgttaggttgatgaccttattctaccatccgatcaacaagagctagcgcttcaagaacttgannnnnnnnnnnnnnnnnnnnnnnnnnnnnnnnnnnnnnnnnnnnnnntgggtctacatccagtttcaaccatatattcaaagaaagc

SEQ ID NO: 21274 - DNA, 441 bp, Arabidopsis thaliana landsberg
  unsure (1)..(441): unsure at all n locations
gtttgcgtgatgcacactgtgatcctcctcagagacgttttcctttggagaaaggagttcctctttcgtggtggcctaatgggaaagaggattggtggcctcaacttggtttgcctaaagatcaaggtcctgcaccttacaagaagcctcatgatttgaagaaggcgtggaaagtcggcgttttgactgcggctatcaagcatatgcttcctgatattgctaagatccgtaagctcgtgaggcaatctaaatgtttgcaggataagatgactgctaaagagagtgctacctggcttgctattattaaccaagatgagttcttgggtagagagctttatcccgannnnnnnnnnnnnnnnnnnnnnnnnnnnnnnnnnnnnnnnnnnnnnnnnnnnnnnnnnnnnnnnnnnnnnnnnnnaggttttgagagggagtcttact

SEQ ID NO: 21275 - DNA, 589 bp, Arabidopsis thaliana landsberg
  unsure (1)..(589): unsure at all n locations
ttttatccggatggtgaattcgaacctcttctctcttctcaatttacaaagctctatacagaggattggatcggtgtgaaaacattggatgatgcgggaaaagtgaagtttgtgagtgtagccggtgaacatatcagaatggtagatgaagatgtcgtcaaacacgttgtaccttatctccaggaccaaccgtcttcggcgcaaagcttcaaccgcaagacgaagcagcccttgcatgcttaaaaatagcaaataccacaatagtaatacttattcatgcaatatatgtcgaaaaagcttagtgatgattttgtagaatccttattcttatagaaatatatacatacttatcagaaaaatcaaattaatccgtagagaaacgactcatgagatcttcatcaccacatttgtatcaaggcttcaatggttttctcaacatgagaaacttccactttcatttctttttgtttttggtgttgtagaagtctcccacaatgactcgaagtttttcctttntggttcctccaccacattacatattatttttaaataatctaacanttcttccacatatttctaaaactaattc

SEQ ID NO: 21276 - DNA, 537 bp, Arabidopsis thaliana landsberg
ttgaaatttgttaattcaatttaaatttggtgttttcttaacttgtatataaaaaccttaaatgtcaattgaaatgatagagagagacagttctatattattgtgaaaaagtatcactatttctaaagaattgttctagtaaaaattggtattagttaattttcagaccatcataaaaaagatgatttagattagtgacaaagaataatccttcaaaaatacatatttcgacataagtatacttggtatcaaaaaaaaacagagccatgaccaaatacaatatattaagttcatgtgacgtgagataataaattgatttgattcactttccaattgggtttataattaacgcattaaaaacactaaaaagcaaataaataaatgtagccgaataagccgatggaagtaagaatgaagtccaaaagcaaaaacctatagatccggtggacagtcaacagtgtcatttaatccctataaatagctcactcccttgtcatccacaaatcgtccccgtctcgttttccttcttcgctcgct

SEQ ID NO: 21277 - DNA, 354 bp, Arabidopsis thaliana landsberg
acaccgtattcacttccattcccttacttgtgttagttcagcgcttgttattattatgatcttgtttcagactttcagctgtcaagagacaaggcccgttttactatcaggtaaaatcatggtcagcttcttgtcccaaaccacattgttgtaatcgaatttgtttgtgtgtctttgttgcaggtttcaagagctcatgtagataatgatgacgtctttctgcaagaagctctggctagatacaaagcatttctcataattttggttttctcgataagagaggaagttgttgtttttgttgtctactcttgaagcttgatctggtttgaaattcatgttcaaaagaagagaaga

SEQ ID NO: 21278 - DNA, 524 bp, Arabidopsis thaliana landsberg
  unsure (1)..(524): unsure at all n locations
agagtcggagcaatgaaagctgcgaagcgaaaattcgtattttcaatcaggtaagtgaaaaataagcaaaaaagacatacatgacctaatttctattaggtttcgcagaccacttcgatgggagcacatcggaaaggtttccgattgaagcaggggttttcttaatcaaaaaccaaggatggtgccaattctcgtcctcgttcggaaggtgcgaaatgagattcctgttagcattcgggtatgcagaaagtacccggttctctttgatgagcttctcatgttgaggagctctttcaattcatgaaccccgatgacaaatctggcctccgccgtgatacttatgattcccaggatagttcggagaagattgggggtcannnnnnnnnnnnnnnnnnnnnnnnnnnnnnnnnnnnnnnnnaaagcttcaggaagcgggaaggtcagtccgcaacccttaaaataaatttcataaacacanaagaatccaggacggtggtctttcacggattctgtgggttcgggca

SEQ ID NO: 21279 - DNA, 630 bp, Arabidopsis thaliana landsberg
tgacttggctagcagatcagcgtgctcattttctcctcgtggaatattcttgacagaaaacccttcaaaagaagcttcaagccttcgaactgtatccaggtatttctcaagcttcgggtctcttgctctacaactcttgtcaacatgactagaaataacttgggaatcagttttaagaaccgcccttcttatccccattgcctttaacttccgaagccccaaaagcaaggcttcatattcggcaatattatttgtgcagctgaaatcaagttttactacatagcatgttctgactttggaaggtgcaccaagacagtagctgctgttggagacttgttctcaaatgctatgagttaagaacaaggcaacacaaaaaatgttaatcgataaagtccttcgtccttcgaagcattatttcccttaggatataatgattttcggacgaaggttatgaaggacgtaccttcataaacataacatacgaggatgaagaatggaccatatgaaatatagagaataacatagacaattatatattattatcacttattcttgcattagtattatgaagaacagaaatgcatcgaattcaaatatacttcagcgttggaggagataaaatgcaagtgt

SEQ ID NO: 21280 - DNA, 652 bp, Arabidopsis thaliana landsberg
aaatttcgccacgatcgaattttaaactgcgtgaggtaaactgtaaagcacagcaaaaatttacgattctggtgaaatagaagtttatgtagacttttacacgctaagtaatttgttttggtttgttttttttgttttttttggacaaaagaaataagtacaataagagagagattcagaaatcccagagtttaaaacataacaaaacagggcattccccaataccacaaaaagatagataaggtaaatcaacaatggttccatgagagctttgaagcaaatgcttggttgtaatttgacacaagtgagatcacagattgttgacaattcttccagtaatttgttttggttatgagcagtgttttaacataagaatgtatatgttaattcacggatgtatatgtgaatgaattttgtaaaatttgatatgaatatagacgtttattaatatactttttctgcttcaacatatttgatgttttagaattttttttttgtttcatagtaagtgatgttctcacgttttaatacaaaatttcttaattgttttatatttttgaatatttttatttaacagtttgtcttaatattggttaaattgtgttaagttttatatactataaatttgggggttcgggggattaaaaagaca

SEQ ID NO: 21281 - DNA, 592 bp, Arabidopsis thaliana landsberg
  unsure (1)..(592): unsure at all n locations
aaaataaaattataaagtctggatcgatattaaaacttttttttaagtttcaaatattactttatatgaaattaaaaaataatgtttaatttcaagatatggggttatatggtgggacatgtttgagtcgatattaatacgagatggtatactatgggcggaatcctagaattaacaatcaaaatataattatacaattttaaaaactaaacaaaaataacaatattaacaaaacacaaataaattaaaacttcaaattttttagttataaaaattattccaagttgtatcatacatagaaaaaaataatagcatataactatagatcatctttaaaacaaaaatttaatttttgttgataaaaatatatgtccgtgatatactttctattatgttatttatatataaataatattaattaaaataatttttttaactttctcacaaaaatatcaatctacggcgtattgtagatcaatctctagtgagttattattgtcagggatgtctgatagtctccctccaactatatactgaatggtatatatagncttcttcatattgtcttttcctatgtgactaccattttttt

SEQ ID NO: 21282 - DNA, 1673 bp, Arabidopsis thaliana landsberg
gaccaaggagaagatgccgactgttgcagaagttgaagttttcgttttcttttttgttttcgtggctttgttggtggggtatgacatgaaatacattggtgtaccctatgcaatttgtttacatgtctgaaatgtggatctatgactcaaatttctgagccatttcttggcataagtctaaacattttgaaggcagacttattcgcaagagcgcttgcaagttatacagagtttcagcctgtagaagatggttgaaaaacatttgggtgtaatctatgtaagcaatatgttaagaagcggtttccgaaaattatgtaagcactacaatatttttttttgtgaaccgatattaattagataaaactcaaaaaagccattcttgaggaatgttctttacatacgtgatatgatgcggttcgatactgactttacgcgccaaattatccgctttgacatttgcattacgagaaattaaagataaaaaaaaacttgaaaatttttccttgtcactctgcaattcctccaaatacactgagaaggccggccattcggttggagaagacaccatcttcaccagatccgaacagtctgtgagaaacacaacatcttgattgtcggcgccaatcatgcacttcatcgcccatagaagagcttccacttcggcatgtagtggggatagacttcgtctaaagtttgctgctcccattgttggcgtctctccaaattcctaataataatgactttaaaagacttttaatattcatttttgtcacttttattgctaatagtaaaatataattaatctgaaatttctgaacttgttattaggcacaaacttagatatcgtctccaatggatttctaaatgctttttaaaaaaaaatcttgaaaagtattttgttaagagtaaatttaaagaagagcatcaaacgggtgtgtccttcggaattactaattcgtttgtttttgatggttatatgtgtaacgatgataaacgctcgcaagtcacaaaacttccacgtaaagaatgaaggtttctttaatagattgaacactttagtgtatatattaaatgttttgttatgtgtacttcttaatcgttttaacttcttaatcgtttctttcattcttcatatctattatttatttactaaaaaaaagtatgagtctttttaatcagtcacatcaattataaggaatttttttattttacattcattagaagtttgtactggtgctttactaaaggaaacaatctaagcataaactgaaatatgtattagaatattagcattactaaagttccgatagtactttctttgcatggcaaaggattacgaaactagattttgatttcatcgtaaaattaataataagatttaccatatataatctctctttttccattctttcatctatcatgctatcacattaaatgttttttgttggtgtttaaacacatcaatattttatattttgtacggttttattagttttagtctatattttcttatttttttcaacatatcacacttttaattttttattatattacagaaacaacaaatttatttgattacaaggttgaatgatccttttcaaaaatattttatttaaaaaaagtttaggtttacataaaaaacataaagtaataatgagtattggaaagaaaaa

SEQ ID NO: 21283 - DNA, 632 bp, Arabidopsis thaliana landsberg
  unsure (1)..(632): unsure at all n locations
tgtccaatatccttctcccaccatgattcccagctcttctctgttggaacacctatccccccattatcatattcaatcgagttttgtccaatctgcccagtcttcgacaatttcatgccactcaaaaccagatgggttgaataagaaaggagcaaagagccatgtacccaccatgaaccatatcgaaatagtgaacaaccctatataggttgggccaaatatgtgatacacgagtaggagaatccctagctcagtagccttcacaaaatgactacgagagtaaaacctgtagttttcagcaaatttggcatggaacaccacaaatccacggccagtacctctgtattctgcgcctccatgcaacaatgtcttgcagtagtaatgaaattttgtcccaagttgaaatgtgaaaaatacggaagcaagttgtagctgcatcaatacaaaatcaaatagggcgtcataaaatcccctctcaagcccaatctccatgatcataggcatggccatcanaaaaacaatctgcacgaacgactgcgaagcanggataatttccatcatcataggcttgttccccaattctttttcaaccccacttagaacgagatacaccctccatagagaaatacata

SEQ ID NO: 21284 - DNA, 446 bp, Arabidopsis thaliana landsberg
atgatgaaatagatagttaaaatataagtaaaattttatgttttttattacaatttatttcatacaagggttactggattaaatattagaaaaagtgtgtagattactatttactatataaagtttaaatattattgataaatatttaaataaattttataaatttatatcatacacccgcctatttaggcggttcttatctagtcttattatataaagtatggttttcaaagttactaactcatacgatcgtgccacatgtcaagtcaaacgatcagatgtttacatgtgtcattcaaaatttaattttttattctcttaaaaaaatagaaaatcttaaaaagtaaacatatttatatatactaattcatttactaactcataggatcatgccacgtgtcaagtcaaacgatcagatgtgtacatgtgtcattcaaaatttaact

SEQ ID NO: 21285 - DNA, 587 bp, Arabidopsis thaliana landsberg
gaaaaggatactttgaagatcgtaggccagcttcgaacatggatccttacactgtgacctccatgattgctgaatccacaatcctttggaaaccatgaaagaagaaaccttgagcctcaaggaatctctataatatcagttcatgttcattcttctatggtctctttctcattctgaaacagttctcatgtgttctttgtttattatgtttgatttgaagtcttcaatttgtttctgagaacgatagttcctcaacttttactttcttctatttctaaatccctacataattcagattttgcttttagataggccgggacgtatgaactaatagttttgtcagacaccaatacgagaatgtacagtccaaatcaataaacggagtttaaccgaactgagtcctttaccaaaattttgtcaaaaaaagttttatccgattttaaattcattaagaaactctgctatgaatattcctaaacacagaatttgcaaatatttaagttactagccggcccaaaaaatcaaaccataattatttaagttttaacacagtaaatgttttgggccccattcagttttatggactc

SEQ ID NO: 21286 - DNA, 1002 bp, Arabidopsis thaliana landsberg
  unsure (1)..(1002): unsure at all n locations
tacagttgtaacgataatacatagatacatatatatatataaagattttgatactgttacaacacttttgcgattcgattttgggtgcggttttggttatcattcacaacctaagtaaacagaatcttccaacctttaattgaattatatttccaatttttgttagacgaaaataaatgaagatacccagcaatgacatgtatatctctaatcaccactatgttttttggagatatgtgagactgtaagtcgccacttttgaacataaatccatatttcattcaataatgcgaccaaatgaccaaaaataaaatttgcaccaaaaaagaaaaaaaaaaagagaaaggaaacaaaataatagactattatatcccgaaaaaaaaagttgctaacttctagtaactaacgtttagtgtttaagagtatgaacttaaaattagtctgatgacattcttatataaaaagtctctaattttttttttcattnttggtttggcatttaacatttggatgagcatattatatatacacggaaatacaatttacaacgccgtaaagaagaaggaattctgattatatatattcatatatatgcatcggtttatcttcacttaccaaactggttcgttaagtttgcataaacagatcaagtaacggtttcattaagtcattctcaaataattttaaaatttcgtcagtccatgtcttatctttattgaaagaaagtgaaactgatttgatacttgttttttatccgctaattacattgtaaccctaaatttttaacttgataaatttaagttatgtggttcaaataatggcatatttggaactttgagatcgatatatcatactgtcggagctagaacttttatttacatggtcaaaaatgtaaaaataataatcatatggataaacttatttattgtattggtgatcaggcggagctaccacttaaaagaaataaccccatactatcattcttgccttttaagtggttat

SEQ ID NO: 21287 - DNA, 555 bp, Arabidopsis thaliana landsberg
ttttgttttgcgtcgcgcgcttcgtcgcgcgacgaaggaggttcagattctattaatgggttgcgtcgtgcgcttcgtcacgcggctaattaatttaattttagattatttaatgtgtggcgtcgcacatccagtcgcgcgacatttcattttaaattcatattggatgacgtacgccgttgtgcgcttcatcgcgggacgtttgacgttatttttataattaattcaagtgtctcgtggcacgccccgtcgcacgacgagccgttttattcttaatttaatctaattgttatgaagtgcgattagccgcacgacaatcctttcaaatttactttggtctgtttataatgaattaaacacggaatatgactttatcctatgcttagctcaattgccaaattaatactgttctgtttggatgagtattttaatttataatcgtgtgacgtgatcgctcttcgaccgtagcctcgaccgttactttttctttctcgcttagtcgcaggtgtgagccatgcgttgaacgtctgtttatttattacattctattttatg

SEQ ID NO: 21288 - DNA, 1420 bp, Arabidopsis thaliana landsberg
ccggtaccgtgagccttcctcaggcttagagttcgccgatgtagaaggaaccgtcgacggcttggtggtgagggctgcctgaatggccactcggaaacactctgcggcgccttggaagtcggcacgcacagttatgattcctcatggtcccggcatcttcagtatcatgtatgtatagtgcggaatggccatgaatttggccagtcccggcctcccgatgatggtgttgtacccgcagtcgaagttcgccacctcgaacctcaggaactcggttctgtagttctccggagttccgaaggtgaccggcatgtagatgtggcccagcgggtattccccttccgtcggcacgatgccgaagaaaggagtgtccgactcgtggagctctttgaggtgaactcccaagccttggagtgtacgggggaaggtgacgttgatgctgctcccccgtccactagcaccttctttacccggctctctcggatcaccggatcaacgaggagcaggtatttgcctggatggtcgaagttgagccactgatcctcccgagtgaaagtgatcgggtgctccgaccaccggtacggggcgggaggaccggtggtcgccaccagtatctggcggtcgttgagcttttgttgtcttttgttctcctgcgacccatgtccgccgaagatgacgttgacctccctgtcaacgcgcgggaaagctcctcctcccccctcctcctgccgatggggctgttgtggttcatctggtcctcccctcggaggaggaggcggtagaggttggaagggtcggccgtgccgacggagtgcttgaaatccggcagtttcgaagggtgtggcgcatgtccttgtggtacgggcactgggcgtcgaggatgtcgtccagcgtgcgctcacctccacgaggtcctcctcgggcgcgagaggcgggtggtccggcggcgtgtacttcttcacgaggcctcttctcccagcgtttgtcgggcggctggttcgcgtcgcgtcgtggtgctgctggtgcaggctttgctcctccgatgagatcctgggcccgctcgtcggcggtgatgtagaggtcggcttcccggaacagctcctcggaggtagttggcgccttttgtagtatggctcggacgaaagccgagtcattggatcctctgtagaagtcctcgatcacggccgcctccgtgacctcggggatgcggtttctcatggtctggaaccttttgaggtacgaccggagagtctcatccccccggcgcttgatggatttgaggtcccatggttgcgctggcttgtcagagagggactggaagttggcggtgaaacgtcgactgaagtctccccagtcgtcgatgcagtgtcggggtagatgtcgtagccactgtagcgcatcttgcccaaggacgatgggcaga

SEQ ID NO: 21289 - DNA, 572 bp, Arabidopsis thaliana landsberg
  unsure (1)..(572): unsure at all n locations
ctctttatttaaaaatcaaaaaacttaaaccctaatatttccagagatttccgatcgaattcattcttcattttataaccgttatcgatttttctaccccttctccttagtaaccgctgaaatgaaccgcattccctattttctttaaattctattgatcgttcttctttatttcttgtaaccaccattatttcctttctatttctgattcgaaattaggcactctcgaatttcagtcggatttcttagtgatcccctaaacgcaaggaggaggtcaagggaaaagaaagagagaagcgctggcgaaaaacgagaaagataagatgccggcgaagaaagagaaagttacggcgccgacgaagaaagagaaagagaaggtgccggcgaagaaagagaaagttaaggcgccggcgaaaaaagagatagagaagatgtcggctgaggagcaatcgccggcccgaacgactgcgacggtgatggacgctacggctccaacgacagtgacnnnnnnnnnnnnnnnnnnnnnnnnnnnncgacggagacccagatgcttgaggatgctacgtttatga

SEQ ID NO: 21290 - DNA, 605 bp, Arabidopsis thaliana landsberg
acaacgctctatatctgtacagtggtgtatatctgtacaatagtctacgtatgtacatttgtctatatatatacagtagtatatgtctaagaaaatttcaaaaacgtattagtttccgaacaaatatctttctgtacaaatgcatcattttgtattgtggtttatatctgtagagtaattgatatctgtacagtagtgtatatctgtacagtggtgtatatctatgtaaatattatttgtatagtattcaatagtataaaatttaaaaatcattaaacaaaatgcatattaaatgatagagaaaaagacatagatttttatttatatgatcaattttagaaaaataaaatttaaaactaagcattttaattactaaactttgagggaatgaaatataataaagaaagaaaataaaaattttaaaaaaaaactgacacacatcacacatctctcagacgctttatctattcctctttctttctctcctcagccaaagaggttccttgataattttcaaaattcttccactatcccacctctacttctattaggcgcagctttattacacataatactaacgtacatgttttcccaatattaatagt

SEQ ID NO: 21291 - DNA, 578 bp, Arabidopsis thaliana landsberg
tctgaataacttggaaaatttcgaattacaagttacagaagcaaagcgtcgcaccgtagtaaaacagaataaaactgaagcaaaaactcaatgtcgactagatgtctcaggacaaacccctcagacacctatttatacaaaacaatataaaatgagtagtcagatgaagccggggaaacttaatcgaccgtcccatagagtgataatgggccgagatgggcatcgtgatcggatgaagctccggaccgcttccaaacacttcttcttctcctcttctcttccttgtgctcagcttatctagttgagtgtggatttgagtagaatttgaagatgtggtcgagtgcctagtcgagtggtggtagagtgatgatactcgatctcgtggtcgagtagagtgaatgtccgagtggtggtcaggggtgtgacgaagtgttactcgacccagtggtcgagtggtgtcatcgagtagcatggagtgtggtactcgaccagggggtcagtgattggtaaaacggcctcaatgttactaaccaaggggccgagtgtgctgctggagtactcgacaaggggcgagtatg

SEQ ID NO: 21292 - DNA, 591 bp, Arabidopsis thaliana landsberg
  unsure (1)..(591): unsure at all n locations
ttttcaaattgtatgaatgtgtgcttgttcttcatcatctcctgtaattacaaataaattataaaaacacaattacgtaatcatttggatttagacataattatacctatattataactcactaataccatttgtaccacctgtcctattgtatctcaataaaacatttgtaccgcttatactatgatatctcagttttaccatttgtcccagttcgtcaattctgggtttcacaaatcgtaaatttcgattggacactcactaaactctctgattcaaaacgatacaacagcccagaatgaacaatacaacaattttatgttattaacaactaactccaacaagaaattcacattaatctacaaatcaaaaggagatcggatttacttttgccgttgaagaggaagctcactttgggagcagattatcggcttggaagctacggcgatctcggaagctaactcgccggtaaaattagagctcanatcgccggcgaaatcggagctcaagtcgccggcggaangatcggagaaaatcacgtcggagagtaggttcgcgattttggagacgacggttatcntttttttttta

SEQ ID NO: 21293 - DNA, 337 bp, Arabidopsis thaliana landsberg
caatgacaagagagacactcaccggaattatacatggatacttatatttaatgccaagcaggctacaccctactctataatgacgctggatgcgcactactgacgatcaggttcgaagaatcaacctattgaacaatctaatcgtcaatgatgattctggcggtggaaaattgagtacatggcggttgaaaatggagtatcatgtggtatgttgactaacacattttcatgggaccatacgcataagattgtaatgtaacgggaacgattggactaacctaattttagttggtgaaccatatgaaaagcgccaagacatgtggaatgagaaacacgc

SEQ ID NO: 21294 - DNA, 655 bp, Arabidopsis thaliana landsberg
gaggatcccctgctcttgatcatctacttctatgttaacactttgatatctacttgctaattctacttaagttcaatgagtttcggaaatattgtacattcattcttctgtttcaatccaattccagtatctgcgatctccgattccagtaattgccattcctcaagccgaaatcggcatacaataactaacattcgaagtataattgggccgaccactgtcaacaatgggccgatttatagatggacaaaaatagaattggcacgcccggtgggactcgaacccacaatcgtttgattagaagtcaaacgccttatccattaggccacgggcgcttttgtactatcacctacttacagttatatatatacgaaaacgataaatctctttgaaaaagattaacatacaattactagaaataacagaggcaaatcatgtgtataatggggacataaccttagagaatagatttggacaaagttttgatttaatttcttacaagatcaaaattgttgcaactcttcattagatctctaaagctagctttcaatttcaatttcagtgttatgtatagtatctaaaaaagaagaagtgttatgtcagtgttagcggatgatgatataccgtaatgtgatgtacatttgaaaagatggtt

SEQ ID NO: 21295 - DNA, 570 bp, Arabidopsis thaliana landsberg
agatcatatccattctctacgtttaggctcaatttgtttctgatgtttgtgattgctgctaatgggggggtttacatgcgattagcaaattgcagcgacgacaaaaaaagccttcacaaaccacaagaaataagcatactactctttaaaccatattgaacagagaaataagagacacaaagactcatgaatctatagatgtgtgtatctagaatatccgtaagatactaagatgatcacataatccaaagtaaaggtccctattgatcataagtaaacttgataacgcacaacactttattctgcttcacgtttttgctaagcctatactcttgtatagtccaagttaccttcttcacttcttctccatcacaaacatatatttgtctcaccgcttcatagaacgtaaataccttcttgaaaccaatgacattgccgaaattggacttgattagcttagaacggagcccgatcttccagtaaccaccatcgcatttatcagtgtcaccacaagtcccgtaagcgaagatgcaggttgcgtaacttagaaacatcacatcttgaggatcc

SEQ ID NO: 21296 - DNA, 547 bp, Arabidopsis thaliana landsberg
  unsure (1)..(547): unsure at all n locations
tcgcatttttgtttgttcgcagcgcataactttcggcctcgaggagctgttggagggatataagcgagccttgctgctgttaggacgagagatcgtttgcattggccagacgttatcgactcatttgaatttgtaagttcattgaaaatcttgttcgtttgtccgattgtcttgatannnnnnnnnnnnnnnnnnnnnnnnnnnnnnnnnnnnnnnnnnnnnnnnnnnnnnnnnnnnnnnnnnnntttccgatttacgtcgatacgttcagagaagatagttcggtagagacggatgtcaatgtatccgccgttgtaaccgaacagcaacaggtagtgacaaaggtttcagagagtggtnnnnnnnnnnnnnnnnnnnnnnnnnnnnnnnnnnnnnnnnnnnnnnnnnnnnnnnnnnnnnnnnnnnnnnnnnnnnnnnnnnnntctgttagtgaggatagggcgagtcagctttagaacgttcgtgccgggaagaagcttcggggtctgttacaaagttagagctatttccgtgagccatcgagtgt

SEQ ID NO: 21297 - DNA, 527 bp, Arabidopsis thaliana landsberg
aatgacgatcagatatataataaaggtgagttttcaaaaatgtttgagttatgatcaaagtggtgagtctgcgggggttggtcatccctttcccagactttatcgtcgcgacaaaacctttgaattactcttttctcatcctaaatcaataatacaaacaacatatacctttaattcttagatgatacaaatttcgaacttgtttctaaatcattctatattaaaaaaattgttatattttttaataccaaacaccaactttaattattagaagataatacaataaggcttggatatagtaatacttcactacaaaaaaaaagtaagcaacattagagtcatcttacactacatcttcttatatatatttattttattttatgataagtttatataattattaatttatgatattgttaggaccatatgtttacatagattgctttttaaatgattatcttggttcaattgaaattcaataaaggtgaattggtgtgggtatttgggttaatatcatttaatcacat

SEQ ID NO: 21298 - DNA, 658 bp, Arabidopsis thaliana landsberg
taatcccttagctcgcgtaagccgctctttcccgtaaagctgctattgtgttctcttttctatgtaactgattccctgaacttgtcatctatgtgctttggacagtcatttatggatttgcaaattccaaacgggcaattgacatatgtatctggcgaaggactgacgacaagtgcttttgtgcctttttgtggtggtcttcttcaagcacagggtcaatatccaggcgacatgagatttagttactcttgtaaggttagataccgataggaacttgtcatgatcagtgtggagcttattctcatgaaacttaaatgtgatttttgaaatctttttgtttgtggaacagaataaatgtggaacccgaatcacaccaatggtacattggcctgataaatcatttgggttggatctttctcaacccttggcttggcgtagatccggactactgatgaaaccgacaattcaagtcaggtaaaacagcttcctctaaccccatctccctctcaactggtaaagaatttgttttacttacataattcataaaccggaacagtgtatgtcccacattcggtggaagcaatcccgggattaaagcagaagttattcactcgttgagcgatgacctgaatctgatatgtggctacgcacttaatgc

SEQ ID NO: 21299 - DNA, 732 bp, Arabidopsis thaliana landsberg
tagcctcaacttttctatagtatagattataggaaagccacaagaaagtgatggacattataacattaaggaattgttgaatagtttataggattgtgtacttatatgttattgtaaagacgcttttgccctctctagataattcaatatctacattttatttttaattacaaaaaatcggtttcactttttcgtttttttcttccgagttccgcaaaactacaattaaaattgatttcccttttggtttagaattttgatgaattggagagtaactgatctgatttttgtctaagactagagtctttgggttacctagacactatcccttagggtttagattctttcaatgaaagtttgtttaaatggatctattaggttttagaggaaacaggtgttgacggatattgtgatgatagaataggtgagtagggcgtaaatgaagtaagtgcgctggtgaaaactcggaaaagttgtcgtgacgaagaagaagacgatgatgaagaagagaacaccataaactggagaaaggggcaaaattgtcattttcaactccaacaaatacccatttctataagcccattagaaagttatatttctctaatttttgagccaataagtgcccaattctataaaaccctgaacttttatagatgaaaatataacactgatatatatttgattatcttaaaataacacaaaccccattgtagggcaagtgtgccaacaaac

SEQ ID NO: 21300 - DNA, 665 bp, Arabidopsis thaliana landsberg
  unsure (1)..(665): unsure at all n locations
aagtcttaagtataccaaagactctcggtcttttagagggtttcattctacagctttcaagaagaacacgtgagatacacgtgcggtcgttgtggccgtttgacgcaagggcaaagtcgtttttctctcatctctctgtacttcatcttcttcatataaggttgtagatcgatctaaagtttgttagatcagagatagagaaagagagagaattgtaatcaagttctagagagaactagagagagaaagcttgtaaagttacattgtaaagaaaaggttctagtggatttccnnnnnnnnnnnnnnnnnnnnnntagcgattccggnnnnnnnnnnnnnnnnngttaaatcgtgtgtgtcttgatttctttaagttctcttcaaagtttcgattcattctcaaagttcaactcgtttgattcgagagtttttttgtgagctaagtgttgatcaaatccttacaaattggtatcagagccaggttcttgagccagttcgaatcggagtattgctggtaaccaatcgcgatctgtgatggatccggtgattctcactctggaagacaaggatcatggctcatctcagcgtcattggtttgaagacgttgtgcttgggactaacatgaacctcgtaccgaggaagaaaagaagatcagagaacgaaag

SEQ ID NO: 21301 - DNA, 2904 bp, Arabidopsis thaliana landsberg
  unsure (1)..(2904): unsure at all n locations
tgaaaaaataacaaggtaaatgaaggtagatgttttcaaacttttgacgaccataggtatctaaggatcaagggatcaacgtttttactgaaagttataaaaaaattacgccaatattttatttgtagtaattgaggccgcaagcatgaatttggtcctattgcgttcatggacggctctgatcggacataaatacggtataaaattttttaaaaataaaagtcaataaacaagataaatcttagtatttattcggtataaaataaaaatctttgcatattaaataaatatttgaatatgtatttgaattataggatcttgtaaaataatgaatgttatatgtctagttaacagttttatcggttagaccggctggtcaagtatggatctaaagacactgttcttttctatgtagcttgtgtatttaataaattaaagagttggcggactaatattaacctaactaatgttgtttgcacaacttaaagagttagtgaactaatttaactactcatgtcggtctcttatggaatgtgtccatgagtaatgctaaagcagagatctcaatcaatcatgcttcaaaaataaagttcatagattcaaaagccatgacaagatatctaaaaaatcatacgaacagttgtaagtgtgtaagcactaaaaaaaggttgttaatattaatcaagtggagacaaggaaaccaaaattgatttagccaatagctgcgaaagaacaaaatggtaattacgtccaaggacaaacagttacaattatcattttcagcaagaaagtcacacattcattcatacacatttgtctcgtctgcatttaataacattgacaccaaaatggttgggaagattacccaatttaaagacttcggtggcaaagcacgtctaataaatatacagttgggttcccttctattaattactcaacactcacttctatatcacagttttctactaactctttccttattcttgtaccatcctaaatcagtaagtccttaacgtacgcaccatgtgtacgttagagaagcgcggcgatctctttctcctaaccctaaccggcgaagacgagcacagattccaccccgacacgatcgcctctgttctctcgcttcttgaacaagcaaagtctcaatccacaaaaggatccgtcctcatcactaccggtcacggaaagttcttctccaatggctttgacctcgcgtgggctcaatccgctggacacggtgctataaaacggatgcaccaaatggtcaaatcctnnnnnnnnnnnnnnnnnnccctcctcgatcttccaatgccgacgatcgccgccttgaacggccacgcggcagcctcggggctgatgtttgcgctgagccacgactacgttttcatgaggaaagaccgtggggtctatatatgagcgaggtggacatcgggctaccggtgccggactacttctcggcgttggtcgtggttaaggttgggtcaggtatcgcgagaagggagctgttactgagcgggaagaagctcaaaggagaagaagcggtggctctcgggatcgtggactcagcggcgcatgatagtgcggaaggtgtggtggaggctacagtgagccttggagaaagtttggccgctaagaaatggaatggtgaggtgtatgcaaccattaggaagagtttgtatccggagctttgtcggatggttgatttaacggcaaataacttggccactcacaacctctagaaactctcattgtcttgttgggagaaaaatggttgaaatatgaatattgccgacaaaagtcaacgtccatttcactaagcacgtatttgtttctcaccaataaaacataattaatctaacctacgtctttttatttttcatttagttgaaattttaacaatattaataaccatatcaatacaactattgataagttatattagctagaatatttgtaattcatacttgataatcgtactagcatcagcaatatatgtcacatcatgcatctatttataatatccaaattacgtcatatgaccataatcgtatatatcgccataagatagaatgagaaacgggtgcagtctgatcaaccaaactcaaccgaattagacaacccacgagaaaccttatatggtgtggggaattaatccaaaagacaacattgtatatagagagaggaagtgttacacaaaaataaccatttttttttttttttttgaatgtaaaaccaatacaataagtcagtaacgaagatggaaaaaccaaacaataaacacatattttcttgttacacttgagctatgctttttcttcttctgtcgttaattccaacgagatgtgagtggacatccaaggcggacgaggaaacgactatgaagatcagatagtgtgacggtacaattctatttagatcgaaagtagtatattcggtagcatttcggtatgtttttaccgagacttactgagtcatccgataataaaatatataaaaaaacgattataaagataaattgtattaaaaaaaacatgtgtaactaaaattatagatttctttaaagaaaaaaggaaagaagaagaatcctatgagaaaggaaaagatggtttatatcatttctcattgacattagtgaggataaaacttttcaaagagattttgaattttctctagaaatttgcgaaaacccttttaaaaaaactagatgctctttttgtagagaaaatatttattttcataatcttgattgaaaaattaaaattttttttcagaaaaatcaaaaactaaaaacatgttagatattagtaccattcaaggtctaaattatatttggtgttaaatccaaatgaaattatgtttgaccaaaaaaagagatctcgtacacgccggcccagggccttgaca

SEQ ID NO: 21302 - DNA, 595 bp, Arabidopsis thaliana landsberg
  unsure (1)..(595): unsure at all n locations
tgcttactccgagcttatcacgaaacgccccagctatttcttcccttactatatcaatggcagccgatgcgagaccaccggctctctggtcaaacataggtggggttggctggacattagcatgttgtctttccccccattggtttgaggtacgtggtgcattgccactcgccctatatggctcataggtttgatcattcctttccggccttctaggtggggccggaaagctttcctgggctctggatcttgaattattgggttgatgcattgcatagtgtgatgagaagtgttgctaggacgggtgaagatttaggtaactattctcctcaaaaaggtcatgtgcggactgtccggacattggcctggaccgtccgtgattatatgtgtaccgttcgtcgttgtatgcggacnnnnnnnnnnnnnnnnnnnnnnnnnnnnnnnnnnnnggtggctagggtgcatatctgggtaactcattaaaaatgggcacggtcgtggatggccggacggtcagggtatgtgcagatcgactgatttactacagatttgcggttgctcagggtacgtgtcatcagcgatcaataaaggggtt

SEQ ID NO: 21303 - DNA, 612 bp, Arabidopsis thaliana landsberg
aacacctaacctgtaatacacaaaaatttctagtcattatcaagtaatgactattataattatagcaaaaacaagaaaagtaaaatgaaagtggtgtttgatatattaacatgattttttgtatttttttttttaaatgaagatattttgttaagagtgagattaatggatgatttaatgcaatatgaaacttttaaatttttatcactaagttttgttatattttaatgatattaatttagaatgacatgtggcactcactggtgtgatgatgtgtcacttatatggagagagttggccaactttcatatatatgatttttaagcaaatggaactgaaccaaattaaaactgaaccaaatctttacctaaactaatttcggttgaatttggtttacgaaaactgaattaaccaaacttaccataacccgaacttaaactgaaatatccacccctgcccaaatgtttaaatgctatacaaatttaaacctttaaatgccaaacataggtattaaaactaaatgaagtatagatatatgcaaatagggtagactatgactttaacttgactaggatatgaggtttaagacacatgacctttttgtgatgtaaa

SEQ ID NO: 21304 - DNA, 286 bp, Arabidopsis thaliana landsberg
ccttgatctttttcagaagatttaattctgagatcttaacttcttaacactcttcccaaattcatgtcttatggaagacaactgcgacttcacccacaattttatgtcttctgcttcatcatcattatctgctgcttcatcatcattatcttctgcttcatcagcatcaaccaattcaaacttacgcttcctgtcttgcgtggaagtactcactttagttttcgatagagttcccttaaaagaacaagccggctcaagctctcttttcctgatcaccatatatcta

SEQ ID NO: 21305 - DNA, 821 bp, Arabidopsis thaliana landsberg
aatttgtttctttttacaaaattttatcagctttcactaggggtaatatattatggaacggatattcaattttcgttaatgtaatttgttccgttatgccataatcggtcctctgattggtaatctgttatgcaactaagcatattaaaatccacatattttcagctatatttcccactcgttcgtatacaaaaagttataaataatttaaaacatatataaaaagttaagaaattcaaccaaaaattgatatacacctatcaatgtttttcttaaattttaaaattctctgatgaatacaaattcataaaatttatatacaactaagataactatacaattatggtattttcaataccttttgtgtgaatgctagattactaatataagttaaaaaaggtcttagttcacaaactaatcctttatttatataatgggatagtttgatgacgaatttttatctggttttggtaataagattttaatatcttaacaggatttatcagtgtagactgcggattatctcctaatgaggtctctccttatattgagccgtttactggactacagttcacaacggattcaaatttcattgaaaccggaaaacttggtagaattcaggcaagcctagagccgaagtaccgaaagtcgcaaacaacgttgagatattttcctgatggaatacgcaactgttacaatcttacagtgacacaaggaaccaactatttaatcagagctagagcaatatatgggaattatgatggtattaacatttatcctaaatttgacttgtacataggccgtaatttgtgggtaaccat

SEQ ID NO: 21306 - DNA, 577 bp, Arabidopsis thaliana landsberg
  unsure (1)..(577): unsure at all n locations
actcgtatttgaaaaatttatctgaaaacagaacgactgatttatcatcaactttcgagatgaattgtgaatgcaatatgcgtccgggtaataaaccgtaaatttctatggattccttgcagaaagatctatccagagacgtcaaattatcgatcttactctctttggttcaacgggaagttagtctacaaaacccttacttgtcacagtttcctgctcttcttcacaaacaaaacctagatttaaactaaggatatatgagatcaaaacacgaacttgcagaagaagaagacattaagaggttagttttccttacccaacaatacaatgatgacaaaggctcgactccggttaacactggccacaactttaataaagacggccatgaagagaatctcgggtcagtgtcgattntaggttgcggtcgtcctccgacgacgaaaagaaactccttgcaaaatcattcaccgacggtctctntgtttgtgagaagagatccatgtaatccttcattggcttcaatccccatcttcctaagagtttcgccgctttcttactcactatctcgccggaatct

SEQ ID NO: 21307 - DNA, 456 bp, Arabidopsis thaliana landsberg
tcatgggagagagggagagacctttgattgaatcatttatatgatgaatacatccaaggcggcactaatcttttttgattcacaagaatctttagattgattaaaccgaaatgtgtatgacgaaacctcaaaagaatttgatcaaatataagtccatctaatttctttaattagatgaatagtaaatttgaaatgaatagataaataattcatggacgaataaactaatgatagaacaatattcacattttccttctttattttttggtcaagaatattgtcattctattcttttttgaattatagtaagaaacagataaaatgtgttcgtcttataaatgatgaaactcttaaataaaataaaatctatgtaaccaataagctattcttatttagttaaatggaggaaactttaaatagattaatcttctctaaataatttatttgcatacctta

SEQ ID NO: 21308 - DNA, 579 bp, Arabidopsis thaliana landsberg
tatcgcttaataaatgtgctttgattctggcacagtactgttgactgtacgagcttcagattcctccctaaattcacgttgctgtcgagagtgctggtgcccttctggctgctggcttcgggaataggtaggttgcagtggtggtggcggtgggagctgaggccaagaagcctgtgaatggctagccgaagcaacagaagctgtaggatgattgcccacatgttctggtatgtagggagagtggcacgaagcagtgtgcaagacctgctttggctgattctgtcgagcttcggcttctgcgatctccttttgcttcagaatagtgatttggcacattcttgtaatatggcccttgtcctcattacaaaataagcaatagattttcctgggctgatcccatatcttcctcgaagccctgggcctctgcccttggagctggcggctgaagaactttctgctgcccgaggactgtgaggtgactgtggctctgaagctacttctttttcacattctgctggactgtggatgactgacatgctagggtggatcttctccaaaccctggcatctcaaaaactgt

SEQ ID NO: 21309 - DNA, 557 bp, Arabidopsis thaliana landsberg
gacgctttgctaacaaacttattatgaattcatcaggaactagttttccatggttaacaagctccttgagctacacccaaagcatcaaacgattaacaagcataaataggcgctcaatgattcaacctctgttctagttatagacaagagatacaaccccaaaaagaattctcatttcaaaggaaaaatctgatcatgttggtgacattagtgacctagcaaacaaaatgcaacatttacatcaaaaaaagtttcactgagaccaattttataagcagactcaattttaagatgattgaacacacaattaaaaatctcaaaattgatctctatgtcttcttcactgagcatcgtgatttcaacaatcaacagctacagaaaatgaatcgagaattgagaattgtaacctgagaggagaggaggccagaggaggagagctcttcacgaacgagatcaccagtggcaatatgaggaacgccgaggagagaagagagacgagaggcataggttcctttaccaacaccaggacatccaagaaacacccagtggaaatttct

SEQ ID NO: 21310 - DNA, 574 bp, Arabidopsis thaliana landsberg
ctatagcacttaacaacacacatatatttttttatatttttattaaaaatttgacaaaaccgggatattggcaaacaaaaaaaatttactcgataatataattaaaatttcatggtacaatatcctttcaaaaatccaaagttttgtatttatttatcaaaacttaacatccaggcgaagcacgggttatcaatctagtattaaatattttgattggtttggcgaattatgttacgacctattttctttatatgggtttgggtaattctaatatcaataagttggagtattaaaaattatgaaattcttaaaactaaaattaaaatatacacatttctatacaaactcattttaaattttatataaaaaccatacatgtatatatatatcaatatatatgtgtaaaatgtaagatattcaaaactaaagttttttttactatatgtcggctatatactggtttattttctttgccacattattaattaacaaaccattcaaagcctattaccttttattttctttattaaattaaaaagaacctttaaaattaatttaattttttcttttgata

SEQ ID NO: 21311 - DNA, 490 bp, Arabidopsis thaliana landsberg
tttgattttttcagaatttaaccacaataaattgaggaaagtaataaaaagaacctttgggaataaagggggtcattgtttttaatttaatgttgcttacatcaaatctagatatctgatagaatttgaaaaatatattagtaatttaggataaaacatacccatcaataacatgattttagttgatattactcaagaaattaaggttttaaaggattgctttaatagtcaagtttcttaagaatattttgtaaataaaattaaccacatttgacaatttggttatggaaatcgaaaaaataaaaatagaccctgttttatatttccaattaagttagtttgtgtatttttatgagaagaaaaaagttcatgtattttttttggcaaatactaaataaaactaacaccgtttgattatttggttaacgtcgttaacagtccgttacggcgaagggaggcaatcggaaaaataatagatcgtgcattttat

SEQ ID NO: 21312 - DNA, 494 bp, Arabidopsis thaliana landsberg
gacatcaaaagcactcagatctgtgcttcttcttcttcacccagaaaagtaaaacaaaagtcaaaacaacggcgccgagagcagagaagaagcccgcggagaagaaaccagccgccgagaaaccagtagaggagaaatcaaaagccgagaaagctccggcggagaagaaacccaaagccggcaagaaactcccgaagaagccggggccggtcggcgataagaagaagaagatgaagaagaagagtgtggaaacttacaagatctacaccttcaaggtgctgaaacaagttcatccagatattggtatttcaagcaaggctatgggtattatgaacagtttcatcaacgacatcttcgagaaattggcgacggaatcttcaaagctcgctaggtataacaagaagccgacgattacttctcgggagattcagactgctgttagactcgttcttcctggtgagctcgctaaacacgctgtatctgaaggagacaag

SEQ ID NO: 21313 - DNA, 1540 bp, Arabidopsis thaliana landsberg
ccttaattctgcccagtcagggttctactcagtcatgcgctttctctatgatggagttacctctgaagaagatcccagtggtctgcgagtatgcagatgtctttcctgatgaattgctaggaatgccaccagaccgagatattgaatttgccatcgagttgcaaccgggaacgacaccaatttccaagaggccctaccgaatgccacccgctgagttggcagaattgaagaagcaattgcaggagttgctggataagggatttattcgcccgagtacttcgccttggggatgtccagcactgtttgtgaagaaggatgaaagcttgaggctgtgtatagattaccgccctcttaatgcggtaactatcaagaacaagtatcctttgcctcgtattgatgttctctttgaccagttggtcggggctaaggtgttttccaagatagaccttcgctctggctaccatcagatcaaaatacgagcaagtgatattccgaagacggcattctcaaccagatatgggctgtatgaattcttggtgatgtcattcgggctgacaaatgcaccagcatacttcatgtatctgatgaattctgttttcatgccagaattggacaagttcgtggtggttttcatcgatgatattctggtgtactccaagaacgaagaagaacatgccgggcatttgcatgtagtgcttcaacgtctgcgagacaccacctttatgccaagctatccaagtgtgatttttggctaaaggaaatcaaattcttgggtcacactatctctcaggatggaatagctgttgatcctgataaagtgcaagaggtgatgaattggaagccaccaacgactgttcgccagattcggagttttctgggattagctggttattaccgaagatttattccggacttctctcgaattgcgacgctatcactgagttgctgaagaaagaagtcaaatttgtttggagttagaagtgcgaagatgatttccatgcattaaggcagcatctgaccacagcaaccagtaatggcgcaacccgataacaacaagccttttgatgtatattgcgatgcctctggcaccgggctaggttgtgtcttgatgcaagacaaccgagtcattgcttatgcctcaagagcactcaggcctcatgagcagaactaccccacacatgatctggagttagcagctgtggttcatgctctcaagatatggagacattacttgatgggagctcactgcaacatttacactgatcataagagtctcaaatacattttcactcaggcggatcttaatatgaggcagaggagatggttagtacttatcatggattatgatttggaggtgcattaccaccctggtaaagtcaatgttgtggcagatgctttaaggaggaaggcccagtgcaattgcatgaacatggatgcaagagtcaccaccctatgtgatgagttgtgcaagctaaacctggaagttgtttctccggtgctttaaattatatttccgtggagcctaccttacaagagcaaa

SEQ ID NO: 21314 - DNA, 535 bp, Arabidopsis thaliana landsberg
  unsure (1)..(535): unsure at all n locations
ccaggtccgccaacaaatgcgtccctttctatcagcccctccgaaagggtaaggagtttgactggaataaggattgcgaacaagccttcaagcaattgaaagcatacctgaccgaaccgcctatactcgcaaaactcgagaaaggagaaccgttatacctctacacggtaatctccagaaccgcgataagcgatgtcctggtaagagaagatcacgaaggataaaaaccgatctattacgtgagtaaaacgtnnnnnnnnnnnnnnnnnnnnnnnnnnnnnnnngaaaaactggcactggccgtagtcatgctactctgnnaactgagactatatttccaatcacaccccatagtggtcatgacgtcccaaccaatccgaaccattctgcatagtccgacccaatcaggacgacttgcgaaatgggccattgaactaagagagtacgatatagagtatcgcaccagaaccagcttgaaagcacaggtcctagccgactttgtaatcgagctccagttagcagacctggatggaac

SEQ ID NO: 21315 - DNA, 418 bp, Arabidopsis thaliana landsberg
aatatacaaatttggtcattagtggtagtagtggtgttactttactcggtgcaagtgtatcactgaatggaattttgtattgggttgcctctcatttaaagaataattccttgttcgtcctagtttactacaatttttccaatgaaaaggtctacaagttttctgatctaccatgtggggagaagcatcatcacgatgttcttgttcttaggatttttagggaagatcggctttcgttgttaaagcaatgccatctaacaaagaagattgagatttgggtgaccaagaacaagattagaaactgctctagtggagatgtggattcagtggaatggatgaatttcatggaagtgtcaactcctaacttgccggttttagtacagccaagttacttcatcgacgataaaaagctcgttgt

SEQ ID NO: 21316 - DNA, 840 bp, Arabidopsis thaliana landsberg
agttttccatttcagctacgggataatctcccatggcataatcagagtaagataagtaatcaagactaggtgtatcaaatgacatagtgtgtggacaaacgatgcattttattgttagggtcttgaggcttgcacttgatacagatacatgcacattcacatccaattctttccagtatatatgattcatgactaattcctcaagcgcaggcaaagcatggagaagaatctcaaacttatcagaagacaacgaaacattttcaagaacgagagttttaagcattggtaagaaaatgctcccatccaagcaacgaatatcaaatccagataattccagcttaactagtttcttgttctcgaaaacttgtggatacatatgataagaggtatcaaaaatcattgatagataaagctctgaaacaccacgcaccatcacattctgtatccaacaatccactctatccgaataagaaccgccgccacaacagagggagaatttcttaatgggagaagcgccctgcaatgccaaaaccctatccacgaaatccatgaaactccgaagaattccgtccttttcccgtttaccctcttggggatgaagaaaatcagagtcattgaaatcgagacttgggacaaacgcaaacagataacgccacttctttgcgagaaccgatgttgaagcagcctctttggttggaagggatgacaagatatgagaaataacctcgtccggtaacttgctgaagagatccatcttctccgcgtccattgtctacacaaatctcctaagcaatagaaaaatcaagcatacatcagtaccaaacagtaagattctagggt

SEQ ID NO: 21317 - DNA, 506 bp, Arabidopsis thaliana landsberg
  unsure (1)..(506): unsure at all n locations
aattgtcgggtcaactatgaagtcaaatagctctnnnnnnnnnnnnnnnnnnnnnnnnnnnnnnnnnnnnnnnnnnnncgtgtgattgtaaatccacacatcagacaccctattccagtcaaatattaagcattgttaaaacaggatactgttaacacttaccgagacatggtcacaatcttcccgtagaaagttgagtgcaagaggatggtccagatccacagattgagaaacatcaattatataaaggtgcccctgaaaaagtcaagataatatcattatatttgtttcgttttgctgccacgaaacgatcaaataagtgacccttgtagagataaatcaaaactcacctcaaaataaagtatgttatactcactgagatccccatgcactaatttgcacttctgatataatactcgcatttgaattatcaactgaaataagaagagattaatcgtgacatatcaggtctaagtaaagtattacaatgatacactcaggacccc

SEQ ID NO: 21318 - DNA, 1016 bp, Arabidopsis thaliana landsberg
agcccgttgagttcaaccaagtgaaccgaaagcaatcttgggtcgaccaaatcatctgcaacacgctcttcatgtgtctggtcaacaacaaactcccacgctgctcgcgtatcccttccaagccaccatcatgtgcttctttactacttcatgctggaaccgacgagttgcttatactaccgggtccacagaactatgcacacaccacttcctctgctctctggaccatgctcaccaccactcctccatcgtggccgagcccatcacgtgtatgtaccttgatctatcattgttgttctactaaatgtgatgcatccctcaacatatttctttaatcaaagttggcacgctgtggtgcaccccttcgccgagcacatggactactcagtgactcttcgccatacccactagaacggcgctcctattggggatcctgatcattgtgccctacgttgcatacgtgacttacattgacttcatgaactatatgggacactacaacttcgagtttgtccctaagcgtctctttcatcattccctctcctcaagttcctctgctacaccccctcgtacgtctacactatatatacctacattgttaagatttgaactcacatatataaaacataacgtggcatcaaaatatgttgaaggttccactcgctccatcacacgcaatttagaaccaactactctttgttcattccaatctacgaccatatctacggaacgacccacaaatgcagcgagtccttgtacgagaagtcgttggagagagaggaggaatcacccgacgtcatcaacctcactcacctcactacactcgactccatctaccaaatgcgccttggcttcccgtccctctcatctcgtcccttgtggtctagatccccatggtacctcacctacttcatgtggcccttcactgtcctcttctctttcgtctccgtaacctcacccttcactctcacctccttccaaagtttgcatttcacgtaaaggcatttcgtttacat

SEQ ID NO: 21319 - DNA, 1093 bp, Arabidopsis thaliana landsberg
ggtgagatagaatctctttataaaaaaattatgaactcaaacgagaaggaatctgcagctggttaacgagaagtgagaaggaatctgcagcatccttcaataacgcaactttagatataggagatttggctgacctctccttgtccgatccagttcaattttgagatctaacacctctttctccaacaacaaaactctttcagaagcagtagaagatttaatcttctcattgtccagctcaagtttgagattcttgacatgttcctcgagttcttccacctgagaaccatcagaaatttcattcttcctcgccaaggaaacctcctcaagctttttctttaaccaatctaccttgaatcctgcttctgttagctcgctcaactcgatgtgagcgtctctaaggtcagtctctgaaagactccgtggagacctgtctagtgtctcgataagaccgaggagaacattaatgtatgccgtcctcaccaactggttctttattctgacatctactgcaatgtttggatgttccacgaaaagccagctgacccgagacacctgacaacattaagcaaaatcaatgttaacatgatcgaaaaacaatccagaggaaattatgagctctaagtactaaaaaagaaactaggggatacttaacatacctgagtatagagaacatcgaaaccctcaatattgaacatctccttctcagttggtacccctccttcatgaacaacttcaagtacttttacttggacttcaatgatcagtttattattttctaaacaaacttcttgaagcttgttcgtaggcattactttgggatgacaccattctaataattcagtacagaagagaccttctacttctgtgaggccaaccaaaaacaaaataaaattctccacctttcttcttcggccattagattcctatattatatatataggttgaggtaatttaccaatggtcggtcgagccccctgccttgttggttccaccccaaggaatgaatcctgggtccccctttcccatccaaatggtaggaatccaggatcgggaccgctcaaagtcccacccaagtaagtccattggccaa

SEQ ID NO: 21320 - DNA, 825 bp, Arabidopsis thaliana landsberg
cacttgtacccaccataaccggaatgggagaccacgtctcaggtcgcgtgagtggatatgtccactgccaggttcactcaggtactaggcttaccgatttaccatatttctcggcatgtgcttagtacgttcaatcgcttgacacaggtatccgcacgttaatccttattccaatttcacctcgtagaccacgcatccccatggatccgtgtccaccaaccaactatcaatatgatataaaaagtgggtacaaccaattcctgatctcgcgcgagtgctagaaaaatcactcgtcttctaccgagatcctaattaaataaagcaactactcgacctagcatactagtattcatctcaaaaggatttcctgagatcatgcaactagggtttcaaacaactcctacacctaagtgcacaatcaatcctacaatcattaagtatagtaaaatagcataaataacatgttatgcataaaaccggggcttgccttccaaagcagtggcaggcaggtcctctggtgcaggctctggtgctggatccggggctacctcctgagcagctccttgctccggcacgaggacgtactctccgtcagcaaggttacagtctatcgaaatgcaatgaacatgtatgttatgattatgcaggatttaataacattatgctaagagaagaaaaactaagttaatgagtaacttagggtttccaggtcatatatggcttttgatggtttatgcttattacttctaggtttaggttttgctagggataggcatagggaatttgtattgcatctatatatttcagtggacaagttataaagag

SEQ ID NO: 21321 - DNA, 2015 bp, Arabidopsis thaliana landsberg
  unsure (1)..(2015): unsure at all n locations
cgcaactcattccttttttcttatatgaattctttttcgtatagggcctgatcctaagcaacgcactaagagcccaaaagagcgccgaagatgaaagctatgaaattgcgtttaataatttacgctccgaagttatcagactgagaaacgaagctttggaaaaagataaaattctgcttacactggtagataaagtgaaaaaagacgaagctgcttcaaaggcccaggccgaagctcaaaaacgcgagattaaagatcttcagaaacagctggctagagctaaagaggagcgcgcgcttgaggaaacgaaacgagaacttagtgattttatggtcagcaaattggaatcaaaagttaaggagcttcgcacatctcaggggaaatgctatgtcaaatctgtagaatgtgtgaataaaattaaatccagcttcgccagcgtaggcgccttttccagcgaagagaatttctctcgaggcaatcccgaaggtccgctggaatggattagccacgaagcagaggccttcgaagagattctgaacagtcgtggcgacatatgcgctttttcgggcgccagaggaattgcttgtgtcttagagaagaagggttgcgaacatgtaaaatttttagctcaatccgaagctaccttatcttccgaagacatcaaggacccctcggccgaagcgagcgcagttggaggcaaattttttactgatatctggaacgactgcggccgaggaatggcacaagagattattgagagaagcgaaaaacgcattcatgatgctagaagagtagcagacgctgccgaaaagagtagggagcccgaaggacagttaggtaccaactagtcgttcttgttgcgctgtaattttcattttaaactttgctcacgatttgtaaaagtactgaagaagtgttctcttcgctcagaaactgttggacgatctgccgacccccacacaaaaggggatgaagaaattaatcaaatggccgaaactatcatggacaaggtcgttgaccaacttctgaataaagccgccgaagcagtattgagggaagattaggtgctatttggaaaaaacatttaaagtgtaatctatgcaacactttgtacatttgaatgtaatatacaagtctcttttcattattgaattctttacgatgcatgaaactttaaatacataccgtttttgagccttcggcgaaaaaacaccttcccttcttttcatgcttcgtgaagaagaatttttctgtgtcacaacaatatccatagtattctgatgaataatatccaggcttcgtgaaaataatctccgaagctacatttccgaagatcaatgatgtatctttttgcgactatgatttctccctttcaaagcgttcttctgtagattaataatgtatccacctcttgtgccatgtgcaaaatgatgtatgatgcttatgctatgcaaaatgatgtgatgatgttatgttatgtgagatgatgtttactccgaagatacatacgcatccctgcaataaaacacaatgttttataagcctcccttaggagcttcttcgccttttacttcagcggaatcagcgtttatttttcgctgtaagcctcccttatgagcttcttcgccttttactttcagcggtgttcgcgttgacttttcgcgcttcgccttttacttaggcggtatcagcgttgacttttcgctgtatgctctgcattccctttggaacgactttggagcagaaaacttacactgcgctcccttaggaacgactttttgtagcttcagcaaacttacactgcgttgcttagaacgactttttgtagcttcggcaaacttacgctgcattccttagaacgactttttgtagcttcggtgaaacttgtaatgtgatttttagcnccgcgttcccttaggaacaacttttgtgctttagcgacttttttgaacttcgtgagtctgtggacaagatataccatactatggcaggaacgaagctataacaggaaattg

SEQ ID NO: 21322 - DNA, 3458 bp, Arabidopsis thaliana landsberg
  unsure (1)..(3458): unsure at all n locations
ctcatgtaatgaaatcaaaacttgctttttctctgacatttttgattgttttggttctaaatttgatcaaactgactgcatcgagcatttcggaggaatagtacacaaaacattagcaggaatagatcatttccatcattacaacaggtttagaggagagatctgagacaacacaaaggtatattgaacaatgcagtaagtaaagtagacaaaacaagaaaccatatttatgaccaaatgtgttcatttcaaacaatggtaaaggtctgaaacaacagaggagacggacanagttaacatactactactactaatcctaacaatagaggagagaaccagttactatactaaaaagccaaaaacctcaagaatcacttgaaatttgttaaatgagacctcaagagacaaatgaaacatatcagagagctacctaccatgtgtcaagagcaaagcagaggactccacggcacctgaaagtccaaagaccgatattgtcgccggcttttaagctgttacctttgacgacatcattccagtcccaattcaaaatgtaattcaaggttccatgtccagagtccttctccatcccccatatcttgaaacgcaaaccccacattttaaatctttggttcacaagaatcgttcccgcaccaatatcttcgtcgtctttgtcttcgtcttcctgcttggcttgacacacaagaatcgttcccacaccaatatcttcgtcgtctttgtctttgtcttcctgcatggctcgacactcctctggcgtcaagaagtcgtttctgattagcttctggaatgggattaagagacggctgaggttagagttgacatcactcttgaacagagtcctttcaaagatcagcttcggggtttcagcatcagcgttcatgtgtcccatcgcttggaaaacccacttaggcgtctctgtagacaaccttggcaaaggagaaacctttactttcttgactttaccactcttcctctgttccacggcacgcctcttgcgacttgtgtcgttctccgttaggcatgaagacggagaagaagattggtaattagggtttggtagaactttcgtctctgtcttctctgactcaaccgtgttgtaatccaagaataacgaagcctcataacaacgaaggttcaagaacgatgaagaagatgaagccccattgagagtttcaaaattttgtggctgttggctgtgtcttacaaatttcatcaggttcttctcgaaaagtctcttctcgctgtcttcgtccgcttcctcctcttcttcccatataatcctggatttgcctttcttcacacgttgttcttcatcacacaccaaacgctcaataaaactagggttttgtttggtttcagtctcgtaatcaatggggatttggttaagatcaggaagcgacgaagaagaagtagaaacaccattaggtttttgctgtctctttaccaaagacgacctttttttcctcgggacatgagataagaatctcttctcgctatcgtcttcttcagagacagtcttcttctgactctttgaatcttctcttttctctgcaagtagacgacgacgttgttcttcttcctccgcagccataaccacagtttccgccagtaaacacagcctcgaccacatatccttccctgaatccattgtgattgaacaaaaaaaactcaaaagttcttagaatgatgacctaaggatcaaggagattagagttatagagagagactaagcgagaacgagaattaaaagtgccttctgttgccttatatacttacattaggttctaggtctttttgttttttccattttttttgtgtttagtggtttgattactgtgattagcaactaattatagccgttgtgatcatgttaacattgtaattaacattgtaattatgaagtaacattgtaattatgaagtaactgagaagtttcttttcttttttttttgtatttaattttattatgtgatatatatatatatatatatatatatatatatatattttttgttaacttgatttcagttaaatacaaaaactgaaggtatattattaaccaaaatgtgagaagaattcaatataatagtttttctcattttcctataccataaaccaaaagaagtaaagaactctctctcgtttaccaatactcaaattcatcttttccactacataaacacacacaaacacaagccttattatatagtttgatgtcttgatgatgatacactaaatgagagaatacacaacatcatcgtacgttgggaagtccaatggaccgtccccaatcagtagcagagaagtcacaataaccgcgacgaagattgtgaaaagcagaaacgatttacacgggtcagcgctgttttgtttctctggtccaaccgtcacaatcccttcttgcctttcacttccgccgctaccaagttgtagcaccggacaagtgaaaaacccgtatacaatccctgctataagtgctcccagatttgtcctgtcatgacttattggttagaagaaaaacacaatatccttggttaacatgttattgcttacgtatagtctatgttgtagatctttggtcgattgaataaagtaagagttaagcagtttgaaacctatcaatcttgtttatgatccattgatcctactacttatcaaaccaaagatcataggacaattcaaagaaccatatgtgcagatgggtgtcatgattctttataatgaactgaacctaagaagaggctgcttacgtagaaacaactagctgaagaaataataaagaatgctgaacaagaaacaactagctgaagaaatattgatggatattggaaacttaccagtcatcaattggaccgaaatggcttaatatgagaccaaatcctgtcattataatggccttctgaaacaagtcctcatattcgttgcttttgatcatctctttgttctgattttggtcaacgagccaagctcctattaacgcaaatgctggtccctgcacccacccatatacacgaagacgattgagaacagaatgtatggtgcagtttggtaatatcacatgggaaagattagtgaaacttacagttcctccaactgtaggatctgctgtatgcagaaagctcatgaaatttccagagactcctccgagaatgtaaatgagacaaaacgtgaataatccatagtcacggcagacttttggtccaaaagtaagcagagcccaggagctaagggctacatgaggaattccagagtgctgcagatgtaaaatgaaagtgtttcattgacgaaaaggggatattacatgaaaccaagtcatcaagagtgctaaatgtgacatgcaaaaagatgcaacggaatgaggaactaaagcaatatatacttatgatattaacaatgttgttgtcaggtatttaaaatctctagctgttttggtcaagtgt

SEQ ID NO: 21323 - DNA, 617 bp, Arabidopsis thaliana landsberg
agcgcgcggcctgaagtggagtcgaacccggtggcggccgagaccgaggtcgacccggcgccacccccaggaaaccggcgaaggctccctcgctgcccctgcggctaatgtgtccggtggtggctcgtcgccaaccgctgtgccgagggctgaggatcccccgaagacggcgatggagccggcagcggaggatcccacggcggctgggtcttcgcaggtggcttagtgggtgtgggtagttagagaattttgcatatgttgctgaaccttggttgctgcgcaggttcaagattttgggcctgcgcacgcaaccgctactgctaattttgtggcggcttcgaccgtggatgctaggaatgaatcggatgagtctgcttctaagttttctgattttggtgactctgggagttcggttgagtggacggaagagtcgtcggatgaggacttggattactttgcggccttggatgtggcagcggcggaggcttcgcagcgtgctgcggatgctgaagttgtcctggtcagagtgctgggcgtagcggcgaagggcggttgcgacagtagagtgagtgcagtggatggcagcggcttcgtgtgggcaggctggcaacaggaat

SEQ ID NO: 21324 - DNA, 794 bp, Arabidopsis thaliana landsberg
cctgagagaccttttttacactcgcaatattgatttttatgaatctaaaatgttttgaaaacaaatttataataaagggtattgtaagttgaagattttgaagagagaagaaaaaaaaaaaaaaaaaacagaagtgtgtaaaaaagagtaatattaatggatagccaaattttacactataattaagaaactaatgtttgtatcagttttctttgcaacccaactttttgcatcgtgtgatagaggtaagacaatatttttagattatagtcattacaagataaatatatttatttggcgaggatgattattgcatagataatcaatatcataattctgacagcggtgatgatggtgaccatggagggagaggttacaatgaatgataaaaaaagaaacaagtagcaaagttaattttgatggaggtagtgttgtcaagatttattaatgcaataccggaagttacaaatgagataaagaaagaagacaaataaatgctggtaattttaataaataacatgtataaaataaaaatgacacaatatcagaaagaaaaacattgaaatagtttaaattttgtgaaaacgacaatgtttttggaaaatatagcttgtcaaaagatacaattgcatgccatttcagaaaatataatgtgtttaaaaaaaatagcatgttgcgaaacaatagcatcccatttcaaaaccaatcgcatgtcatatgaaagaatagctggtgtaagaaagaatatccggcgaaagaagacaattagatattggaagtttttaaaaatgaca

SEQ ID NO: 21325 - DNA, 1047 bp, Arabidopsis thaliana landsberg
  unsure (1)..(1047): unsure at all n locations
tatggttttattctaaccgataacgagaaaatcgtaaaagcagaatcataaccaaataaaattacatatgatttctagatggttttaaattaaataaaataaaataaaaatcaaagctgaaagccgtaagcgcacccctaaaaaagagtaaaccgaaagtgttattttagtgtaatttatgaccagtaagatcgcgcgattactcttcccatacattaacagaaaagtaacacttttgtttctttttttccctttttaaagcgatacactagttgaagctgctacgcttagagaagtttgttggctatgcataaatggaaaggtcgacactgtagaactgacaccagagacaaagtacgaggttgtgtacgtggtgaagttagaagatacagcttctggatgggagacaccggtaaatctgaagctgaccttgcccaacaatagggcaaggccacaagagcggagtgtgagcttggaggaacacatagggaaaccgtgggtagatataaaggctggtgagtttatgatgtcagcagaggatactggagaggtcagtttctccctgtatgagaccgaaaacggctcttggaagagaggactcactgtcaaatgtgttgaaattcgtcccaaaaactaaggcgtgatgcctgtacttgtgtatgaattatgcatacttcgttattatcaaatatcaactgatcacctatttcaatgatattaaacattataaaaccttttttggcatttgtaatccacatgatctataaaaataaggttgccgcattattcccccatgtacatgttactttcttaacttttcaagtctttatttatcgccaccgcgcgtctatgatccgaatatcattagaaaaagcccagaaaaaaagtcatttatttttaatttgatcgtttaatacttgtagttttaaatttagaaacaaaatacttcacttattttttgttatctcttaaaaccatcgtcttttacatntcggtaatttcgaacctaccatttaacatgcgttaatgaccgtaacagaaccattt

SEQ ID NO: 21326 - DNA, 240 bp, Arabidopsis thaliana landsberg
actcatcccgaagttagagaagaactaaagagtgctagtaatgaaataccttcatctgtctccaatattctccatagggaccaaacaccacatcacgccccccattcataagcccatgaacggcttttgatctcgggcggttggcaaacttaagatcgtgtgttttcaatacctcttgagctgctttccccggaggatactacgagtatggggacacggccaaaatgaaggagcatgagt

SEQ ID NO: 21327 - DNA, 1665 bp, Arabidopsis thaliana landsberg
tgcctcctgcgcagatcttcgactgggacgatctggtcaaggctttcgcgggaaacttccaaggcacgtacgtggccctgggaactcgtgggatctccaaagctaccaccagcagccaggagagtccctccgagagtacatccggcggtttttgaagcagcgcaccgagctgcccaacgttaccgactcggatgtcatcggggctttcctcgccggcaccacatgccgagacctggtgagcaaactggggcacaagactcccacccgtgcgagcgaactaatggacatcgccaccaagttcgcctcgggtcaagaggcggtcgaagccatcttccgaaaggacaagcagcctcagggaaagccgaagacagacgcccccgaggcgtccgccccgcggggcacgaagaagaaggccaagaacaagtcgcaagcgaaacgcgacgccgccgacgtgaatctcgttgctgcggccgagcacaggaaccttcggaagcctcctggaggggccaacctattcgacaagatgctcaaggagtcgtgcccctatcatcagggtcccgtcaagcacaccattgaggaatgcgtcatgcttcggtgctacttccataaggtcgggcccctgtggaaggtggcaaaggccatgacaacgacaagaaggagggcaacaaggcagaggagttccccgaggtccacgactgtttcatgatctacggtgggcaagtggcgaacgcctcggctcggcaccacaagcaggagcgccgggaggtctgctcggtaaaggtggcggcgcagtctacctagactggtccgacaagcccatcaccttcgaccaaggcgaccaccccgaccgcgtgccaagccaaggaaagtacccgctcgttgtcgacccgtcattggcaacgtcaggctcaccaaggtcctcatggacggaggcagcagcctcaacatcatctacgccgagacccttgggctcctgcggatcgatctgtcctccatccgggcaggcgtacgcctttccacgggatcatccccgggaagcgcgtccagcccctcggacgactcgatctactcgtctgctttgggacgccctccaacttccaaagggagaccctcacgtttgaggtggtcgggttccgaggaacctaccacgcagtgctggggagaccatcgtacgccaagttcatggtcgtccccaactacacgtacctcaagctcaagatgtcgggccccaatgttcggatcctcatacctccacgcttacgagtgcgacgtggagtgcgtggagtacgccgaggccctcgccgagttcgaagccctcatcgccgacctggattgcctctccaaagaggcgcccgatgcgaagcggcgcgccggcaacttcgaaccagccgaagcagttaagtccgtccctcttgaccccagcaacgacgccgacaagaaagtcaggatcggctccgagctcgaccccaaataggaagcagtgctcgtcgactttctccgcgcaaacgccgaaatttttgcgtggagtccctcagacatgcccggcataccgagggatgtcgccgagcactcactggacatccgagccggtgcccgacccgtgaagcagtccctgcgctgttttgatgaagaaaagcgtagagcataggcgaggaggtccacaag

SEQ ID NO: 21328 - DNA, 1090 bp, Arabidopsis thaliana landsberg
tctacatgagtctgtcttctattagatgaacattacatgaattatccatatctgtttagattttgagtttcttatgcctagacgaactaagttctccatcttgttgttgtggttctgtttttttgaaggattctaaagttaatttcacaccgtggttggaagaagcttatcaccggaggtaactatgaataaagcttttgcatacatcattgctgtgagggacagatttcgtgatgaacctgcaaaatatcgacagtttctaagcctcttgcgtgatcgtcgagctcgtaggtatgtttaaaagtatatagagcacgcacatgtgactatgtgagaattgattctgatgttattattttctttgtagaatcgataaagctactttctttgtagggctggtggagctcattaaagatcacttggatctgcttcttggttttaatgccttacttccagctaggtttcagatacccatcacaccagctggatttcaaaacgtggttggaagaagcgtaccaccggagacaactatcgaggatgcgacttcttacctcaatgctgtgaaggaagcatttcatgatgaacctgcaaaatacatggaaattactaagctcttgactgatcttaaagctcgtaggtatgaattgttttctccatgttatgtttgattttctcaatttacacaacaaacacacatgtgaattgattctgatattactaagtctctttgtagaatcaatgccgctagtgtcattgcaaggatggaggaactcttgaaagatcacttgaatctgcttcttggtttctgtgtcttcctttcacctacaaggaggtttatcacgaagcttaaggtaatagagtgcttaaatgcttatagttactggatgtttcttatatgttaacttgtgatttaagtaacaaaattgtggatgtgcaggcaaggtttctgggcgatggtagtcaagtagttgactcagttctccagatattgagaatgcacagtgagggaaacaagtccaaagacgaggcgtctccggaggtatggttctttgtaaaacactttgtgttgtgtgttgcactttctagttct

SEQ ID NO: 21329 - DNA, 1693 bp, Arabidopsis thaliana landsberg
  unsure (1)..(1693): unsure at all n locations
atcaatgtggataacatttgaggagcaaactcaaacaatatgagcaacaaaacttttagagagaggaaagaggtgaaacaaatcaagtgaagatcaacaagtgaacacgatgatttgtttaccgaggttcggttccaaagaacctagtccccgttgaggaggccacaaaggccgggtctatttcaaccctttccctctctcaatcggtcacacagaccggtcaaggcttctccttaatcacttgggtcactaagaccccgcaaggatcaccacacacttagttgtctcttgctagctttacaaagcacttagaagagtgagaatgagaaggagaaagtaatccaagcaacaagagcaacaaaagaacacaaaacaccctctctcaagtcactaagcaattgagttgatttggaggcttggagaggatttgatctattgattgtttcttagagtgtagtcttttgctcttgtattgaatgatgagtagtgaatgcttggatgtcttgaatagtggtggttgggggtatttatagcctcaaccaccaaaacaaccgttggggagggctgctgtcgatgggcgcaccggacagtccggtgtgccaccggacanctgtccggtgcgccagccacgttacccaaccgttagggttctgacggtttcgaccgttggagctctgacctcttggtgcactagatagtctggtgccgcaccggacaggcactgttcactgtccggtgcgccttctagcgctgctgactctggcgcccactgtagcgcatttaatgccttctgcagacgatcgttggcacgaagtagccgttcgtccgctggcacactggacagtctggtgtgcctccggacattgtccggtgcaacaccggacagtccgatgaattatagcggagcggcctccagaattcccgtaggtgagcagttcggagttggagtccctggtgcaccggacactgtccgatggcacaccggacactgtccgatggcacaccggacagtccggtgcgccagaccagggcacactttggctgacatttgctctctatatttgaatcctttttcagtctttgtattggtttgatgtgaacatttggcacctgtagaactcataatctagggcaaactagttagtccaattatttgtgttgggcaattcaaccgccaaaataaattaggagaaggtgtaagcctatttccctttcaatctccccctttttggtgattgaagccaacacaaaccaaagcaaatatagaagtgcatatttgaactagtttgcataatgtaagtgcaaaggttactaggaattgaaccaataaattctcataagatatgcacagattgtttctttatttttagcattttggaccacgcttgcaccacatgttttgtttttgcaaattattttgtaaattcttttcaaaatccttttgcaaatagtcaaaggtaaatgaataaaattttgagaagcattttcaagatttgaaattttctccccctgtttcaaatgctttttctttgactaaataaaactccccctcaatcaaatcctcctcttagtgttcaaaagggttttagatattagttttgaagaggttgtaccagttctatcaaaagtaagataccgattgaaaaaccatcaattgaaaaatcttttcttaactcaaatttttgaaaaaatg

SEQ ID NO: 21330 - DNA, 498 bp, Arabidopsis thaliana landsberg
  unsure (1)..(498): unsure at all n locations
cctgttataagaagatatatatccagctatcgcctccatatcccaaccgatcccatttctccaaagatccctagctcgcattcctttccaacctgccggaagctcctgaaccaacaactcagctagaggaatatttgttagccacttatccatccaaaacagaatctccagaccatctccaatcacccaacttaggcccgggcttaccacctctcttcataccaacgctacactttttcaagttcgttgagcagacattcctaacttaagtcnnnnnnnnnnnnnnnnnnnnnnnnnnnnnnnacttacatctcatgattctcgcccataagctatgatgatcgtgaattagacgccatcctagcttagagagaagagctttattcatatcttgagctttcctaattcctagcccaccttcactcctagggctacaaactcttttccaggaaataagctgctgcttcctttgagttcagagctgcccgataagaacga

SEQ ID NO: 21331 - DNA, 608 bp, Arabidopsis thaliana landsberg
ggtaaaacccaaagagaaagtttcagactttattagaacatccacggagttacacaataagaacagggagcagtaacaataggatgatgatgatacaaagttacaaacataacacaacaagacgaaaccttggaatctaaccataattgagctacagaagaacgttggtctaactggtgaaaatatgaaaaattacaatcggcaaggttaagatattggaagaagaagaagaagaacctgaaactgttgttctttcttcatttccttgcgttttctagattcaggccattgactacacaaaccgagaacaccttccctgttccggacaatctaagtcaagcttcaatgtgcatggaagctagacaagccctgcaaaatggtttaaagttcaatgaccaaagaagtacaaaagtagtgaatttgatgtaaaaggacagaacttgagataaacctgaaacttagaggattagtttcgattgtcaatggcgagaaatagaggaagcagaggacggcttgtgagtgagaccgtcgtgctgctcctcttcttggccctgaaaccgtgctggtatgcgaaaacccgaagagaattcacctgaggcgaatccgat

SEQ ID NO: 21332 - DNA, 587 bp, Arabidopsis thaliana landsberg
gtttcgagaatgagttatagaatcatcttgaaagaataacaaataacaaccaaaatggttgcatctcatcgattacttacgttgatggtgtttgctctcctcaccgtacctatgatttctggtaacacatttatttgttataaattacatttttgttataaaaaaattgttcttaaatttatatttaaaaactacagttttaaatattaaactgaccatttttgcttataaactttttgttgatgaattttttatttatgaatcgtataggactaatttcagataaatgtacggaaggatgtaaaagcacaataggatgcaatacaagatgcatgatgagaggcggagggtattgtgaaagcgctaaaattcacggcgctgttaaaatattttgttgctgcaacaattattctaattctcccatctccagtccggtcatgaattgattgatctcttattctatatgtattctcgattataagaaattatcaaaaaatatatttaaataataataattgatattatctcattctaatccaatccccaatctctttcttttttttttaactgaaagattttcattatct

SEQ ID NO: 21333 - DNA, 631 bp, Arabidopsis thaliana landsberg
acattataaattgaatattaaaatgaatctaattcttttttaaatggtgaaaatatattcgctatatttgaaatagaaaattcaaaaataacattttttttttgtaaatgtattgtatgcggaaactacagaatttgtaaacctatgcgatgcagattgttagtaagtgagctaagcctaatccgttagactcatttgcaaatcttatacattgttaattatattagaagctaaccataaggttaattgattaaaaatatggagcatatgtggacaaggaaccaatcaataatgcatacatgtatatttcatagattactcgcgaataaactgtacaaaaaaaataaaaaattactcggtacatttaaccaaaaggtaatatatgcgaggtcgatccacaagactcaataagacattaaagatttttgagactcgtttttagttaaagcgaaaaagttgtttgttagttttcatatttgtaaataataatataaataaatgattaaatttatgaaataaatatattgcgccacaactgttggttcaacaacatcctatacaagtcttttaagttgtttgatttactaatttccacttatttttaaatcttgaatagggttggagagttccg

SEQ ID NO: 21334 - DNA, 1104 bp, Arabidopsis thaliana landsberg
ctttaaagcgcaagatcatgaggattggtagcattaggagtatctacaaccctagttgtagaatgaataggagagtcggaaaacgactcatcaccaatttcgtcaacaccaattctagtaggaaaaggagagacggaaaacaacaacgactcaccgttttctttaatggactcgatccttccgttaagctgatcgagatatagatttatacaagatagcaaattttgaaggtcttttgcatcataacgatactgggacattttgccttcaacacaatcaaacatatatcgtctaacctgtaattctcggttctcagcagccaaattctttagttgctcttttgctttggtaatcctctccataagatgggtttcttgatccatcatcttcctggttcgggctgtccgcgacatctccagaaactttgaagccacctttttagcaccttcccttgacggccatgactctggaaccggtatgaatggactatagatgagagcacaagcttggacaccacatagagttgacaactcgtggagtttcttgaatatcccgtttttcctcttcatgaaggatgttttccttgatctttcattagctatcaaagatagctttaccttcttcatccccatcaatttgtttttttttgttttgttttgtgtggtttgtataatttgtttgctcaaaggatgtttatatagcaaagaaaggtgattctatagacactaggattcttatcactttggtggactaattaattctaaataacatccaggaaatctcttatcaattaattgaccaggtaattcattattatctatataaaaatattttttcttatccaaagtttggtacgtctgatcctaaataatatctgatggcaaaaaaaagaaaaaaatctatccatgtaatacgagggggcatgtaatataatattttgtatttctaagttttgtttttattttggcgaattaatttctcttactctcattgtttctttttactaagaataatttctagtttactttgttcttaaaatgtgaagttttgcaatagttttaagtgtttgtacttttaaaatacagtaatatattgtcaatgtaa

SEQ ID NO: 21335 - DNA, 687 bp, Arabidopsis thaliana landsberg
tggcacacacactttgtaccaaaccgcatcatattacttatgtaaacaacattcccatgaatgactcttttgatctctaattagaatctgttgaaaaaaagatacgcatgcggataaatgtaattgtatttttcatataatgtagaaaattatatgtgtacagtaataaatttatatgtatctataagtatatgtatatacttcaaaacaatataaatgtatatgtgttgtacatagatttattaaaaataactaactaaaagaagttatgatatcaaaaattaaaagaaaaaataaacatataattggaattctttaatggtgacactgatacaagtgaaaaaataatgttgtcttgaaaaccgataactttatatatgaaaaagtaatttattaaaatattcactctttggcacttaattaaaaatttaactatcaaaagtaatactttttaacataattttttaaaactttctactaagctcacccatttctactagagattaagtcttacaataaaaataaacggggtagatctaacaaaaaatatctgtattaaacgaaattgttcaatgatacatattgtaatttatggatagcttaaggtttgagttttgattacagatttttttcttaatataataggcgaatataaacagttttttttttaacgtgtaatttgattga

SEQ ID NO: 21336 - DNA, 1415 bp, Arabidopsis thaliana landsberg
aagtacaagcacaaaagaagacgtaccgttgacacagtgtatcacttctgtcaccttttcccgacaaagctcgtattttctgtccactttcatcacagatctacagaataattgacaacatatttattaggaaaacagtacaatataaaacatgagtaaaaatctacagattaaattgaaatctgtatcgtttccctaaccatatcgatcgacagtgtaatccattggagagttctttcagtttttgtttgcttgcttggtctaacaactaaatcaattaataaaagtaaattagtttgagacaagtattatctgacatttgatcgaaattttgatattgtcttgcaaaatggattccttcttcccgtacatgtgctggtacaaaagcagatctaaccttcggtttatctcctcgcctttggtctagatctaacaactaaataaataaaagttagatggtttaagacaactatatcttacatttgatcaaaaattaaaactgtcttgcctgaatcggattccttcttctcatccatgtgcgagtaaaatgaaatcttcatttcctccattctcgcctttggatactgcttcatcttcaaccatggatcagagaagtttttggttctttaggcggctgtgttcttgtcttgctatgcttcaatatatatatctatacagaagaaacaaaaggtttgtaaaccctaattatcttttttgtcagagggggcatgtgtcacaacgtgtttggacaacaaataatctaaaatcttatcatttagtcaatcagaactctctttctttcaacaaatgtaaagatttctttccataaaaattaatttgaataataggactattctaattttaaaagatttctttctatgtataacaaactattcgaaaatgtatgaatgaactgtgataccaaaaaaaaattctgttgtgaaatagagtaataaattttgcagtggtgaattttacagaatccagattgtctgttaaatgctaagacttcatacgcttggagatcgttgttgcaaagtcgagatttgcaaagacaaggtctatgatttgctatggagacgactcgatgatcaacgcttggtccgatccctggttgccttcacatccaccaagactgccacggcctcgtaatcaaactgatggaaattatatggtctaagactgtgtgaaagccacaggaaacagctggaacgaaacaaaaatttgatagtgcttgcagaggaagatgtcaaagaaagtttagcaatcaagctcagccacatttccaataattagccatgtggatcctttggagattgtggaagagtaggaatttgctaatgtttcaacgaaagagtctctctgcgtaaatgttatttttctggccaagaatgatatgaaacaatggaaggtta

SEQ ID NO: 21337 - DNA, 542 bp, Arabidopsis thaliana landsberg
gccggggcgtgctctagcattgcaagggcgcgtcgaacacgtggctgtgttattctgcccaagttcttgcgcctggtgagcacccaaacatgtgaaccttgctatatggcttgtgtaagatttcttccctgcacctagagctacctagttcatgtgagttccaaggggagatcgggtctggcttagaagatatggtggcgccaagtcttgtctgtctgcactgttcaacccgagacaaaacaggtgtcaactcatgtcaaacggtcttggctttggttcaaacttttccagtgtgttccttaggtaatttggctcctttttgttatttagaccatgtggttttggcgtcatcaaataggtgaacacttctgatctctagattagggttgatttttgacttagagaaaatgtgggttactctatagtgtcctccacttgggggctgatttggaggtcttagaggggtctgtatgaatatttcccttactatatgttgagatatataatgtacttaaacttggtaagggttagtcatgaatgtc

SEQ ID NO: 21338 - DNA, 2417 bp, Arabidopsis thaliana landsberg
gatacgttattattgtttgtttttgatttagtattgtatagttgtaatttgatttaattctaggaatacacccgtggtatccaattttatttttgtaacatgctattataattttctcaactataaattttgctagtattattagattgacaaatagtgtaaataagtgtatgtgacacttagggttctaatgaggactaaaatattacatgaccattaagacctagttagttaaataacccaacaccatacaacataagaatccaatttgaataaagaaaaaccacccaaagaataattaaaaaagcgtagtcgtagccaaactcatcccataatataaccccgtcccgttaaattaaacataactttggcattttcttataaatttcaaatatttataaaatttgaaacttcaaaataaatttaatatcgacccaaacttcatcattgaattttgattgttatatctagaatttctccggtagtatatcgtcccgtattaatatatttaatatatatttataattttaaatttcttgtaaaatttaatttataattttaaaacttatgaagttttggagaaaagtttaaatatttataatttttgaaactttgtaaagtttctattctttaaaataaagaacccgagtaaaccggataaccactttaattttggacgcctaataaatcaaggttcctgcttattcgtaactgaaatcattttggtcctttttatagtatggctctgaaccaatgtctaatttttttaagcaatgtgggacattgtataatcatgattatggtccacccaaacccttcctaccatataacccagtcccgtgaaattaaacataattttgtcattttcttataaatttcaatattataaaatttgaaacttacaaaaaatacaatatcgaccttgattatatttaagatttttcatgtaatatatcgtctcgtattaatatattttatatatatttataatgtttaaatttcttttaaaattcaatttataagttttcaagaaattataagttttaaaattataaatatttaaagcattttttaaagataaactttataataaaattataatatttaaattttgattaagttataatatttataatttcttgaaacattttaaagtttcaattctttaaaataaaaaccccgagtaaatcggataactattttaattttggacacctgataaatcaagcttcctgctcattcgtaatcagaatcattttggtccttttataatatgggtctgaaacattgtccaatttttctaagaaatgtgagacattgtatacatattattttttcataggttgaataatatatgtccgtttaaaaaaatttaaattacatcatatgcagaaaaaaatataatattttattaactatatatattttatataaattcaaaataaataaagtataagatcaaataaaagtgaatgaagaattatatatttatgtttaaattaggtaaaaatattttaggaaattagttaaggtaaataacaaatatgattcgtttagagatattgtttatattaaatttggtaattaaatcattaattttcgtttttaattattagtttttaggtaacttttccaaaaattaatgttatccaagattagaacagaattaaacatgttatccagatccgaacagagttaaaccgggtaaaacttacccatttgaattaattgttgaattatgacttaaatcttcaatattatcttgaaaaatcccctccaaaaatgtatatatagattaaaaaaaaaatcaacattaaaatagttatcttccctctccttgggttttgagggagacagagataagatttgcatctataacgaagcaccttctctcttctctctcgtcctcaatacttcggtgtcaatcatcctcttcctctaaattctcttcttctctttgctgctacagaaaaagaatcaagctttagaggcaagcaaggactcactcacccacaagtatcctcaccccatctactcatggacacagcattgacctcagaatcaggctgtgccgttatagccgataagggattcaatgtggatccttttttggtcgaggctcttcaaaaccctcgacatcgtctaacgagtaagcctttttcttttgccggtttatttttgtctccgattcgtgtcatcccctagtttcctgaagttacaatctgtgtagaattggaacttttgtttagtaatttagcttagaatcaactggtattgaggattgtttattctctgcctatctgtataggcctaggttgatttagatcttgactagtgttattgaagttggaagcttacttagcagaagatgaatgacaaactccataactagtaaagtggttttgcaatagccatct

SEQ ID NO: 21339 - DNA, 272 bp, Arabidopsis thaliana landsberg
ccttgaaatcattctatgctacttacttactctttaaatgatttgtaaaccatgttaaccacttttcaaagcttttaaaatcccttgtgaattattctatgctacttacttacctataaaacgatttgtaaaccttgcttctctctgtagtgacaatgtttttgtgggtgttgattttgttgttatttatcttatcaggttataatgctagaattgtattctgtttgtggcttgtggaagctgtcgaccaccctgactggagaatttgcttt

SEQ ID NO: 21340 - DNA, 383 bp, Arabidopsis thaliana landsberg
taacgaatcaagaaaaggttgttaagagagaaaaagaaaacaaattcattctcattcatcttaattgggaccggaaagattacattggaacctcttatatagtaagagatactctaaaactgagataagtaaacaccacaaaacaaaattaagagattaagggtgtgtttgggatttgcactgagcttggaacataagagcacacaagtgggtaacaaaacttgtctctagattcgccaagatccactttactcaagattccattatttccaatgatgtaagcaatattgcgagcgggaaggtgacatttgtctattatctctttatcaagaacaaccgcgaccttcttctccgcgtcaacgaagaaactccttacgacatta

SEQ ID NO: 21341 - DNA, 634 bp, Arabidopsis thaliana landsberg
aagaaacgagagtgaccgagaggagaagggtagttccatttttgatgatttaattcccgggtttggtctactagcttttctccagctaaacggtaagaattcattcactcttcttctgtttatggttactagctagggagctttcttgcatgaaatgaataaacggtatagagcttagagcatgaaatgtagtagcatttggtgcttatggaagctgttctcttcaaatttgaaagcttgctagcgtgattttagttaagggtacgaagcttagattttggtttgcttgaactgtataatgcttatggatagctgtttacttggatactacaagtctacaaggtttttttatattgctctcaaaagcttcaaccttttgcttgtcattcatatccaattttgaatgacattgctcttcaaatttgtttctccttaaaactgacttgagattttactcaagggtctagaacttagagccataacaattacatgatgacatgtagcatgaactatattaggtcttactgaagagctttttgctagcatacaaagttctcttatgtgtactttgtagaacttacaagagaaatcttcacctttaatctgctgtagggtcattatatgcaaaattcat

SEQ ID NO: 21342 - DNA, 573 bp, Arabidopsis thaliana landsberg
taatttgctagaaataataccaatagagaaacaatttctccttatgtcgggtttaacctttatgcatcatcccatgtgaacaccatattcaaaagcaaatagttaataaaagaatatatgccattaaaattatgcatcatgctggatattaatgtttgtggagtgcattttgtggctatacaaaaaaatagaataaagagaatatattaatacctagatgagaatttaagatttaaagggaattctagaatttagaaaagagaagaaataaatagtatgaggagaaaaataagtaaataaaaatatattgttccaaaactagagtttgaaattgtgtaattaactcaagggaggaactcataaccaaatccaaattcaagtttgaattcaaaaagggaataaagaggaaaataaaatcagaataaaagaaaaaaagagagatcccctgttgggccagaccaccaatttggccaatttccttttaacccgcagcccacaccatctcggcgctgcacgtgggccgactgtgcagacgcgcggctgcgcctctctgcgtcttagcgctgtcgtggg

SEQ ID NO: 21343 - DNA, 559 bp, Arabidopsis thaliana landsberg
  unsure (1)..(559): unsure at all n locations
gatgtgcctttttttgtactagacataacacatatatactgatctttctccacattttcaaatagtattaatagctcttgctnaccaaatataccaaagtatccatggatatgcgactgaatcaaattctaaagagattcttgagaatgagtgatccaaatttgcataaataggtgggaaaaatccctcggacaatagggatctttgaaagagcccatatgtgtctcgccggatgacactggaaaagagtatggcttattgtttcctctatagaaccacatctgacacatcctgaatcacaatttatacctcttttctgcaaattctctgttacaggcacgcaacttgataatatttgccataaaaaatgccgtaacttaggcggacattacactttccacacatgtgctttcagagctttgatctctggacaaatgaaagatgaattaagatccttgttaactattcatgttgtatggtagcccgatataactgaatagtttttggattttgagaatgcccacctaggatatcctcccttgtgacgcacccaagtgca

SEQ ID NO: 21344 - DNA, 365 bp, Arabidopsis thaliana landsberg
tctgcaagtttctgtttttgttcatttatgcgacctttcttggtgttttgccccactttggcctttggaagtatttgtgccactgtcggcctgggatggccggaggcagcaacagctggtggggggagcgagcttggagatgcgccgtgggaggaagaccgactacctcgacatcccactcaaggatagcatcaagggatggcgcctagaatggttcatcgtggagaatcatgggaattccctccccccatgatcagggagacagcgggatgttcgcactctgagctggaccgaatccccacagaccaggaagtggctgaggcaggggctctgttagcagaagttggattgttgaaagaaagggg

SEQ ID NO: 21345 - DNA, 460 bp, Arabidopsis thaliana landsberg
  unsure (1)..(460): unsure at all n locations
taactataggccaacaatgatcactctcctcttcatggatctctccaaatgaatccctaaaggaatccttgaggatgttcccgttaaggttggtaattgcttaatcccttctgattttgtggttctggattatgataaggaatccaaggatcctcttatccttggaagagcattcctagctacatctggtgctaggattgatgtgaagagaggtaggatctctcttaacatttatgatttagagatggagtttggcattgatggttcaaagtttacagtgcctatcagtagtattgcaaccaacaaggctacatctcctcagactgcacagacctcaccactagagccaacaacaacgctcccttctgctcagtctgccaatgagagttgaagagtatcagtgtcgatcgacaccacccctcctnnnnnnnnnnnnnnnnnnnnnnnnnnnnnnnnngat

SEQ ID NO: 21346 - DNA, 879 bp, Arabidopsis thaliana landsberg
agatcgcccacagaggtatggtgtctttgcacattttccagtttgtaatttacatttattttgtttgctttattgtgtgtggtcctttggccattgtatttcttaattcccttttgatgcaatagaggagaatgtctccgtacttgtgcgaagcttgtttgccaataagacgtgtctttaaaaattcccttctttaagtaaaaagaaagtctaaaacctttgatttgtttagagaaaacttgttgtgtacgtttctttgagaatgtctacaacctattgctcttatattaaaacttttcatctaatcacattgcaaggtttggtgtagtgccgaacttatcatcttgccaaaagatataggtcattaacaaaaaaaattagactttattcaaacctaaatcaaggtttacgtaatgaaagggttaagaaatggcaaaggtcctccatccattaacattccagtcttaacagaaccaaggctaatactaactgtgacacgaatttggttatgagtgagaatcgctctaaaccagataaatattgcagaggatcccaaggagttaattttaaagaaagtagaagggattgttggaatcaaatagttgattaatagttaaattggcaagagagaagattgaagatcttgaagagaagaagaagaagaagatgtagcaggacatgagaagaagaagagtccagagaagagaagcatgtgtatgtttatttagttcgggtaattaggtttgagcctcttaacatgtacaacccatgaacaagataatgttgttgggctaagtagaactataggttaaaacttaagtagtataaatatataatgtatcttatcttaacatgtatggaaaaaggagattaagaaaa

SEQ ID NO: 21347 - DNA, 585 bp, Arabidopsis thaliana landsberg
aacatcaatagtactccaaactcatcacagaaacatatatacctgctgctactgcaagaaaccaccaaccacgatcgaattatcaaaaagtaacagtttgacaaagccgaatgtaaggcaacatcatatcgtccctaaacacgcgcgagtttgattcaaccaccccccaaatatgacctccttgacgtgcttccaacgcaatcactatgcacaaaatatgcttaaacgtcccaagacaggtgcagaaaatcaccaacttcccaccaaaattcgctatcttggaccaacattgactgacaataggcaaatgaaaacccatcacaggtctccaaaccgattcattcggataatataccactatcggatgtcccagagaacacgtaagatcaactgtatacaacaactctccaatcacagtaaacgacgacaacgggtgccaaaatctcgtcaactcacttgcaacaccccatgactgccataaaccttgtactggtttgtaagcaaaacaaccccaacgatccaaagcgaaaatcctccctgcatcaccacatatgtagaaaatctccattcgcactagcatcgtta

SEQ ID NO: 21348 - DNA, 1194 bp, Arabidopsis thaliana landsberg
aaattcgaatcgtgagcaaccctatctttcaatccctcggaatcatcactgtgatcgaaattatggctttcgtttagaggtttcgtaccttgcacagaacatttcggagtcaccgaagatctttttggagatgggcaagttgaatcgatgttggtacctcttgttagtgaatcgaattgggacgagaaagctgaatctgatttccactttaagtagtctcttggccttcgtctccgccattttggtgactctgattggtcagatcgaagaaaaagaatcggtcacatcggagggagacagagcgagcctgagactgtacggatccgatcaaatggaagagaaaattaatggagaaaaaaacagaataaaacgagtctatcgagagacaaggaaggaacagaggttcgagagacagatgcaacagaataggggacagacgggcgttgataaccaagacctcaaaagcaacatgtatttttgacttcaaagaaaatctcttcgcttggttattactatcatcgctggcgttgaccatgttgacttagttgagtgtcgtcgttgaggtatctccgtcgccaacgttggctcaagcttctctgaagatgtcgcaaatactgccatcggtttacttatcgacgttttccgtcgcatctctgctaccagtcggttagttatgcaacggttttggccactcaaaggagattatcccctcggttccaaggtttgcaacataacttgcgaaaaaatcaaattagcaacaaatattccattaattgtaaatgattccctctaatttgcagttgggaagaatgttggataattccaacttacttgaggggcaagttatctccttgtagaagatgctagaagagatacaagaaaggaaattcaagaaaggaaatcaagagaaaaagaaatacaaataatgtccagttggataagatttgtaagtattcctattcacaataggcaaaggaggtgtttggttctagtatatatatgatctctatgaagaagaagaagataacacaagagagcaaaagcatccaagaggatcaaagagagagctcaagatgtgagtcatcaagagagatctcatgagagtcgagagagacctcatgagataaacatgaaagtcgagagagaccttatgagagatatacttaggggttgcttagttctatatagagagac

SEQ ID NO: 21349 - DNA, 2486 bp, Arabidopsis thaliana landsberg
ggtttaatactgatcatgaactcatgaatacatgaaaggttctaatggcctgttttatttgaaaaggaggtaaacccatcgtcaattggggtactcggctaagaatagcggtggaggcagcactaggtttgtaccaagttacactgtagaacttgaatccattcgattggttttacaagaatcattttgcataggtttggagtacttacacattggatgcacaccaccaatggttcatagagatgtcaaaactacaaacatattgttggacgagcattataaggccaaacttgctgattttggactctcaaggtctttccccgttggaggggaaactcatgtttcgactgtgattgctggtactcctggataccttgatccagagtaagtattacatttttactctacgcacttgtgctgaaacttttctttcaatgcttgagatgttcttgccttccagatattaccaaacaagccggttgggtgagaaaagcgacgtgtacagtttcgggattggtttattggaaatgatctcacaccaagcagtgattgatcgaaaccgcagaaagtctcacataacacaatgggtagggtctgagcttaacggaggagatattgctaagatcatggatctaaagcttaacggtgattatgattctcgttctgcgtggagagctcttgagctagcaatgtcgtgcgcggatcctacctcagcaagacgaccaaccatgtctcatgttgttattgaactaaaagagtgtctcgtgtctgaaaactcgaggagaaatatgagtcgaggcatggatacactaagttcccctgaagtgagcatgatctttgatgctgagatgattcccagagcaagatagtttgtgctgcaagtgacacaattgtaatgaaaccaccactcaacgaatttacttgtggctttgacatgtcgtgtgctctgtttgtatttgtgaatgccggttggtaattatttttgttaatgtgattttaaaacctcttatgtaaatagttactttatctattgaagtgtgttcttgtggtctatagtttctcaaagggaaattaaaatgttgacatcccatttacaattgataacttggtatacacaaactttgtaaatttggtgatatttatggtcgaaagaaggcaatacccattgtatgttccaatatcaatatcaatacgataacttgataatactaacatatgattgtcattgtttttccagtatcaatatacattaagctactacaaaattagtataaatcactatgttataaatctttttcggttgtaacttgtaattcgtgggtttttaaaataaaagcatgtgaaaattttcaaataatgtgatggcgcaattttattttccgagttccaaaatattgccgcttcattaccctaatttgtggcgccacatgtaaaacaaaagacgattcttagtggctatcactgccatcacgcggatcactaatatgaaccgtcgattaaaacagatcgacggtttatacatcattttattgtacacacggatcgatatctcagccgttagatttattatgcgatctgattgctcgaaaaatagactctccgtctttgcctataaaaacaatttcacatctttctcacccaaatctactcttaaccgttcttcttcttctacagacatcaatttctctcgagataaactaaatcttcgctgaaaaaatgtcgggtcgtggaaagggaggaaaaggtttgggtaaaggaggagccaagcgtcacaggaaggttctgagagacaacatccaaggaatcaccaagccggcgattcggagattggctcgtagaggtggagtcaagcgtattagtggtctcatctacgaagagactcgtggcgttctcaagatctttctcgagaacgtgattcgtgatgctgtcacttacaccgagcacgctaggaggaagactgtgaccgccatggatgttgtctacgctctcaagaggcaaggaaggactctctacggattcggcggttaatcagggtttttcagatttgtgtttggagatctgtttctggaaattagatttgagaatttcaatgtaggtattttagtaaatgtagcaagatttgatttcctttttttgctatttcgcttttgtaatgtgttttcatttgctaaattctcaacaatggaaacacgcaatttggtgaaagttcgtttgattactcataatctcttatgactctgactctaattttttacctcgctttgaattgtgaatttgacagtagagcagacgtattaactcgacagccgtcaatctagttctttatcagcggcgatcttcggctgttaatcacctacgtggcgtgacgagatacgttgaaatcagcttgactgctggctctcgactataacatgtcttgggcttttcgattcgttattattgtgtagaacgaaatacttatttgcactaaaatgtccaaaatttta

SEQ ID NO: 21350 - DNA, 562 bp, Arabidopsis thaliana landsberg
  unsure (1)..(562): unsure at all n locations
attatcacgtaacctaatagataatcatctaattcataatatattattcctcaagaatttgatgataaaaatatctataactattttattatactgctaaataatttgatatatgcaataagggcatttttgtctaacttacataaatgaaagagagagaactaattatatagaaaacaatggtatattcttaatttttgattcttttgagtatagatagtgatattatccataattcaacactcatttagttcttacacattacaatggttttgtttgataaatttaacaatctaccctactattttaattcatattcttaatttttatattttgattttaaggattataaatgaataatagttataactttttttcatgttttagattccatcaatgagaaatatatttaaggttcgagagagcgagtgttgattcagtgagtcagtctttccaacattaggggaagaaaatcaattgctcgtaaataaatatattgaaagaaattattntaatcctagtactaaaaaaagtacactagaagttaagagataattcattt

SEQ ID NO: 21351 - DNA, 257 bp, Arabidopsis thaliana landsberg
tggatcatggggattaaggattagaggttggattatgtgcagaaccttccaagtcatttggcccacctacagttgtccttgtccaacggaccgcacacaaccctataggtgcacctgatcacttgacaagttcggtatctgaattccttacctttcccaagagcgtttcacccgtcacgcagacattacaatacaacggaggtacgaaaatgcggaagcagttacaataactttacttatttaaaagtaagagagag

SEQ ID NO: 21352 - DNA, 1526 bp, Arabidopsis thaliana landsberg
  unsure (1)..(1526): unsure at all n locations
cacgccttttcaaaacacacgttttcggaaatgtatatatgagaaactaacacctatacaatagggaaagaaaataagctgcaaaaaccgatttagccatattcgtataatatagctaataatattgtatgacaaaggagaatttaaattttagtgtcgtcctctttcacttgtatctccttttgattcatggagattccattccatagctaagcaagcgctttgtaattgggaggctttatcccctgctcacctgttttaagttttaatggaatttctaatggtttcgacaaaaagaaaatgtatatattgtatgacaaaggagactttaaattttaatgtgatcctcttttacttgtatttacgtcacaactgtacaagtgtcagtcgcaacatttataagtgtaaagtgatgctcactctttttttcttttcccagatcatcattactagtagacgagtacgtagcctatcccttccagctgtttaagaaaagaataaaaatctttcgaaatatagaatttgtaaaaacgataaacttatatttgtacgtctttcatttcactcaattaatgttgttgttgaagatatggtaaactttctagaatttcaaagttttattagagcatcaaaaacaatgagttcttaaaaaggtttaaaaatctcttaaaatattatataaaataaaatataaataaaaaatagaaaagggttcttaaaaatataaaattggtttttaactaagagatttttgatatactctctcttcttattaaaatcccttaatatttaattattattttgaacatcataaatgttaagaattttactaagaacccaccaataaggatgatcttagtagttggtaatgtgtaagtacatagattatacgatttggtttggagaaagaccgtatacaaccaacatagttaattaagctataattagagtataaatagaggttaaccattagttatataccccataaaacttttagtctgatatcataaactatatattcatttctttttactttttggtcaaattaatatacaactaattaagtatatcattcaaataaaagtaaaacaagattcgaaaaccaaggttattggaaggagatggttaaaagaaacatagatataccatgctattatctttataaattataacacctgaataaatagattaccagttatggttcctgtctagtaaaaggtaaaggtttcccgcagtggaaatagatgttgatccagtaatcagagattgatataagaaaggcgggtttgtatcttctaatcaaagagaaaaatcataatagaaaatcagagaaacatgagaattgagaagaatatcaaagtctttgaagtggtgtggctaaaaccaccgtttctaagtctaagggatatgccatggcatcagccagtggtactctgcagttcctctttccaggatgatgatctttgagaagaagaagatgnagaagaagaagaagaagtngtagaagaagaagaagaagaagaaga

SEQ ID NO: 21353 - DNA, 1641 bp, Arabidopsis thaliana landsberg
  unsure (1)..(1641): unsure at all n locations
gagtattgtttgttctgtaaaaaagatagatatcgtcctactcaaaagatcgggcaaaagagcattccatatcgccaaatgttttatttgccgatagccgatagattgaaaatattatatcaatctcataatactgcaaaacatatgagatggcatgcagaacacttagcgagtgatggagaaatggggcatccatcagatggagaagcatggaagcattttcacaaggtacaccctgattttgcttctaaactaagaaatgtttatttggggttatgcacagacggttttaatctatttggtatgtctagacataattattcattatggcctgtaatattgaaaccgtataatctgccacctgagatgtgtatgaaacaagaatttatgtttctaacgatactagttcctggtccaaatcatcctaagagaaatttagatatatttctccaaccattgatagaagagctgaaagatttgtgggttaacggtgttgaagcatatgatatttctactaagcagaattttctcttaaaagttgtgctcatgtggacaataagcgactttcctgcatatggtatgctttctggatggacaactcatggtcggttgacatgtccttattgttcggatcaaaccggtgcattttggttaaaaaatggtagaaaacatgttggtttgattgtcatcgatgttttctaccggttaatcatagctatcgagggaacaagaaagacttcaaaaaaggaaaggttgtggaagatagtccactggagatactaacaggcgaggagctttataatgaagtttgttgtttaccaaaaatagttgattgcgggagaaaccatgaacgattagaaggatacggtaaaacgcataactggcataagcaaaactttctttgggagctatcttattggaaagatctaaaacttcgacacaatcttgatgtgatgcacatcgaaaaaaacgttttggataatttcatcaagacgttactgaatgtgcagggaaaaacgaaagataacatcaaatcacgacttgatttgcaaaagcactgtaatcgcaaagatttgcacttaacacctgagggcaaggcaccaatcccaaagtttagactaaaacctgatgccaaagagatatttctacgatgtctcgaaaaaaatgttaaattttcagatggatattcatcaagtttagctaactgtgttgatctaccaggaagaaaattaagagggatgaaaagtcatgactgtcatgttttaatgcaaagactctttccaatagcttttgctgagcttatggataaatctgtacacgatgcgctatctagtaagtttcaacattcgattaatttattttaatctctctgcatttttttgttatttttttagtttttaattaagaccgttgatagcgatatttttatttatgtgaatctattaattttttaattggaagctgagcatgattgtaattttttgcatttaattttttaaaaaaaatcataattatatagctcgtagagataaaaaacatatagatatgagaacatttttaaattatcattaacttttttgttcatattgntttgagaacatttaccatttcttcatataacagttattttttatatgtgta

SEQ ID NO: 21354 - DNA, 560 bp, Arabidopsis thaliana landsberg
caggtcgactctagatgatccccagttaaaagctctgatgagtctcattggatgatcttttaatcaaattagtatcacactgatacaagttgagagtggtaagaaacattgagaaatgaaagattgaaactaaagcatggattctcttgttttgctctgtttttcgaacatttgggaaagataaaaggcgaagaaaccctagtgagcagcgtcttcttcttcgcagaacttggtgtattcctttggacccatcagagcttccaactccgcggggctgctcggtttcacctttatcatccaaccatcttcataagggcttgagttgatctacacaaatgaaaaatcgactaatcagattgatctgcgccacactacaaacagaggtatttttcaaaatgtaaaaacttaccaaaccaggtgactcggtgagctttgtgttacctcaatgacttcaccagagattggagatagaatctcacttgtggccttaacactctcaacagctccaaagcttttttctttgctcactgaactgtttgcttcaggcagctcacaaacac

SEQ ID NO: 21355 - DNA, 577 bp, Arabidopsis thaliana landsberg
tttatgataaactccgatgatgttgtaataaattaaatactccttaatgtatggttttatgctttattgtatttgctttgtgcctcaccttcgagtgagtacgtggtacttgatcctattagtggcctcgtcggactagatccgagggactgacgttttattactatttaagtgtggtctagccttcaaggtgggacttaggcacttaagttggaataattcggccggttccgccacactcctcaccggagacacacaacgtgaaagggaaatatgcccttgggccatttctataagtattttggtggttagatgtccaacacatattgagtgagttcttatgtgccaaatgagtgagaagtgtgaaatcaagaacaaggtatgtttctagacttagtaaattgtttttgaatactaacatggttatctaagtgctagaaacagtgccaagaaaagaagatttgaattggagaagagttggcaaagtacagccaacaccagctcgagcctggcacaccggactgtccggtgccccaggctggtcaacggtgaacggctgctctcgggaagcggtgga

SEQ ID NO: 21356 - DNA, 546 bp, Arabidopsis thaliana landsberg
  unsure (1)..(546): unsure at all n locations
aacatcaattaattttattctaaaataattttaaactataacaaatattataaaattataatacttacttttagacaatatatatatatatatatatctttgttttaccggttctgagctaaaatatcaattcagtattatataaagggaatgtgacacgtttaggcacttttaaagaattttatttcttttaaggcacttttcagggataaggcactttgccatctttttgaggagaaattagactaatttacccctgaagtagtgatgacgcaataattattaaacttatttttgatgagatcgtgtgggtaaaaaactatcccccttttatcatctctatcttccatattctattgtttttcatcattttcaatctctctttcaaaatcattgtcgttctctataattcttacaaaatcatgaaaattatgaggttatcctaaattcacaatcacaatctatgtttaccctaaatttttttttttttttttttttgtatatttttnnnnnnnnnnnnnnnnntttatggccaccaccatcatt

SEQ ID NO: 21357 - DNA, 1931 bp, Arabidopsis thaliana landsberg
gaaagagatcgtgagccaccgttccgtggttttcatgatgatcaatcatctatggagagaagcgagatttactgatccccaatggagaaatataaggcaacccaacaaagagggtgtgatatggccaaggagaagagaaggatgcgaagaggattagttgcaaagaagaagaagaaaccggagacaaaggcgagacgtgacggagagatgggatcatcatcaccggaaaggaaaaacattgagaggggaagatatgattcacaacagtaaaggcaattgacaaagaagaagatcaaagcatcctaggttagggcaaagcaaaacagaatcaaagaaggaagaagataacgggaaaagtgtagtttcaagttgtggtttacgagggagaatcccgtcatgacaaggagtatcagataatgagtaagatgtcgttgaaaagattaatttgtcaataatccatagcaactgacgaagtttaaatcgggtttatgactgagaagttatgagtgtttcttttgggccaagcaactacaaaaatattgcaaaactaagccctaaggagctgctccgagatgggttcttcacagcaacgtttggaggtcggaaactaatccgatcgggacgaaatttggatggttcactgaagagttattacggtgtcttaagggcagctgaaacaagtgttctacatcatcatgtggccaaggtgagggtgtgatctgcgggttcgattacaagtttctatttttatatttcaagattcattgcataggaatagatatgtttgcttagtaataatgaattgataattaggattgatgatatgatgattgttctagtattataggatgattgaattattgtacttgtgataacaagtaattatatgtgttatataagaaagtggaattaccatcttttgagatgatgaaaagtggaacagtggaaaatggtctacattaaattgatgggttctttgtagctcaataaaagactgacgagtccagtggaactagataggttcaaaggtcaggggagatgatcgaacctggtattgatgtagagagctttcttaagcaagaatgagatgtgtgttatagtcttgcatagtgatgcatactatatgagtgttgtgtctttttctatgtgattgctgattgtgttttaaaggtagaatcgcgtatcgtacttccactgggcggaaaagatcctctcactgagtaattctttactcaccccttttcctccaggtcacggtgagaatcgtgtgtagtcgcgcaagtccgtctcgcttatggtgtattttgggaacctcgagtttattttctttaattgttatcttcttatacgatttattaaagagttttcaatgatttaaggttatttttaagacgattttatatttgaattaagaaagtggaatagaggaaaaatataagcaaggtgaaagtacgccgtctcaacgttgagggagacgggcgtgacactgatggcaagatttcagtttcttgtactgtcagttgcgcctcgtctggtgaggttgtcgtccgcgcacgccaaaactctagtgtgggtgaagagaactttctgtgagcttcaacaacagtcaggcccgtaacgcttgttaattaaatccaacacatgtggatgtggcacaaccatctctctatcttggtccatgtttgtttctctatgtctattacctattccaattttattgatgtttcgacgttgtgatttgtacgaaaaggcattcgtcaaaattatgtgtcgacatccttactttggatctttgtttataattctcaaaccatggtcaaaactttaatccaaaactcttctgtctaagagtttaagagcatgaatccttggtatcgtatctatacattctagtcagcctcaatgtgacaatgggcatcaccttggcatgt

SEQ ID NO: 21358 - DNA, 592 bp, Arabidopsis thaliana landsberg
  unsure (1)..(592): unsure at all n locations
atatatatatgctttactatggaattcaggaagttgtgtgggctagcggagaattacatggtggtcacgatttgattagaactgtttagttcatggatttagtttgtatgatcaaggtaataaactatagagattgggagtttctatgttcttcaaacctctttcacatattcaaccttttgttttgtttgagggcaagcaaaagccaagtctgggggagttgatatgtcccggtttttactgatttctaacacactttcagaatggtttttagagtctttctagtcttttcgtacgttttgagtcattccaggtacactcacacatctgggaactatggagcacaataagggattatggaagcttttcagcaataaagatcttgannnnnnnnnnnnnnnnnnnnnnnnnnnnnnnnnnnnnnnnnnnnnnnnnnnnnnnnnnnnnnnnnnnnnnnnnnnnnnnnnnnnnnnnnnnnnnnnnnnnnnnnnnnnnnnnnnnnnnnnnnnnnnnnnnnnnnnnnnnnnnnnnnagccctgcacgtttttagagttgatacctaattgtttggtcattattagacgtagttttt

SEQ ID NO: 21359 - DNA, 486 bp, Arabidopsis thaliana landsberg
tgatgtgatggtatgatgggaatgactttgatgcacaaaacataaaaacagactctgcatccccttaggaacgactttggagtctctttaccttttacttaggtggtatttcagctctgcattcccttaggaacgactttgaagcttcttcaccttttacttaggtggtatttcagctctgcatttccttaggaatgactttggagcttcttcaccttttatttaggtggtattttagctctgcattcccttaggaatgactttggagctttgtcaccctttatgttacactcgatggtgtaaccccagattcattacaacaggtcgaaggttgaaccttcttatattgtcttcaggggtgaaatataaagacagaaattaaagaatacattaagtatgaaaattttctgatcgagcccctggattgcttcagtaaatgtgcctcgatttgggtacaatgttgttgactgtgtgagcttcagattc

SEQ ID NO: 21360 - DNA, 602 bp, Arabidopsis thaliana landsberg
ttttgggtaaatttgtaagtaacaacaagttgaggattaaaattgcgagcacgatagtcggtggttaattgcaaatagttgaggaataaaatgagcatttttcccgttagttaaatcttttaaaatatttttatgttaaaatcgctaaaaaaatttatataataaaataaaataaatataaaatacctgatactacaaaataaatgaataatattttgcaaagaaattaaataattgttaagaaaacaaatatttattgtgtagtggccatagtgggcaatcacctactatccactcttatggaatgtacccgaagggacgagtaataaatttcttattttttaattttggcagcaagtaataaataaattaattaaattgttaaaaataaataaaaagagacaaaatttgttggaggaagaaagtgggtcctaaggttttcttctatctgtcgctttgatttctgcgtttaataagagacaagtccccgtctacagtcttttagagacggaagctactgagacagagattcacaccactgctctttctttgtctcttcctctgatacttcctttctctctgcttgtctttgttccggttca

SEQ ID NO: 21361 - DNA, 479 bp, Arabidopsis thaliana landsberg
gtgggttacagaactatctattacttccataaagttgcgcacgtttgaaaaatgcaaaactcaaggcgggagaggaaggaaccatatgatgtttcgctgcaaactagtgatgaaataaaaggagaagctgtgcgattctttaaagagttgctgacacatcatccaagtgattttcagggcctgtcagatgccaacttaagaaacctgatgtcatttagatgttctgcaactgatcaggacatgttgacaagagaggtaacagctttgttaaattcaaaaagttttgtttgcgatgccatgtaacaaatccccgggtcctgacggatacacaagtgagttcttcaaagcgacttggtcaataaccggtaaagatttcattgctgcaatccaatccttttttgttaaaggcttccttcctaaagggctaaatgcaacaattctagcgctcataccgaaaaagatgaagctaccttgatgcg

SEQ ID NO: 21362 - DNA, 685 bp, Arabidopsis thaliana landsberg
tgaatctgtttcacactcttctatgttgaatccaaatacgtccccagcatccgaattttgatcatcatcactagacatagcatcatcaatttcaaccaaatatttcttcaccgtcgcaaccgcattctctaccaagtctgaaccactaaggaatcgatctccatcattacctatcatgcaattaccatcattaatcatagaagttcctgcagcattacttgaaacatgttgagcttctttctgataatcatcactctcttttctgataagcacactctttgggtgagccatctcatataatcttcccaacattaaacattgttgaattgtctgaggtccaaacatcctaacattcagttgagtatcagttctcaaacctgccaagtaaacactaaccaagtaatcttcagcgaagttcaatctagtgctaatcaactcaaatcgagcatgatactcctctattccttcagtctcctgcaactgtgtcagttttgcaattgagtcattaacatgctcatcatatctcacttgcaacaacagtttgtaactccaccaatcatgcctaacatgcttccaccacatcgattgtacaattgattggtgcaaagtcgcagcagtgtcatcgaaatggagtgaagcgaaaacaactttcaattcctccggagtacgatcaattaagaaaaat

SEQ ID NO: 21363 - DNA, 1925 bp, Arabidopsis thaliana landsberg
  unsure (1)..(1925): unsure at all n locations
gagacttgaggtctgcagctgaaaatatttgcactgacgaacaagctaggacagggtggatttggagaagtttacaaggtatagatatagtctttagttctctagctacctggttcattacagagttagggtaaactgatcatatcatcatccgtgtttagggcacgttagttaatggaacagaagttgcagtgaagaggctatcgaaaacatccgaacaaggtgcacaagagttcaagaacgaggttgttcttgtcgccaaacttcagcataggaatcttgttaagcttcttgggtattgtctggaaggagaagagaaaatacttgtttacgagtttgtccccaacaagagcctagactacttcctttttggtatgtggcattaccatatacatattaacctgagattctgagtagacttatatgattataaaatctaagtggctcatgactacttgtgtacgtgcagatcctacaaagcaagggctgttagactggacaaaacgatacaacattatcgggggaatcactagaggaattctatatcttcatcaagattcacgactcacaatcatacaccgtgatctcaaagccagcaacattctcctcgatgccgatatgatcccgaaaatcgctgattttggaatggcgaggatttctggaatagatcaaagtgtagctaacacaaaaaggatagctggaactttgtaaaatactaaccttatgaacagaagttttcaagaatattttcttggacattctaatttaatctttcttgtgtgttttatcttgtagcggttacatgcctccggaatatgtgattcacggccagttctcaatgaaatctgacgtctatagcttcggtgttttgattcttgagattatatgtggcaagaagaatagaagcttttaccaagcagatactaaagctgaaaatttggtcacatatgtgagtaccaaagaagaaacttagtgcatgatccaatctcactttgtttgttagttgttgattaatgattacattgttgtacaggtttggaggttgtggacaaacgggtcaccattagagctcgtggatctaaccatatcagagaattgtcaaacagaagaagtgataagatgcatccacatcgcactcctatgtgttcaagaagatcctaaagatggtcccaacttgtcaacaatcatgatgatgctcactaacagttccctcattttatctgttcctcaaccaccnnnnnnnnnnnnnnnnnnnnncaaagaacgtgatagctttgtgtcgagccaatttacaatgggatgtacttctcagactaaaaatgatgtaaccattacaaatctagatcctcgttgaagtagttgttccaattgacacattggaattgttactgaaaacaaggcagattccacatgtcaggtattatttcactttatgaaatgtgatgatccatagttatgtaagaattgtgagtcactcaaggtattttttcatacaaactctttatcatttctacattgtaacattggtttgtcgtattgaagatttctgatacgattatacgaatgacttcaaaattttataaacataccaattcatcatgaattcatgtatagtagtaacgcaaatgttgttatgcatgtaaaaaagctctgtaaattagacggattcggtttggctttaccggtagacgaatttctacgaatatttacccaaaccggtttatttactaaacctataccatatgaaccggaaaccaaacgctattaccgatattttcttcttcactctcttcgtcggaatcagcctttgcgcattcttctgagctcggatttagggtttagcattctggttctaaaagcgattactgatattgattatcggatttgtttgtgctcttttgttagattttgatgtgtttaatggc

SEQ ID NO: 21364 - DNA, 364 bp, Arabidopsis thaliana landsberg
ccgtcccattacgcaggccaccaacatttgatggtgaagattatgctaggtggagtgatttaatgagatttcatctaacctcactccacaaaagtatatgggatgttgttgagtttggtgcacaggtaccatccgaaggggatgaaaactatgatgaggatgaagtagcccaaatcgagcacttcaactcccaagccacaaccatactcctcgcctctctaagtagagaagaatataacaaggtgcaagggttgaagaatgcgaaggagatttgggatctactcaagaccgtgcatgagggtgatgaactcaccaagatcacaaagcgggaaacgatcgagggggagctcggtcgcttccgtct

SEQ ID NO: 21365 - DNA, 552 bp, Arabidopsis thaliana landsberg
  unsure (1)..(552): unsure at all n locations
tttattagttaaattgcctcaagtagcacacaatcgagctgtggggacacaattagcacttaaatgtttttgggacacaaatagcattccttctttacttttcatttataaataatttaaacaataatagaatagataaaaacaaaacagaaaatagagacacccaacggagacgatttatttgtcttccgttaagccaagattaaatcgtcccaaatttaaaaattcgtgatttttctgacatttttcccattttgttatagatttgatcaacattgtgagtatagcaatagatttggtcacgtttgtgattgtagttctcgatttggttggatatgggtagaattctcaatttgattagctttagatttgaactcttttagtgattagttctcgattagtggctcttgtatttgaactctnttagttatttgcttatttaattttgttgcatatagtcatcaatcacacctttattaacatatatcactagtagatagagactaacattacaatccataattntctttgtctaataactggatataactg

SEQ ID NO: 21366 - DNA, 477 bp, Arabidopsis thaliana landsberg
  unsure (1)..(477): unsure at all n locations
caaggcacagctgccttcggtcgacgaccaaattgccattcactacgccatcagtggccttcgggctagcgtcctttacagtcactgcatcagggacccacctaagaacctccaagagctctatcagctgtttgaaaagtatgccagatccgaagagctccaccagcgcaaggtcgagtcccagaggaaacccaaggaccctccacagtccaaccgaacatggacaagaccttcgcagtccgactccggtcgggacagccgcagccagcagcaggtgcatatcattgccaaccagcacctcgccggcgaggcccctcgacgtcaagattatcccccccagggccgcggcaatgtcactcgtggtcggngtcgaggacgggcgtagcagccacgcatattttactgcctatttcacgtngaatactgcgcacacncaacgaggggactgcccgagacgaagccaccagggacaggatg

SEQ ID NO: 21367 - DNA, 378 bp, Arabidopsis thaliana landsberg
  unsure (1)..(378): unsure at all n locations
ccctntcctatgaagtgccctactgcattctatgtttcagncggagtttgattcgcattcaagaaggtatgtcttggtctgggactttcatattaattctgaacacaatgcttattcatggcttttgtttgtaactcttgaaaaaaactgaaagagttcaagaatctgaaggttcttagtgaaggcttgttatggatggtttcgtcatgaatcccgaatggacagaaacttaaggttctgactttttccctacttagaactttccaacctctgatttccctgcttatactgcacctcagcgtctaagttatttccattaccacaaatagttctgntatgtccatttgactagatatgtgcaacaaccaaaaatgattc

SEQ ID NO: 21368 - DNA, 1060 bp, Arabidopsis thaliana landsberg
  unsure (1)..(1060): unsure at all n locations
gccgaagtaatgtgttcttataagtttagttcaccatcgactttttggaagcgagatcacaaaatgtatcctccaacgttcgggtgttgggctttaggtatcgtaagattacgaatgagtttaaatcatagtgtaaatgactgtctttgcgaaatatgataatgagtatcaaaattttcttttattcttatctccaaattgttaagtacaaaaggaggtaaagcaaccgacgatctggcgtttggtcattgagcagggacctgctcgataccgaagggaggttgaactgtcaggtgagcagctgatctttgttgatgggggatgcgatgtctgtttcccttattgaagtttcgtctttcagatggaagggttgaggtggtaattgcgtttgcggaggtgactgcctgcatacctggttaagggattaagcccttttgtgatttgattgaagtggtggcagcgctcttggggggagctgcctacgtatcctgccaagggatcaagccttatcgtagttcgattgtttttgagtacctattcgtggtatttcttgagatgcatgnggattccaagaccgtaactcagagactccgttgataacttttacgagcttatagacgccgtcacgtaccacctcggtgattcgatagggaccttcccagttagttcccagttttccagggtttagctctctcgtgttgctgaacacttttcgtaaaacgagctctcccacttcgaactccgaattttgatattggagttatagtagcgggcggcagcttgttgataattttgaactcggatcattgcctgatctctgcgttcattgatgaaatccatgttgtcctgtaacatttgcgtgttcaggtccgagttagcaggactggcggtccttctcacgcttggtactatggtttcgacagggattactgcttctaaaccataggcgagagagaacggtgtttcttgcgttgatttgcgaggtgtagttcgatagccccggagaactccgtggagtatgtcggaccacattgatattttggcattaagtattttcttg

SEQ ID NO: 21369 - DNA, 4297 bp, Arabidopsis thaliana landsberg
aacaaaagtcaaggaaagaagagcagatagaattttacagtcggttttcaacgagtggtcttttctatcaaattatgaggaacatcgacttggaagattatggttggtgtggaaaaataatgttagggtaacgcctttatataagacctcacagatgattacttgttcaacctacattgaagggagaagagaagaattctttgtatcttttatttatgcatcaaactttgttgcagatagaagaatactttgggaagacattaaatatcatcatgattcacctctgtttcaaggtaaagcatggctaatctgtggggattttaatgaagtgttggatggagaagatcattctttgtatgaatcagctccctccatctcgccgggtatgagagattttcaaaatttggtccattcctgtgaattaacagacctgagctaccaaggtccaagattcacgtggagtaataagaggcaggatggagtaatctgcaaaaaacttgatagagtgttggtgagtaggcaatggctacaacaatatgaccaatcatactctgtattcgaaccagggggctgttcggatcatctaaaatgcaggttctatataaaggaacaagagaaaaaagtcaagaggccattcaaattcacgaatgctttaactagcatggcagattataaagaaacgatcgaggagatatgggcacagacgcctcagctacaccactcaacagcagcaatgtttatgttatcaaagaagttaaagagtatgaagcttcagcttaggcatatggggaaaaaactacttggagacatatcgataaaaacaaaagaggcgtacaagaagctctgcgaattacaaactgcaacaatgatggctccaaaactcaatctgtgtatgcagaggcagtggcatatgcgagatggcagaggatgtccgaaatcgaagaaaaatatcttcgacagaaagcaaagcttcactggatggcagcaggggaccagaacaataaaatgttctataatgcagcaaaaagcagggaggttagaaacaatattaaggagtttcagtgtgaaaatggagctactgcatcaaaccaagaacagatcaaggctgaagcggagaggtattttaaggatttcctcactgtcaaacctccggattatgttgaatggtcaagagaggagttggcagagctactggaattcaaatgtgctaaggaggatacgataatgcttacgcatgaggtatcggaagatgagataaaaaagtgcttttcacaatgcctaccaacaaatctccaggcccgaatgggtttacttgtgagttcttcaaagaaacttggtcaatcgttggacgtgatttcgtggtagctatccagtctttctttaagacaggatttttaccgaaaggagttaactcaactatcttagccttgataccgaagaaaaaaaaagccatttatatgaaggattacagaccaatctcctgctgcaatgttctttacaaggttatatcgaagattctggcaaataggctcaagatcattttgccaaaattcattacaccaaatcaatcagcattcatcaaggatagattgctaatggaaaatttactccttgccacagaaggaatcaaagactaccacaaagaatcgatctcccctcggtgcgcaatgaaaatagatatctcaaaggcttttgactcagttcaatgggggtttcttcttaacacgctgcgagctctagacattcctgaacaatacattaaatggatccaaacctgtgtaacaacggcttctttctcagttcaagttaatggagaactagcgggatattttggaagtgaaagaggattaagacaaggctgctctttaagtccatatctgtttgtcatatgtatgaatgttctatcccgcaagatcgacaaggcagcaactgacaagcagataggcttccacccgaaatgtaagctattgaagctaacacatctatgttttgcagatgatttgatggtgtttgttgaaggaaacaagaaatctatccaaggtacacttgcggtcttcgatgattttgctatacattcgggattaaagattagtctagagaagtctacattatatatggctggtattccggaaattcaaagggaagagatactccaacaatttccttttgaacatggaacattaccggttagatatttgggacttccgctactaacaaggaggatgacatcgtcagattatctacctctcatcgaaaaaatcaaatcacagattagttcttggacagttaaagcactctcatttgcggggagactccaattaatacgctcggtgatcttcagtcttacaaatttttggatagctgctttccggctgcccaaagcatgcattcaagaaattgataaactgtgttcaagctttttgtggtcaagaccatctatgaaccctcgaaaggtaaaagtggcatggactgaggtctgcacaccaaagaatgaaggtggactagggctgcggtcgattgaagaagcaaacaaagtaagtgtattaaagttggtatggcgtatacagttttaatctatgggttttttcctatcaagatttaaattaaaaacagtatacactttgatgtaaacatgtttatttctctataatataatttaacattaaattcaaaaaaaagaaaatcctaataataataatcatgtttgctcaaataaaaatattgacaatttttttttttttaaaaacccacttaagaattccaccaatggaccataaaattttcaaaaactctaaaaaaaactctaaactacaaaactatcaaaatttattaataaaaaatacttagaaactaatcactggatttgctctaagtttcttttatcaagtcttttatgaggttctttgcaaaccctattgtgaaagacataagctattcatcttctgttcttgacagattcactccagttattaatacagtgaagagatcttttctaactcttatctcctttgcagtgtttatgctttcatactcaattatgttgattgtttcattcaatatatctgagtaatctgcttgttaggaatagggtttctcattagggattcatatggtttagtagattgccccctttgttaggttatctatagaattcttcatctttaattatgcttaatgctagatttagagtaattaactagatcttgaatccagacaatagatatgcccgccataggtatctgtagttggatctattatttgatgagtctggtttataggtgtgtaataagaatctgcctatctactaagatgaacaattgaactcgttaagaatgcatatttaggttgatagtttctcggcttttccggttattattagctatagatatagggagtttcgcgggacgcccaccggttattccataattagagttcgagtttaagaatgattcgataacaacctagctttcattagatctactaaccaatagtttcctaagaataccctgttcctagctctttattaaatcgtttacaacacaatcaatctgctgtctttttactttgttctcttttattttcactcataccctgctagcttaatctcgacatttaactcactgtttgaacaaaagaaccccgtgaattcgatcctaaagtactataattgatctcttatttgagagagtagttctaggtaatttgaacgatatcaaatttggcgccgttgccgaagttcttgggaatcatcattgagttttgtttagagatttcgtctagtttttacttctattttgttactcacgcgtttcttgttttcttcttttctgtgtttcacgtgtatgcctaggcaaacaaggagcacaaaacagaaagagcttatcaacttgtctgttctggactggggaaaacttgaacacaccaaccgaaaaactcataaattagcaatggctgacagagtcatcagagctgatgcagaaggagttttgagagatgaggatgggcaagcctatgaggctggtcagagattggatgatcatggactcatcctacctgaggacgccaatgaggatcaggcgcacctcaatgcgcagttagctgctagagacgcagcagggctcagtgtcgagcgacaccaactaggtgtcgatcgacaccatcgggagcagcacgccgatgcaatcggtgacaccaataccaaattcttgcagctattccttcaactgcggaaccacgtcgtactcttgggggtttcaacaggcctgacctgttctatgctaatcgatcagcgattgta

SEQ ID NO: 21370 - DNA, 953 bp, Arabidopsis thaliana landsberg
tctgattgtgagaaacaatccggaacctctgagcctgagcggatggtgatgccattggtgccttcctcttcttctctgcccggtgagcaacaatgcaatcctcctgagagatggccatgttgaccaactcattgaagctattggcccggacagtgttgagtcgttctcgcagcttggtattgagacccctgcggaaggatccctcttcttttcatcagaatcagcatgataccctgcatactggcataagtcgttgaaggcttgcgcatactgtagtaccgtgcgggttccttgattgagggccaggaattcattcaacttccgatcaagaatgccagctggaatgtggtgtcctctgaaggcggtcttgaattcctcccaagatacttcatgatcagcggggagcatagcacggaagtggtcccaccaagtccgagctgggccgcgaacgtgctgtgcggcgaagagccttggcctcatcagggcagtctcctgtgaggaggggaaacttggactcgacgacgcgaagccatacgtcggcgtccaacggatcctctgccttggtgaacaagggcggctgcgtgctcagaaactcctggtatgttgccatagccggaggtcgctgatgctggcctccaccatgatgctgttggtggggctggcgctgcaagagctgtcgcagaatctcattctgctgggccatcaactcctgcactgtgggagctgggggaggtggcgggggagcttgctcgttctgcccgcgacgctgcctagctgccatctgaaaacagagattgtcgccattgttatcccaactcacgttttcgaacgacaagatatcatttcatatggaaggaaaaatgccataatcataatattgggttcgaaatgaagataacacggtggcaaagatcccacagatatcaaaagtttacggggttacatcaatcagg

SEQ ID NO: 21371 - DNA, 864 bp, Arabidopsis thaliana landsberg
cagttggcaaaattgtccaccatggacagggagataaacactgccaagtccgaggttgtagtcgagctagaagcattacaggtgatggtgaaagaactgaaggaagaagtaatgaggagcgaaagggaaagccagaaatggcaattgatgatcaaactttgctgcttttgtcttggccttattatcattgtcactgtacttggtatcctaatgttccgaaaaaccaacgaacaaaagcttcttcttggctattagtttgtttgatgtttggatgatgtgtttgatgttggattccattatgtgtttgatgtttatcttgcttctagggttaattcgttttatttttagaattggcttgtaatgaaatggtactgtgtgttcggccaagtaaatcgaatgttatggctgagttaatataattttattgctgagttaagctaatattaaagctgagttaatccaacgctatgattgaattatattggtaatgttgtatctgagttaatccaacgctatgactgagttattataatattgtgtctgagttaatctattgatatgactgagttattataatgttgtgtctaagttaatcaattgatatggctgagttatgtttgagttacgcctgtatcatgataacatttaataagtgacggcaagcgataacaactgattactgagaaggcgaccgtagataataggagatataaaaccattacaaaaaaaaggagtaaaaaacattacgactgagttcataggaatgagataaacggaagacaagtaagagatacaaaagcattcaaaacgtgaaaccgacatcatctggaccaaattcagtaaacatgtccaccaaatcattcc

SEQ ID NO: 21372 - DNA, 1735 bp, Arabidopsis thaliana landsberg
tcctatgtgtatatgcagatgtaattgtggacattactccacaactcatcacactcaatcaaagatccaaatcaaacaagtatcataagaacaaacattgaagcacatagatacatacaaaaataattttgttttttttgttcctaagaataggtctcctactcctaaaagtcactttagatataggacttcaaagtgtgaaatccacatttgtctttagaatgaaaaggttagaataatcagagtgaagcggaaatagatgagaaaagattaagaaaagtttagaaaagaatcagagtagcaaaggtaagtagagaatggttgtccagttctatctaggtttcgtcctatagtcaacattcctctgataccacttctgtcacacccgggtttcggggcaccaagactcgggcgcgaacataatcaccaggtgtgctgggaccaagtctcacacatatgatgaatcatgacacatgatcgaatgtcacatatttactaaataataggagttctttacaaaataaataattacattataaggagacaacggtccagcaacccaaagttgactgggagacgacgacctagacctctcacgaacacatcgcagcatcctccaagcgcctcatcctgcggtacctgttcttgacctgtggggggtgtgtgagacagcaagagtgagctcacatacgctcatcgctcaacaagttgtggggaataatgtgcatgaactcgccaaaggtgggagctcacgtgaagtgtaaggcttaccaaagaggatggttagagctgagcattgcttttaaagttggtcaaaattttattagcaattactaagtataagtaaataccaacccaattaagtagtagaacaaaagtaacaacctcacctgcgatgcaatgcatatgacaaattgaatttaagttccataaattaatcatgtgagggtcccagccgctcataaccgtgagcacgactagtatatcagtttcataacactctacagaggttacacatctttgcccacaagccatgttactcatctgtcaaggggtcatgaatcccatacacctctaccgaggaggcgaggcagggtaacactacgaggcctttacaaagtttccccggggctgtagccaccgttaggtttcctaaatgcaccgcactcctccccaaggggcgaacccaaacttggcagagcgagccgcatacaccgagccccattgacggcacgacggctaagtgaactacatcccggatcctctaattattcagctaagggcaccccattccaccctcatggttgcactgttttcccgggcggtcatccatagaacatggtccttacggagaggcactcgagaaaccgctcgagtccccttgaaaaccacaagtataatcataaagaagaacgggaaaacagcgtatcatagataatcacatcatgttcattgattagagttgagcaatagcatcagactaagtagtaataatccgacccaaataggtacacaaggacatggataacaaaagctagtcaatccttaggtataaatgtgtaatgcgggaggtgaattaaagaatgaataggacagagataggtcaaaggacacttgcctccaccaaccgactgctgctcaggggcttctcctgcgaattcctcgggctcttcgaccggatcgttctctatgcgagcgcaaacatacatacatccatccacatatttaatacaaa

SEQ ID NO: 21373 - DNA, 860 bp, Arabidopsis thaliana landsberg
ctaaaaatgcagaacaaagaagttgatgtcacaaagaagaaagaataagtgaacgagcgaccgagtgaaggatctcgtgtagcagtataagccgcgatctcgtttctctggtttttggtggcaaatcatcagtcgtggttctcccacttctttgataatcacagcggcgagagtaaaaattttgggcttctctaatcaaagttgtgttctcttatatagcacttttctcaattttcaattgatttttatttcctgagagtaaacgatttctcatttattctatattggtggtttcagattttagcttgagagagagaaagagagataaaaaaaacttgatcagtggatgcttttgcttcttgtggagtgtttgaagatttttcattgatggagcagctttgtatcaggttctttccacactgatttattcatattgagttttttttttattgggtgtgaatgttatggtgaattgagtttaaacttgtttgagtagatattcgcttgttatgatgcatccgattccccaaacacttgcttttgtgttgatcttatattctctttaattcaattttgcagatgattccttgcattgcattaaattacatcacaaacggacgtactgtgcatccatgaattcaacttaattcaaatgattggtgaccatagatgacagaacaaacaaatatggtcagctgagcgtctacttattgatgtcatccaagggaatctatccatttagacgcaaacatggatattgtggtcattctatacactatataagtatatatgtttcttgttatatcttggattagtagacaatttttgctataatatgggagtttccatacataagtgaa

SEQ ID NO: 21374 - DNA, 1322 bp, Arabidopsis thaliana landsberg
  unsure (1)..(1322): unsure at all n locations
cgccccggtaaacaagtaatgatggcgccccgcatgctccatgacgactgcggctctcagcccccttacggaagcaaggagacgtcagcaaggactcgacagccccaacagctatccttccgccaggctccaacgctcctccgacggccacgacaccacacgaaccgggtgccaaaacctctccggctgccacaatggcatgtacttagggcactagctcccctctgctagacacgttagcacactgctacaccccccccattgtacacctggatcctctccttacgcctataaaaggaaggtccagggccctcttacagagggttggccgcgcggggaaggacgggacggcgctcgcgtgagccgctcgctccctcccgcgtggacgcttgtaaccccctactgcaagcgcacccgacctgtgcgcgggataagcacgaaggtcgcgggtttccccttttttgcctgtctcccttcttccccacttgtgctccgtctcgcgccgacccatctgggctaggacatgcggtacaatttactcgtcggtccagggaacccccggggtctaaacgccgacagttggcgcgccaggtaggggcctgctgcgtgttgacgaacagcttcccgtcaagctccagatgggcagtctccaacaacctctccaacccgggacggttctccgtttcgggagtcttgagttcatgtccctcgacggcggctacgacatgatactccttccaccgccgcgcgacgacgacaatggcggccgacaacccgcccgccggcgcggaatcgacgacgtcttccccgcgtggtggaagaacgaccttcgagctcatcctgccctttcccctgccgatggaggggaaggcagggcgaccaaggccaagcaggaggcagcgcctcgttggctgttgagcgagccgacagcaccggcaccccaacgaggggcgcaccgggtatcaacttcgcgcctgagtcgaagagangcgccgtctccccgcgacacgcccatcccgagcaagcggacgacgccagcgcgctcgcgaaaggcttgctggatgtcgccctcgtacctgagacgacggtgcagtcagtccccgacgtgacttcatcaacgcccgtcgaccaagaggtacggaccgattcccatcccacgcctttcggattcagcctcgacccgcctagcggctccgctttggcggacgctctcgcagaggcgaatccgaaccctctggggtttcgtatgcggtcaccttgggaccggctgacggacgtctcgacctacgggccctctaggtccgaggaagacgacgagccca

SEQ ID NO: 21375 - DNA, 989 bp, Arabidopsis thaliana landsberg
cggtctacttcatcagtaaggtactgtccaagaccaagatccgctacccccaaattcagaagctgctgtacgcagtgattctgacgcggcggaagttgcgacactacttcgagtctcatccggtgactgtggtgtcatccttccccctgggcggagatcatccagtgccgagagtcctcgggtaggattgcaaagtgggtggtggaaatcatgggcgagacaatctcgttcgcccctcggaaggccatcaagtcccaagtcttggtggactttgtggctgaatgggtcgacacccagcttccagcagctccgatccaaccggaactctggaccatgtttttcgacgggtcgctgatgaaaacaggggcaggcgcgggcctgctcttcatctcgcccctcgggaagcacctccgctacgtgctgcgcctccatttcccggcgtccaacaacgtggctgagtatgaggctctggtcaacgggttgcgcatcgtcatcgagctaggggtctgatgcctcgacgctcgcggtgactcgcagcttgtcatcgaccaagtcatgaagaactcccactgccgcgacccgtatatggaggcctactgcgatgaggttcggcgcctggaagacaagttctacgggctcgagctcaaccacatcgcccgacgatacaacgagactgcgaacgagctggctaagatagcctcggggcgaacgacggttcccccggacgtcttctcccgggatctgcatcaaccctccgtcaagatcgacgacacgcccgagcctgaggcaccctcggcccagcccgaggcaccctcggccccgcccgaggtaccctcggctcagtccgaggcaacctcggctcggtccgaggcatcctcggttcagcccgaggtaccctcggcccccgagggcgagacgctgcacgttggggggcgaagtggggtcacgcctgatcaaagctggcagacctcgtacctgcaatatctcca

SEQ ID NO: 21376 - DNA, 1432 bp, Arabidopsis thaliana landsberg
tcatgaatagcatcaacattaatatctctacatctagtgcaaatagtaacatgctcagcggtagatgtagagggtttgcaagtatttaattcaacaatcttagcatgtaaaatagcattctcatctctaagattggaaataaaaacattgcagacatttaaatctttagccttagcaattaatttttcattctcaattttaaggctagagagagatgcattcaatttgtcaatcttagcaattaaattagcattatcatttctaagattaacaattgaatcatcattaatatttaatttctcaaccttaacaatcaatttatcattttcaaatttaaggttggaaatagtgtcatggcaagtgcttagctcactagttaatttttcacatttttctatctcctgagcataagcatttttaactttaacatgcttcttattttctttaataaggaagtcctcttggctatccaagagttcatccttctcatgaatagcactaattaattcatttaatttttccttttgttgcatgtttaggttggcaaaaagaatgcgtaagttatcctcctcattgctagcattatcctcatcactagaggtttcatatttagtggaggatcttgattttaccttcttccttttgccgtcctttgccatgaggcacttgtggccgacgttggggaagagaagacctttggtgacggcgatgtttgcggcgtcctcgtcggaggaggagtcggtggagctctcgtcggagtcccacttccggcaaacatgggcatcgtcgcccttcttcttgtagtacctcttcttctcccttcttctccccttcttgtcgtcgcccctgtcactatcactagataatggacattttgcaataaaatgaccgggcttaccacatttgtagcatactttcttggagcagggtttataatccttccccctcctttgtttgaggatttgacggaagctcttgatgatgagcgccatttcctcgttgtcgagcttggaggcgtcgatggggagcctacttgatgtagactcttctttcttttcttccgttgctttgaatgcgacgggttgcacctcggttgtggaggagccgccttgctcgacgatttgtttggagcctttgatcatcaactcaaagctcacaaactttcctgtcacttcctcgggagacattagcttatatctaggatcaccacgtattaattgaacttgagtacgattacgaaatacgagtgatctaagaataaccttgatcatttcatggtcatcccatttggtgctcctgaggttgcgcacttggttgaccaaggtcttgagccggttgtacatggcttgtggctcctctccttggttgaggatgaatcgatcgagctccccctcgatcgtctcccgcttggtgatgggatgagtcgacctgc

SEQ ID NO: 21377 - DNA, 563 bp, Arabidopsis thaliana landsberg
gacaaaagcataacgaatttagactatcggggaatgttgttcttcctcactctcacttgcttatgaagagtttggctctggcatctcctttgttgatctggaactgatctgttagtccgaagtgagccattagaagccacacgaagtttatgagctctccgcctctgctgagttgctccacgtgagccgtagagtcgcaatgacaggctgcataacagagaagttccacccacactttactcagtatctcccatttatctttgttgtgtgtcttctccatctctgcaaggtctttggctagcctgctcgcgtcaaacaatacagacttgcttcgatctcccttcactcccattggttcaatttcactttcgacgtccagaatatttagggtggctgtctccacgcttctatcgttctcgatatgcctcctctggaagaacttgtgagtttcagccaatgtgtctctgaatctgatcttcccaattccagcaacctcggacatcagaccgggttgcaagatcaggagatacatcatgtagtctgagatgattttgctgaactcg

SEQ ID NO: 21378 - DNA, 385 bp, Arabidopsis thaliana landsberg
  unsure (1)..(385): unsure at all n locations
gaagaccgggtcctcctggagtgtctaaacagcccaccaacccctttgctaaagaagaacacttgattcatgattctgttgctgaagaactcctggagctctaggttagatataaaggtcaagaggatacaattggaaagttaactcataagatggaagagttaaacagcaccattctggaacttcaagacatggtcaaggactaccccaactttgaaattgaggattggtcgtaggagcctggttcagaagaagaagactactctgctgatcagaaaaaagcttatgttgacgaaaaatcaaatgnnnnnnnnnnnnnnnnnnnnnnnnnnnnngatgcagagtatgattcaagcagtgaaagttcagcaactgaagatgagga

SEQ ID NO: 21379 - DNA, 1384 bp, Arabidopsis thaliana landsberg
cttatagtttccttctaaatcttttttatatacgtgagtttccttttgcaatcattcaaaattaacattttttttttggtcgacatccaaatttgattaattttacttttctcaactattaatttggtaatatatcttttcattctaaagtcgtcgttcattcattttataaaacttatattaaacatgacgagttcatattcaacctcataagaccaataaaatgttgttatttgttaaataaaatgttgataggaatgttatagaataattctggcaactactttgttatttctattacatatatagtttatttgtattgactattgactttacaccaatgttttttttatttgtattgtaaatgaataagtttaccaatgttatatttaacgaataggtttaccagtattgtcatttatctagtatctaattaaagattagaaaagtcaatacaaattaactatataagtaatagtaataacaaccacactgcagccaccagcaaattccattaacaaaataaagatctcgaaaatttgaacaccaatttacgattttttaacgtcaacatgaatgatatattcataaaaatgtgttgagaacaaatttggtcaagtcaagctttagatccgtaagaataattgattcatggcttcttccgcataaacacataaatcaaattgtatatgtgaatttcggcattgacaattttggtaacatatgacgtggatgctgagaaagtaattcttattggttattaacacaggacgcggatcgtaaagatacaaacatttctaaccgttgataagccaaacagatctaacggacaaaacacaatcacttcctctctacctttgagtataaaaaagcctcacaacatcactcactttcccatcgatcgcattctcaccgaatcaaatccaaaagagcaaatttacaatcttgcgaactcctaaaatggctcgtaccaagcaaacagctcgtaaatctaccggaggaaaggcaccaaggaagcaactcgcgaccaaagctgcgaggaaatcagctccagccaccggaggagtgaagaagccacacagattccgtccaggaacggtggcgttgagagaaatcaggaagtatcagaagagtactgagcttttgatccgtaagcttccgttccagagattggttcgtgagattgcccaagatttcaagacggatctgaggttccagagcagtgccgtcgcagctcttcaggaagcagctgaggcttatcttgttgggctctttgaagatactaatctctgtgcgattcatgctaagagggttacgattatgcctaaggatatccagcttgcgaggagaatcagaggagagagggcttaagtgaacgaagatg

SEQ ID NO: 21380 - DNA, 1375 bp, Arabidopsis thaliana landsberg
cccgacccaggggctcggactcgaccccggccatggaagacagactcgacctcgacctcggaggagcctccacatcgcccaacctagggcacaggccagccacgtcaacaggaggcgccatcattaccctaccccgagctgactcgagcaacgggggacaagaccggcctcccatctggctcgatccgctagataggcgatgatggcgcctcgcacgctccctgacgacggcagctctccacccccttacggaagcacgaggacgtcagcaaggactcgacatcttcgacagctgtacttccgccaggctccagcgctcctccgacagccacgacatcacacgaaccgggtgccaaaacctctccggctgccacgacggcgtgtacttagggcgctagtctcctccgctagacacgtagcactccgctacaccccccattgtacacctggatcccctccttacgcctataaaaggaaggaccagggccctcttagagaaggttggccgcgcggggacgaggacgagataggcgctcgcttggggccgctcgctccctctcccgcgtggacgcttgtaaccccctactgcaagcgcacccgacctgggcgcgggacaaacacgaaggccgcgggattcccacctctctcacgccggtctccggccgcctcgctctccccccttcacgctcgccctcgcgctcgacccatctgggctggggcacgcggcgacattcactcgtcggcccagggaccccccggtctcgaaacgccgacagttggcgcgccaggtaggggactgctgcgtgttgacgaacagcttcccgccaagctccagatgggcagtctccagcaacctctccaacccgggacggtgctccgttttgggagtcttgagttcatgtccctcgacggcagctacgacatgatactccttcctcctccgcgcgacaacaacaatggcggtcgtcagcctgcccggcggcagcggaatcgacgacgtctttcccccatggtggaagagcagcatccgggtctgtcccgtcaccttccccaccgcaggaggagcaggcagggcaaccatggccaagcaggaggcggcacctcattggctgtcgagcgagtcgacgacgccggcgcccagcgggggacacgtcaggcgttgacctcgcgcctgagacgaagacaagcgtcgtttccccgcaacacgccaaccccaagcggacagatgacgccagcatgctcgcgaaggacttgctgggcgttagcctcgtacctgagataacggtgcagtccgtccccgacacgcttcgtcaccatccatcgatcaagaggtaccgtccattttccaccctgtgccttttagattcagcttcga

SEQ ID NO: 21381 - DNA, 1776 bp, Arabidopsis thaliana landsberg
gcagccatttattaacttgatttagacttaaaatcaaaaggaaaaaaacaaagaaattctaatgatttggcgttaagttgtctctcgctgcaaaccatatgcggaggccatcggcatatttgtgcaagccttgctttgtgactgtgcttaaacggtttcgagtttgccgatcaatgaatttgatgatatgatctgatggtataggcaaatctccatgcctacgcttgtttctttctctccataatgtgtgtatcgttgcttgaaatacatagcgcaagaggaaacgctttgtacctgagaagtcttgtcctgaaagaaggaggagcaaagcaggaaagttggttgtgtagcggcaaagaagaagtcttcgggttagtctatcccaaatgtgtgaagagaaattgcaggagaagaacagatgatctcttgactcagctgagatattacaaagaacacaaacagaggagattcccctgttccaagatgccattttatcaccggttgttaatctgtcatgagcagcaagccaagatataaacgtgaatttaggcgtagctccggagaaccagatcgccttgtgccattgcttaactaatccttgttctcttatctgatgccaaatttccggagagaaaaacttagccttaaactgacccccaatacttcgacaaagagacctatcttgttctgtgcaaataccgcgacacagaagcttttctaactcttcttcgatgtcatttaagatgtcatcgcgatggcttctcctcctatgactagaaagcgcttccgccactgaacaagaagatgagatacccagatcaataaaacctcgatctccaagtaaaccatgaagctgacccaaggaacaccaatgatcataccaaaacgaggtttgcctaccacagaaaacctccatcttaaaaaactcctttgcctcgtgacggtattttagaagcttcttccacatccaagagcctaaagttgtgtttgccttgacagaccaaaatcaaccggtgcgaattagattattttgaatccagttaacccataaagaatgtttcgccgataccaacctccaaatcaatttgaaacaacagattttgttagcgtcaacaagagaccttaaacctaaaccaccttcactttttggtttacacacatcatgccacgctacctttgccttgtgaggatttaaatctgttcccgaccaaagaaaagctgcacttatttgctctatttccctgatacaagctcttggtagacgaaaggctgaaatccaaaatttggttaagcttgaaattaccgagtttaaaagttgtagcctccctgcatatgacaggaaacggttcttccaagagctaatacgtgatcgaattttctcaagaagtggcagacaatctgctagagtcattcttttagtcatgagaggaagtcccaaatagcgaacaggtaaagagcctgaatcaaaagggaatctagccaatattgaagcacaagtttcagaagaaatactagccataaaaagagttgatttctccaaactaatgttcaaccccgagaaagctgcaaaatctttgaaaatggccaaaactccttctaaagaatgagccgagccagcagagaaaaccatgatgtcgtcagcaaagcataagtgagtgagtcccatatgtgtgggtccagggtggtagctaaatctcttccctccccctcctttatctagcatcgccgtaaacaaaatcatacaaatgacaaacagacacggtgacagaccccccc

SEQ ID NO: 21382 - DNA, 337 bp, Arabidopsis thaliana landsberg
tatgatgatgaagatccatgttgtccaatactaggactgatgtctcattctgtttcaactagaacttacgtataagacatttagtaaaacggcagaaatttttcactgtgggggcattctcaattttgatactggatttttaattgtaggcttttgaggaggccatagctgagcttgacactctgggagaggaatcctacaaagacagcactctcataatgcagttgctgagggacaatttaacccttaggacctccgatatgcaggttttcacatctctttatgccgtacctagggattctacacctctcgaataacttataaagatcataatttt

SEQ ID NO: 21383 - DNA, 755 bp, Arabidopsis thaliana landsberg
  unsure (1)..(755): unsure at all n locations
tgatgccaattgaatagcctttccagctggcaaataaggtttgaaacttagcaatctaattcaacccccaaaatttgtagctgtgtcatgctctgttaccttctctcccatggcgtcttgtataagcacagtgtcacctgacattcttccaacaacttctcctgtgttggtttcgacgtcgaagaaggcaatgtcttgtctcaatatagtttgcagatacagactccttattcttccagcttgtctctccccagagatcatccaaccagaaacctctgattatatacaataacatccactaaaagattaaaatctttcacattcaaacccactaaagatttcggacagaatcaacgagtgtgtgcttacggagaagagctgccactagagttccaagcccaaggtatacaaatttcagagccacctgtgagtaaagttgtattaaagatcaatcattgtggtctttttttgtgggtctaaactagaaaggtaaaagagtagaatatatttattaccttagcgatcttatcagaaacatctgaactgttttggttttgtccaaacacatctatgacatctccgaagaggatcgtcatgatagggaagccaagaccgttacccaccgcgcctattgttccgaggatcatcaaaatgatgtcaaatgaatctggcaaggcaaacagcttgtgaaacggtacagttttggggctctcatcttcttcttttttgtncatctctgtatttttcttctcttc

SEQ ID NO: 21384 - DNA, 1013 bp, Arabidopsis thaliana landsberg
  unsure (1)..(1013): unsure at all n locations
tgtctctcagaacagggtttgagaaaacttgatgatagattctagattaaagacttgataataaaaactagggctaaagataatagaaagaccctaaaaacgtccagggactaataatgaaaatagggaagtcttcttgggcaaatttcctcttctgtaaactcgaaagagtccaggacttttgctggaccgaaactggtgtcgttcgacaccaagagtgtgttgatcgacactcctcgctgattcctgaatccaaattcgtccttagcttccttttattttagctcttgctccaaaatatctccttatctccattgttgtcccactgcattgaatacatgaaaagacactaaaaaagactcgagaaataacagaaagactcaaaatcctatacctaaaacatagataaaatcggtgaaaatcgagttatatcaagttcgaactaatcaaagttcctcgtgcagaaatttcagttgctgatgccttagctgctttggcttctacatccgaagtaactgtcacaaggataatccctgttgaaacgatagctcagcccaattttcgacttgaggaaataaactttgttactactcgggcaatgcgtaacgaactcgaggcgcaacgaaacaatctcgagctgcagcaactcgacgacgaggaaaaaattccagaagctgccccgcctgcggctgacgaagatttagctggtctcaacaatcccgaggttcctgacaatcagatacctcacgacttaggggcagactggagagaaccaattcggaactatatcctcaacggagtacttcccgccgataaatgggaggctcgaaagttgaaggccacttgtgcgcgtttctgcgtacggantggcattctgtacagaagagttatttcggctccggatgctatttgtatctttggagacagacccggacagttataaaaggaatcacgatagacattgtgggaacattccggaggtcgtctttggctttaaagcaaaaagtcggtta

SEQ ID NO: 21385 - DNA, 1024 bp, Arabidopsis thaliana landsberg
  unsure (1)..(1024): unsure at all n locations
ccgccgntaaatatctaatcccagccaggggcaaaactaaacaagatttgaactgcaaagccgaaacccctcctcccgccgaacaggaggaggaacaagctccctagtgaaagaaacgggaccgaacaccagaaggaggtgactctcccccacctgcccggaaagaaacgggatctagtctttgcggaactcaatctaggaagcatgacagaaaagtcagtcactacacctcctcccgccgcgcaaaagaaaaacacgaggttcccattacgcctcccaaatttctgcagaaacgtaaccaagcacctctccccgaaacgcatcgatttcatcatgggaagatctcagctctgcaacgacccgatcaactcgatcaaaactcatcaaaagaaagcagattcctgcacaaaaggcaaaagcccgatgatgggatcacattttgggaaagtgaaatcactgacctcgataaacctcacgatgacgctctcgttatccgaatcgatgtaggcaactacgaactctcctgtataatgatcgacacgggaagctcagttgacgtatttttctacgaagccttcaaaaaaagggggcacctcgattccgagttacaaggcagaaaaacgccacttatcgggtttgctggagatacgaccttttccctaagaaccatccagctcccaaccgtcgcacgaggagtgagacaactcacgaactttctcgtggtcgataagaaagctcctttcaacgcaatattgggaagaccatggctacacgtcatgaaagccgtccgatcaacctaccaccaatgcattaaattcccttctgacaaagggatagcagttgtatacggcagccaacgcagctcccgaaaatgctatatgggtagctacgagcatatcaaaaaagccgaccctgtagtactaatgatagaggacaaactcgtagaaatgaaaccagtcagatcctatgacccttctcaatgcgaaccttaaaaatcactgataacgcggtttgtattgacgaa

SEQ ID NO: 21386 - DNA, 588 bp, Arabidopsis thaliana landsberg
aaaatgtccatatacaagtgacagtgacagggacgacgacaagaatgggaagaagaagttggagaagaagagatactacaagaagggtggcgaggcgcacatggggcgggaatgggactccaacgagagctccaccgactcctccttcgatgaggacgccaccaacatcgccatcaacaagggtcttctcgtccccaacgtcggcgacaaatgcctaatggctaaggacggcaagaagaagaaggtacattctagagatacccccaaatacactacatccgatgatgagggtagctctagtgatgacaatgatgatttaacttctctttttgctaaccttattaaggatcaaaagaaaaagataaatgaattgatagaatccattaacgagaaggatgatctcttggaatgccaagaggatttgctagttaaggaaaataaaaaaatttgttaaattgaaaaatgcttatgctctagaggtaaaaaaatgtgaaaatttatctaaatagcttaacatttgtaatgattcaatttcatgtcttagagatgagaatgctagtttaaatactaagatagcagaattgaatg

SEQ ID NO: 21387 - DNA, 670 bp, Arabidopsis thaliana landsberg
  unsure (1)..(670): unsure at all n locations
aaaaaacagaatcttgaaagaaagaaaaaaagaaaaaaacatgncagagaaatctgaaaaaatcgatcgtttaaacgatctcacgacttttatctcgacgaagacaggagtgaaaggactcgtcgatgccgaaataaccgaagttcctagcatgtttcatgtcccttcttctattttatcaaacaacagaccttctgatatctccggcttaaacctcaccgtcccaatcatcgacctcggagatcgtaacacatcttcaagaaacgttgtcgtttcgaagatcaaagacgcagctgagaattggggatttttccaagtgatcaatcatggtgttcctttaactgttcttgaagagatcaaagaaagtgttcgaagatttcatgaacaagatccagaggtgaagaatcaatatcttcctaccgataacaacaagaaatttgtttataacaatgatttcgatctctatcattcttctcctatgaattggagagactctttcacttgttatattgctccagatcctccaaatcctgaggaaatccctgtcgcttgcaggtaaatgttttagtgattaacagtaaaatatactctttgttgagattatgctatttcttaccattcaccaatacatatatgttaacggtaggcgattccgattacccaaatcata

SEQ ID NO: 21388 - DNA, 556 bp, Arabidopsis thaliana landsberg
  unsure (1)..(556): unsure at all n locations
tttactctctgtttatattgtacccagaagtactccagacgcgctgaccttaaggagatgctccttcatagagggtatacttggccgctttgattcgtagacgccgcgctgtccacttatcgcttggcaatgttccatcggagaggtaatcgcgaatttctactcgtcaatcggtcggatccgctgggtcgggggcattcgagcttcggatggtannnnnnnnnnnnnnnnnntcggtcgaatcgatacttgggttatcaatactttccaccgggatgattcgtcgcaaatcgggttcggaagttgacgctaaggggcgacgcatctgccggcgcgttgtcacctcggggaatttttgagagtttgaagttttcgaaatctttcgtcatcagttggacgatcttgagataggcgtcgatgttctcgttctttgctgcgtactccccactgagctgcccaccgataagttgcgagtcggtgcatgcgtggatcgtggttactgcatcccgcggcgagcggcgcggcaattagggctcgtactcgccatgttgttgtt

SEQ ID NO: 21389 - DNA, 454 bp, Arabidopsis thaliana landsberg
catcgagcctctggacttctaccagggcggcttcatcttcgtcaggaaggcaatacccctcgctgactcgctccaggtccacgacgtactgggaagcgagcacggcgaaaccgcctgacgccgtggtgaagcgcctcgggagtctgccgcgcacatgatcgcccaagacctgcaggcgactttgaggggagcttcctgaggggacgtcgccggagccaaggacccggcaaaagtccgagacggcctcggacatggccgcgtggtcggctccctctactcggacgccccggcaagcgcctcgacaagcgctttggcggactcatcaagggcggactcgagctctgcgaacagccagaagaaagatctcaaacacaagcggaggaaacaagcagaaacaaaaaccgaagatggccaaggcgtacctccggctcgggcacgctgctccgaggctgcg

SEQ ID NO: 21390 - DNA, 3440 bp, Arabidopsis thaliana landsberg
  unsure (1)..(3440): unsure at all n locations
tacccctaaacctaattcttgcccctaaatataaatacttattctaagccctaaccctaggtgtgcctatatcacaagcgaaccctagccatcaccgagagctgccaactcgccgccacacctcttgaagcttgaagatcaccatctctctctctttctctttctttttgtataagactctttaaggtggagctttgcctcttgtgttctgataagtgtgcattttgcctgttttgagcatccatttgtcatcactttagcatcatatcatcactgttttatatcatttgtcatcactttgcatgtttaggatagttttgcatgcatgttgcatatttgtgttgttttcaggtgatttggagctgttgacgagctaattggaagaagcggacctgatcatgtcaaaccactcgacctccagggcgagtagacggtggactatctcaacacaccactcgaccacctggtcgagtataggacttcaccacttgacctcatcactcgaccccctggccgagtacccccacaagagtcactcgatcaattcactcgaccgccaggtcgagtgtgttcacctccaccacctgaccatcactcgatcacaccactctacctggaagtcgagtatcaccatcaccaccactcaactacatactcaatgtcgagctttagagtcttctccattccgctctcaaccagacactcgagcacaaggaagaaaagaagattccagcttatcactcgacctctcactcgaccacctgggtcgagtacagtttttaatccgtcccaatactgcgtcgttttgtgtattagggtttcagaatattttgctataagtagcatgtactttacattttcgagaacaagttttttctaagttttattccgcacacactgtgttcttgaccttttgtaatccgaatttctctttatctattcaatatttagtattcagtatttgttcttgatttcgtttattgctgttcatcctgttttcaccttgctattactctgttgttatcatgttttcattccattcaacgtttatgttttctacaatgatgtctgagtagtgaataggtttctgaggatgggttagagtagtttagaattctcagtatgctgggtagttgagtttgattgatagatcccttctagattagttgttctaaatgtctattgctttttgatcaattagaatttgagcctagacattttggcgcccaaaaggtgtttgatgaaatgtcttaagcactaattccagagattcgtggccctctaccaaggtattggttgcagggagcgttttggctttaacttgttgattcgtaatacctgttaggttagctctcgtcaatggtgattgagtctgggactaggttaacttgagggtctctgttgcggtggcacttagatttggttaaaaaccttgttgtctagggttaatttattgagcatgtcaatcacctgtaaactaaggaaacaaaattactcaattatcccatccttaggaattctttatctgattgattttattgtttattctactgctgtgtactgcatcccgtcatccgttgcttagtttctgcaattctttactgttactcgacctgatactcgatcacccagttgtctggcaacagactgtgcagtcgagtatgcctgtttcattttctgtctgttactcgacctgtcactcgacctcaccagtgctctacaaagagctgtgttggtcgagtgttttactgtttctgtttgattttctgttttctgcatgttcacttaggattgctagaacacatcaaaatctgttatgcttggcttgacttagtgacttctgatcacatcttgattgttagcatcacacccatttggattgacaacctaaaatactacaacgacatgattggtgttttaggataattgactaaaaacctattatcaaagacccctattggcacgactcctttcaaccttctctatggaaaatccagtcacctgcctgttgagctcgagtataaagccatgtgggcagttaaactcctgaacttcgagatcaaaaccacagaagagaagcggttgatccaactgaacgatcccaacgagattagcctagaagcttatgagagttccaaaatctacaaggagcgaaccaaatcttttcatgacaaaaagataatttcaagagattttagggttggtgatcaagtgctgctgttcaactctcgcctgaggctttttccaggcaagctcaaatccagatggtctagtcctttctctgttactgcagtccgaccttatggtgctatcactctagctgggaagaatggggacttcacagtcaatgggcagcggctcaagaagtacatggtagatcaatctattccagaaggaacttttgttcctttggaggagcttgtaaatgcctaataagtgtgaggagtcaagctagagactaaaaacaagctcacttgggaggaagtcctatgtctatccatgtatatgaatttctatntttcttgttatttttgatgttttcgtttaagtgtttcaaatttattttattgaccttgagggagtcaacgatttagtaaattcaaaccaagtcaagaatcatcttaaccgttgatcgagtaaaatgaggaggagtgttttaagccattggattgaatgaccaaatgggagaagcatcttcaccgtttgatcgagtgatcaaaagcaaagaactctcaaccgttcgatcgagtattgcgcatttcaagaggatgctcgaccatttactcgagcttgaattatttggagaccaaggtataagtcgcgtgaccccacttgttcccccatcactccattactctatggacaaaacaattacccacaccctcactgtttccaactcgcttttctatcccttccaaaagaaaccaaagaccatcctcctccacctattgaaatcgccaaaccacctttgaaaccttctgtctttcatcctttcattttcgcaaattctctatctctcacaaagcttcaaaattaagtttcattccaaactctccctatcactcctcaagaatctgttctcaccttcaccatacctcaccaaacttactcgatcattcccaagtccatcttcaaatattcaatcggtttttaagctcaaaactccatcaccaaaaaccaaatcctttccactttgatacctcttggagaattgttcctgattgtcctgtagaagctcatcaccaaactccatggattcaagaagaaaggattcatctcggggtaaaagatcctttgttgatagcgaagaagtagcagcgatcgacatgggtagcatgactgagcgccaaattcgccaagctcgctgtgctcaaagatcaagcttgattcaatgggaaagttcaaatcgctcagccatgcaaagagaggaagtagctagg

SEQ ID NO: 21391 - DNA, 2375 bp, Arabidopsis thaliana landsberg
  unsure (1)..(2375): unsure at all n locations
tgtcgaaaattcccatctccaaacttatcctcaattcatctatgtgagtcagttgctaaacatatcgtttctgaatagtctagttatcattaatgtttactggaactcgaaataagttaacttctcaatgtttgtaaacagaaaagcgtgccatctccgtcttcccaggagagttcttgttccgtggctgtccggtatgttcatctgcgattatctacagccgttcgaatcactcgaggtatatgagccacctgcaatgtcttaaattctttacgctttgttgaactcttcttccaaatattaatacacattttgttttctgaaaaggtggtaaaagaacggtgtatcgagttgatgtccatggaacattcttctatagacgaatcaaagatttcagaagtggaaaccgaaacgtctttattgatcgcggaatcaatgtgggacgtgatatctcctgcgacatctgcttccagcttctgcctaggagggaatgtggaaaggacaacggatggtgaagacgaaaccaagagaacgagtaacgcaagtactgcatcaaatgtcccgattttggtcgggattttcgtacttttactctcaattgtattaggattcatgctttaccagagcgattagctaatatcacacgtgacaagtctctgttttgatcaaaccacatatgaacttacttttgtttcccgcattagagtagaagagagactattcttctcgtcggagaanatatacaaaaccgtgcctctttatatttgaggataccttcaatcaatttagtacatttttttttggattttgcaactgagcttcaatctcaagaaccttttgttagatacgagaaagaagaatgtggcaatcacacccatgaaaataaaaatggtagagtgagactcagactcatattgtggaaatccgggtttagtgatgttgaacattgtggtggtgagtgtttaagttgttcttcttatataaacgcatttcaatcatctatatagaatttaaaagttcttattaattaaaaagttatagagtatcgattttactaaaagaagaatgagaaacattggaggttgaaaaagttattatggtatttagagggaatttgagatgagtgtagcaccttcctttcaaaagtgaaagggaaaggcgtaagatttttgttgtcttgagttagtgcaagaatggttgacggatttacaaattttttttactaaataaatacttgtatttttttttgggattgaggttatcgtttgatggcggagaaaaatggaagctttaaaatttggttaactgaaagtgttttcattgcttagagctatagcttcttttggttaatgatgaacatggagtagcttgtttactacttaacataagacatacatttgttcattcttatgttttgcttcttttttttttcttatgttttacttttttttccagattattgctcgacgcgtggacgagcttgttcgcggtggtctaggcagtagcacactgtcgcgaccaccacgatcacaaatgcaactgacgccatgactccgaacagcaccactaagccggaagaagagtgagactgatgtggtggaagcggaaagtcttgattcgttgagttaatcatggtgagtgagttgcttttccttctctcttcttcttatcattatatagaccagtgaagatcaaaacctgcaaactactgtgaattgccaagagtgtcaattgtagttgaaaaagtgtttttggtttttctaataagtttgggataaacatattacctagaattcaaaagtgatagggccgttaaaaaatttccgaattgttgatctttataggttttgaattgttgatcttttattgggaattttgaatcatgacaagacctgcctcgttgcccgattccaatgaaactgtctttaatacccgttgcatattaattcataaatattaaaaatatttgatataaaaaatatatcaaaacatttgttttgttaattacaggtggaaaacgtaaaaatatcaagtttttccaaaataataatctattagtaacatatgagtatttaactatttataattttctttactgtttagttttgtattgagatatgaagaaatggtatggagaaccaaagatcgaccgagatgacagggctaagatatgagtcttgaaaaaatatttttcattcttatgttttgcttggtttttgcttattatttgcttgggacgagttggaagatggaagctgagactgtctcaactcagggacgtttttccttgcggcgctcaagacaaaaaagacgcagctccagccaaaacaagaaagaagaatgaggcgatcacacacatcaaatataatggtaga

SEQ ID NO: 21392 - DNA, 633 bp, Arabidopsis thaliana landsberg
tgatatgtttgggcctcggcggccacgaaaaacatacgcacactacaaacaaactctccctgcaggttcagacatcaacagagggagcagtagcaccctcgacgtcgtctccacattcgtcggaatctggcccggcctcggacggcgacgcgggcggaaggatctccacctcgaaggaggaagccagcaccaagctcaggccatcatagccaaggcctccttaagggtctcggcccgggcagacacctcgaccggccgctccgtagcctcagccagctgtcccccgaggacatcagcccggctcatggcctcagcagcctgactccggggttggtccgccagcggacgacctgtccaggttccagccgccgctgctgcacctcctcggccagggaggcacgtgctcccgggccaacgaagcctcttctcgagccgactccgcctctgtccgcgctgacaccgctgcctacggtccggctcatcgcagagcagccgagggttctttaactgagcaagagaagcttgcgtggcgaggccgacgagccgagggactcgacacgacagcacaatgaggaagaacacggtattgactacaatcctggatgtcaggcccgacaaccgaatgacataacg

SEQ ID NO: 21393 - DNA, 516 bp, Arabidopsis thaliana landsberg
ctacaaatgactattattaatcatgtaaaaaattacaacggttaaaactgattaaaccagaagatatatattatgcgatgataaatggccgaatatttataatatattttaataaaattttatgaaaatacagtcttccatttttacagttttacccttaacatctaaaaaatatcaaatgatcctgtaaaatctaaaataatacgtaatatagtccatttttgtaactttacatatattgtaaacgtttttacaatcacatatatttatttttgaaaattttaaaatattattgtactccttatctcgagagtttcgatttgatatattatttatcaaaattttaaattttaataataataaaaatgactatctatactgcatattttagaatttatagaattattttatattttttagacgtaaaaggtaaaattacaaaaatagatgattttgagagttgtttgcacataaaactcattttaatactatatattcatattttatatgaaatat

SEQ ID NO: 21394 - DNA, 507 bp, Arabidopsis thaliana landsberg
cgactctgatccccgtcatttagttttttaaaggaatgggtaatgatcattgtccgcgtacaatggtcggagagttctcggtatggacgtgtaatgtgagcaagcggaacgagtggtcgtggatgggccatgatgtgagctggttgtgcagctatttgtgtaaggataaggatgggcgttttgatgaggataagaacaagattggataatgataagcttgaaagtggataagataaggataagccttatcctttgagtgacttgcactccaagtaaccgaaacttgctctccaagtttccctagcctatataaacccatgtgatcccattcattagttcttcacaccaaaacctttagcctaaaccgttagatagctagttagtccgtgggagtccgagtcgggtagaagttggtcgagtcgagagtcgtactcgggtaataaggtaagtagttccgcccttaagtcatcttttattatttttagaattatttttccttaattttgt

SEQ ID NO: 21395 - DNA, 577 bp, Arabidopsis thaliana landsberg
  unsure (1)..(577): unsure at all n locations
acacacccttttttttttattgttgagaaagagtttacganttccgttttcttaattttcggaaatacacgatcctggcaaccttctttagatggcgccctgcaatccgcgagcagtttttactccacgcccatcattcatctcgggttagctttatctttacgcctcccgacctcactcacttatttgcatgctaacttacttctcctgattatgtaactcttgctcaggcgaacagtgagcttaatgacatgatcgaacactacgaaagactactgctcgatagggaacatgacatcgattcttggaaaggcaagttctcttctcttgagtccgaccgccgctcctcctccgacaccaagctgaaactggaggaccaagtcgatcatctttcctccgagctcatgaagtcgaatggggagttgcaagatcagtatcaaaggtatgacaagctctaggaggaactctcgactactcaaggtagacttttggaattcgagtctaacgcctatgacttgaccaatcatctcaccaaactccaggccaagtacaatgcaatcaccaaattccgagatgc

SEQ ID NO: 21396 - DNA, 584 bp, Arabidopsis thaliana landsberg
  unsure (1)..(584): unsure at all n locations
gcaggtcgactcatcactccttgtacccacaatattgggactatgtgtgggagatgattggggctctttgtcagctttggaacttgtatcaaatacaggcttcacaaacacaacaattgcctggaataagaagataattttaaaaacaatccaaacagagctgtccattaaaacataccagaaaattatgatacatgttataccttcataggatcagtgttgtctttaaaaactcctgaatgaattactgcagccgtctccatggtgacctgatggtgagaaaaacataagaatatataacctgcaaattatttcgaatacacaaactccaatccaatataaaaatgaacatgcgggccgaatttagtttagacataaggatgaccttctttatggagaacatagcaaacccagtcaatgaatgagctgctggaggcgtctccatggtgtcctgaaagttgaagtacacaaaaagatggtgagaanaacataagataatattatctgcaaatgttaaggtctcacaaaatcctgtcgattataatagtgaacatgggagcattttcatatcaatgtttgttgca

SEQ ID NO: 21397 - DNA, 612 bp, Arabidopsis thaliana landsberg
gatgtcaggggtcctcactgtaagacaatggcaagaagccttgtgactcagtgcatctgccaccacattggcctttcctgggtgataatggatttcaaaatcgtaatccttaatcaactcaagccatcttctctacctcatgtttagttctaactgggtaaaaatatacttcagacttttatgatctgtatataaatggtagatatttcccagcagataatgacgccatatctcgagggcacgaacaactacagctaattccaagtcatgagttggatagtgctcctcatgccggcgtaactgtctggaagcataagctatgactcggccctcttgcattaggacacacctaagtccactgttggatgcgtcacaatacacatcaaaaggcttttcaatgtccggttgagccaataccggagcagtggtcaataataccttcagctgctcgaatacttcattgcactttgaggaccagtcaaattttatatcattcttcaacaaacttgtgattggtttacaatcttggagaaatccggaataaaccgcggtaatatcgactagtcaaggaagcttcgacttgatgtacagtggtggcggttccatctagat

SEQ ID NO: 21398 - DNA, 679 bp, Arabidopsis thaliana landsberg
ctcaatggataagccactagatatgatgctgtcaattggatacatgagattaaagagtggaagaagaaatttgagcttgttgctcacacttggatccccaggaaatacatccgaccggccgatcacttagcaaaacaacaacgaggaagaatctcagagtttacgttctattctcgtattccagattttatctattttgtaactcacaatgacaacattactcatattcaataaataacttgtgagagttaaaaaagaaaaaatcaaaaatacttgaaaatatataaaaatagtaaaatatttgaaaataatcaaaaaaatatccgaaagtacaccaaataatcaaaaatatcggaaaatattcaaaataaaataactgaatagatacaaaattttaaaaccgaaaggaccaaaaccaaaccaaaaaccgaactaaaaaaatagtaaattctaaaattaaaaccgaatgaaccaaactgataaccaaacgcccaaaactactttttatattttatcaaagaatcttctacaatgattccagatattaaaaatagtaataaacatgaacttattttcgtacatacatcattgtcaaatgatttgaatacattttaaaaaattactaccaaaacttgtggatcaagtagcatgattcgcttctagaaaatccacgttatgc

SEQ ID NO: 21399 - DNA, 1228 bp, Arabidopsis thaliana landsberg
  unsure (1)..(1228): unsure at all n locations
tcttatttgttggagaaattcctttgcaatcatctacgagattatttccattccttttgctgcctttttctcaaagaagctgctataattctcaatcctacattacaattcgattcaagataaacctaaaaaataatcatcatattatctgagtgtgctagaaattacacatatattttatctagctaatttatcccaattgagatttttaaaataaaataatgagattttggaagaaggttttatctcagggttataacattttaacattggcgtttgaaactatcgaaaatttgaatttttttacagtagttcttgatgtagcgattctgcaaacgcagaagatcgctctctcccctaatgtgaaattagcagttgcgtttggtagaagacattgagcaaagagaaaacggtaataatgagaacatctaaataatatatagtactcaggaatgtgattttcaaaaactttgtttccatggaatttaattgataatacctaacctgaatcaacaagttggtcttattgaactattcgttcccacgaaacaaaagaagtgcgaaagaatcaaagaatacccccccaaaaaaaaaaaaaaaaacagaaacaggggaaaaagacacaaatcaacagacttgtgttttcaagtatttctcttctctatgtcatggtggtcgtcctctggaagcatataccttttccagaaccaatgtggcttccacacactctccctcatgtcatcaatggcgattccttttgtctctggtatgaagaaaaacgcaaacagtcccatcacaatgatccaaccgctgaagaagaagaatattccagatctcatcccgcaaagcatcgataggaaggcttgagcgattacaaaagtgaagaacatgttgcatgagactgcaacagcgaatcctgcgctacgtgtttctagaggaaacgtctcgctaggaattagccatcccaaaggtccccatgaccatgcaaatcccatcacgtaaacgcacacaaagatcaccactactagggcttgtggcctcccgagtgttcccgttacgcccaagtcctttgctaggatgattccaatgatcaactgttttaagaggttagttagtttacttctgggacaagaaacctacctttaagttacttgaggcataagaaacanagagatgagagatttaattagaacctggcagatgagcatgtgaacggaagattggagaa

SEQ ID NO: 21400 - DNA, 565 bp, Arabidopsis thaliana landsberg
gattacatccagaatgatccattatctccaaataatcccaagcatgtaaagacctgaaaagaactagaaaagactctaaaaataacaaatagattctaaaacctatacctaaatcatagctaaaagcagtaaaaatagggttatatcactcgattcccaaaatggtttaaaccatttggacacgtcataattatcgaatttttggttccaagacaaaaggtagccctctataaataagagcttatctgccaccgaattctcctcaagtatgatttcagaaatttacttgataaacactacgagaatagaaaacgaaggagccttcaccgtctgtccactcgtccccattagcccattgtttctgtccggtgacggtttcgaaccagccagtgtcctctttccccgcgctgcttttcacttccctccaaaagataaaaaggaggcgtacgacttcatggataaggtcgggatcactcttccttccttaaagcttcttctcctttttatttttcactaatcggtttaaatctaggttgttgcacacatcgctgcttgtgcaatgaga

SEQ ID NO: 21401 - DNA, 2616 bp, Arabidopsis thaliana landsberg
ttgcaccccgcccaatcggcatccgaataaccaatcaaatcaaatgtggatccccgagggtaccaaagcccaaacttaggagtataagccaaatatctcaagattcgttttacggccgtaaggtgtgattccttagggtcggattggaatcttgcacacatgcaaacggaaagcataatgtccggtcgagatgcacataaatagagtaatgaacctatcatcgaccggtataccttttgatccacggacttacctcccgtgtcgaggtcgagatgcccatttgttcccatgggagtcttgatgggtttggcatccttcattccaaacttgattagaatatcttgagtatactttgtttggctaaggaaggtgccctcttggagttgctttacttgaaatcctaagaaatacttcaactcccccatcatagacatctcgaatttctgtgtcatgatcctactaaactcttcacatgtagactcgttagtagacccaaatataatatcatcaacataaatttggcatacaaacaagtcattttcaagagttttagtaaagagtgtaggatcggcttttccgactttgaagccattagcaataaggaaatctctaagacattcataccatgctcttggggcttgcttgagcccataaagcgccttagagagcttatagacatggttaggatactcactgtcttcaaagccgggaggttgctcaacatagacctcttccttgattggtccattaaggaaggcacttttcacgtccatttgataaaacttaaagccatggtaagtagcataggctaataatatacgaattgactcaagcctagctacgggtgcataggtttcaccgaaatccaaaccttcgacttgtgaataccctttggctacgagtcgagctttgttccttgtcaccacaccatgctcatcttgcttgttgtggaagacccatttggttcctacaacattttggttaggacgtggaactaaatgccagacctcattcctcgtgaaattgttgagctcctcttgcattgccaccacccaatccgaatcttggagagcttcctctaccctgtgtggctcaatagaggaaacaaaagagtaatgttcacaaaaatgagcaacccgagatcgagtagttaccccttatgaatgtcgccgaggatggtgtcgacggggtgatctcgttggattgcttggtggactcttgggtgtggcggtcttggttcttcctcatcctccttttcttgatcatttgtatctcccccttgatcattgctatcatcttgaggtggctcgtcttcttgattttgctcttcatcattttgagcctcatcctcattttgagttggtggagatacttgcatggaggaggatggttgatcttgtgcacttgaaggctcttcggattccttaggacacacatccccgatggacatgttccttagcgcgatgcatggagcctgttcttcacctatctcatcaagatcaacttgctctacttgagagccgttagtttcatcaaacacaacgtcacatgagacttcaactagtccagtggacttgttaaagaccctatatgcccttgtgtttgagtcataaccaagtaaaaagccttctacagttttaggagcaaatttagattttctacctcttttaataagaatgaagcatttgctaccaaaaactctaaaatatgaaatgttgggctttttaccggttaggagttcatatgatgtcttcttgaggattcggtgaagatataaccggttgatggcgtagcaggcggtgttgactgcttcggcccaaaaccggtccggtgtcttgtactcatcaagcatggttcttgccatgtccaatagagttcgattcttcctctccactacaccattttgttgtggcgtgtagggagaggagaactcatgcttgatgccctcctcctcaaggaagccttcaatttgagagttcttgaactccgtcccgttgtcgcttctaatctttttgatccttaagccgaactcattttgagcccgtctcaagaatccctttaaggtctcttgggtatgagatttttcctgcaaaaagaatacccaagtgaagcgagaataatcatccacaataactagacaatacttactcccgccgatgcttatgtaagcgatcgggccgaatagatccatgtgtaggagctccagtggcctgtcggtcgtcatgatgttcttgtgtggatggtgagcaccaacttgcttccctgcttggcatgcgctacaaatcctgtctttctcaaaatgaacatttgttaatcctaaaatgtgctctccctttagaagcttatgaagattcttcatcccaacatgggctagtcgacggtgccagagccaacccatgttagtcttagcaattaagcaagtgtcgagttcagctctatcaaaatctaccaagtatagctgaccctctaacactcccttaaatgctattgaatcatcacttcttctaaagatagtgacacctacatcagtaaatagacagttgtagcccatttgacataattgggaaatggaaaacaagttgtaatctaatgaatctacaagaaaaacattggaaa

SEQ ID NO: 21402 - DNA, 1888 bp, Arabidopsis thaliana landsberg
  unsure (1)..(1888): unsure at all n locations
ccagtttgagttcgatcaattttcctcatacatatatggaaaattgatcgaggtcaaaccagatccttcattcattgcagggctagaacaataaaactctaaccaaatttaacagaatcaatacatacatataacagagagaagttgatttgaaaacnnnnnnnnnnnnnnnnnnnnnnnnnnnnnnnnnnnnntgcaaagtcattgaaacaatcagagaatcttagattatctccatccaaacatctctgaaacaccaaatctgcatcttcaatggcttgaaaataagaaaacggatttggatccaccgagacttgatcatcaacaccaacatcgttcaaaatatttgcactagtctcctgatgagtagtgttgtccgaaaaccaatcatctatcgagctttcaaaggcgtgttgaagtcaatgagtttatcaatatccatgtcttgattggatataggttaacttcaggtaaagcagcgttgttgttgctgctgttgttataaccgtacncaaaaagtttcacaaatcaagagaatctgatcttgttcttcagtgatctcattgaaattttcaggtgatttatcaggaacgcaccaaattgcagaagtacttgactgaatatctagggtttgatttggctcttgagtaatatcgttgatactttcagggatgcaacaaatcgtagaagcggactgaagaattagggtttgatcttgagttccgtgaacatcgctcttctcattcttcttcaagtccttgtgatcgttaacgcaagcttcatccgcacgcaactccttgagattactcaacagagtccacatggaaccgatcgcttcactaatctcttgaggattctccgatctcacaaggctctcgtcattccaccaaaaccctaaccctagattcttgcgagtcaaacagataccaacgtcctccctcgtctctttgttatccttcggagccgaaacaggacgttttccggagagaaaagcagagacaacggcatcaacagaggagtgaccgaaagagtagaaagagacgtcggattcagaagaaggaggagtcgctaagatagcgatttgtgcgtcggagagaagacaaagctgagaggctttgctatagagaccttcacggggtttggtgcaggtaaccctaagggaatctctcttctgtatcgtctcaatcgcaatctttctcttcgtgccaccttttttgaccattctgattgatttttctcaattttgttgagtgtggagaaagataattgaagtgaaggcttcttctatctctcagtctcatatataagggaaatatctaaaccccatatcaatatcatccacctaaaccgattaaaccacatggaccgtaatcttgtatgggctaagcccaactatccaccagaatccttttttagtgcagtcttatttatttttattttgataatttttagttattgtattatgattcagatttatttggagatatttttatttttcaaaaaatattattttgctagattctacaaaaaaaaatttgtcagattattatgagagagacaaacaaatatatagctggttcttcacattatcgtgttcattctttctggttcttcactccttaaaatgtggctatggagttgacaaaggtgacctggtagcagaagaaaactttgttaaagacctactgaaaaacaatagtccatcaaataaaactaacaaaaaagcctatcagctatcctaaacacacaaaactcanaatatcaataccaagaagaaacaattgtaattggtgactatagaacaaaccttgagagagggtcatcaacatataatcactgactgatttcattggagcttaaccttggacagtgttcaaaacacctagca

SEQ ID NO: 21403 - DNA, 2149 bp, Arabidopsis thaliana landsberg
gagcaaatccatttagtatgtttcctctcttactaactcttgtgataatgtttttagttctaataatgaatatctttgtagcatctcaagattctacgggaaagacggtaaatgtcaatgccggaaactggcaggaggagacctatcagaaggtatcttcacttgccttgctcttaacttcttaacatcacaattaggttttgattttgttttcaattgattcccattctgatatgtcctgcagataaaaaaactgaaagagatgtgtttacctgttctcagtttaatgcaccaaagagttgcggaaaaattgcgggaggtactttattttataacctaattgttttgcttgtggaacaagaatttgttctaatggttttcttaatcatttttttctaaaactttgtgttgtttttggtttaataaacctaatgtttccagactgaatctcttccgccgcaaccgatgcaagctcagtggattgaaaagctaaaggcgggaaaattgtcaatggaacaccttatgtttttcttaaatgttcataggagcagtgtatcagagaaacatagagacaagtttagtcaatatgagtaccacatattgaaatttaccaagagtcagaccatggttttgaggccaacgcagcaacaacaaggacaatttcctccttctcaaacagcaatgcaaacccaaagtcctcaagtcaatgtgtcacagtctctttataaggagcaaatgagatcacggttgatgccaagtagccaaaatgaggcctcgtctttgttgcagacaaggcctaagttggatccaagagacgagaacatcattatggcttcctcaggaaatgtcatgtgaccttctgctaaacagaatcctcaggccgtaaacacaaatatcagtccggttcagtcgttgcagcagcagaagcgattccatcaccgacaaatgcaacaacaacaaccacaacaagggaatcatcagcatcaaatgcagagatcaaaccagacaaatgagatgaatgatgtgaggattaggcagaggttgcttgagaaactagtctcatcgagtcagctccaggttccaaagcaagtgtctaaagtttcatcccctcagatacagaaccactcttctcctcagttagttgaccagcagattcttcctgcgacggttaacaaaaccggaaccccattgaagtctagtggttcggcttttgttgctccagctccatctccagttcctggagattctaaaatgcctatatctgttgagtctccagtttctggtgttgatgaaataaactcaactttagattcttctagtaaacttggcacacaagaaactcctctgttatttgttcctccgcccgagccaatcacagagcggcctattgatcgacttataaaagcggtaagtaaactctatagcttatctaagtttactttctttaccttctcctatttactgacctaatttttaatgtgtgtggctttctagtttcaagcagcatcaccaaaatcattggcagaatctgtaagtgagattagctcggtgattagtatggttgacatgattggaggatcgttcccttctagtggaggatgtagagctagtttaggcgaggatttgagtgagaggacaagaaactttaccacacacgaagaaacaaatctgtctaagagaatgaagcgatcaatcaacattgtgccgccagatatgtcatcacaaattgatagttatgaacagttgagtagctttgaatctgaagttgattccacaacatcatctggcttgaaagttaacattattgcggtaaaatctactctattggtatcgaactacgaaaacaaatgaaacatcgaaataaatccattttttcaatcttgtagcctggttatgcccttttgcaagaaatcaaagaaacaaatgggagacttgtagagacagtggtagagatatgtgatgaagattcttcaggaacaatcgtcacttgtacttatgctcatgtggctctaagtgccacattcaaagatcattacaagtctggaaaaattgtaagttacttcaaacttcttctttttcctcactgtgctcagattttttatgtctctaaatgtttgatgcaggcacagattcaacctttacgcttact

SEQ ID NO: 21404 - DNA, 318 bp, Arabidopsis thaliana landsberg
aaacactggagaaacaaagacgaggacatgaaaatctacggtccgcttccacacaacgtagctaggaaaatgacttacgtacaacacatgaaatcaagcaagtactgtctttgtccaatgggttacgaagtgaacagtccacgtatcgttgaagctatatactatgaatgcgtccctgtagtgatcgctgataacttcatgttaccgttcagcgatgtgctagattggtcagcgttctcagtggttgtgccggtgaaggatatttcacggctgaaggagatactattggagagctctatatggagacccttaaagatg

SEQ ID NO: 21405 - DNA, 1386 bp, Arabidopsis thaliana landsberg
ttgccgcaggacattgttgcgcgcaactactttggatgaggcaaacccttagggactacagttacaaattaaccaaagttcctcttctatgtgataatgagagtgcaattcgcatggcggataatcccgttgagcatagccgcactaagcacatagctattcggtatcactttttaagggatcaccaacaaaagggagatatcgaaatttcatatattaacactaaagatcaattagccgatatctttaccaagcctcttgatgaacaaacctttaacaaacttaggcatgagctaaatattcttgattctaggaacttcttttgttgatttgcacacatagctcattcatacacctttgatcatgtctctttcatgtcctatgactaatgtgttttcaagtggatttcaaaccaagtcataggtgtatcgaaagggaattggagtcttcgacgaagacaaaggcttccactccactccataactcatcctttgtcgtcgctccgagcaattctccgtctttggtataatcttcactcatatgttttatttgccaaaggggataaagtagttacaagggcttatatctcactcaaagtatccgtttttggcgattcatgccaaaggggaagaaagtattagcccaaagcaaaaggaccgcaccaccacctaattttaaaaaactcatgattttcaaattgatatcttattgtgttcaaaagggggagaaagtagtatttttcaaaattgatatcttaaaaccctcttgaacactaagaggaggatttcattaagggggagttttgtttagtcaaaggaaaagcattcgaaacagggggagaaaattccaaatcttgaaaatgcttcgcaaaatcttattcatttacctttgactatttgcaaaagaactttgaaaaggttttacaaaagaatttgcaaaaacaaaacatgtggtgcaagagtggtccaaaatgtcaaaaatcaaagaaataatccatgcatatcttataagtatttatattggcttcattccaagtaacctttgcgcttacattatgcaaactagttcaattatgcacttccacacttgctttggtttgtgttggcatcaatcaccaaaaagggggagattgaaagggaattaggcttacacctatttcctaaatgattttggtggttgaattacccaacacaaataattggactaactagtttgctctagtgtataagttatacaggtgccaaaggttcacacttagccaataaaaagaccaagaattgggttcaacgaaaagagcaagggacaaccgaagcagccctggtctggcgcaccggactgtccggtcaacaccggacagtgtccgatgcaccagaggacttcacgatg

SEQ ID NO: 21406 - DNA, 982 bp, Arabidopsis thaliana landsberg
  unsure (1)..(982): unsure at all n locations
cgtcgactacaccgggttgaataaagcatgtctgaaggttccctaccctctgcctcgcatcgatcaaattgtggactccactgctgggtgcgaaaccctgtcattccttgatgcctattcaggttatcaccaaatcaagatgaaagagtccgaccagctcgtgacttctttcatcacaccttttggcatgtattgttatactactatgccatttggcttgaggaatgcaggtgcgacataccaagggtgcatgaaccacgtgttcggagagcacatcggccgaacggtcgaggcttacgtcgatgacatcgttgtcaagacgaagaaagcctccgacctcctctttgaccttgaaacgacattcaagtgtctgagagcgaaaggcgtgaagctcaatcccgagaagtgtgtcttcggagtcccccgaggcatgctcttggggttcatcgtctccgagcgaggcatcgaggccaacccggagaaaatcacagccatcaccagcatgggcccatcaaagatttgaaaggagtacagagggttatgggatgtcntccggctctgagccgcttcatctcacgcctcggcgaaagaggtctacctctgtgccgcctcttaaggaaggccgagtgcttcacctggacccctgaggccgaggaagctctcgggaacctgaaggcgctcctcacaaaggcgcctatcttggtgcctccagctgccggagaagccctcttggtctacgtcgccgcgaccactcaggtggttagcgccgcgattgtggtcgagaggcaagaagaggggcatgcattgcccgttcagaagccagtttacttcgtcagtgaggtactgtccgaaaccaagatccgctacccacaagttcagaagctgctgtatgcagtgatcctgacacggcggaagttgcgacactacttcgagtctcatccggtaactgtggtgtcatcctctcccctgggggagatcatcc

SEQ ID NO: 21407 - DNA, 546 bp, Arabidopsis thaliana landsberg
tagttatttagttatgaatttctgaagttattaagcacctagaacagattaattcaaatgaacaattttgcttcaagtttcatggctaaacagtgttactagttgatatacaatattaaaataaaattattgcaactggaatgactcaatttggagttgaaatgaattaaatatgaattatacaagttttaagatttatttttatactaaaaatcaatttctaatattaattatctagtttctctgttatctggactgcgcatgaaattcagtatagtacaggggccaacttataaacattccctagactcagattaacccaccgatggatggcgggttcatatttcagaaaccagagggctcttttataatttgtcatggccgaaggtgtattttgaagtcacggccgcacgatcagatctgggcgatccagattagatcgagtcttaagtgaacctgtacgcatatcagccgttgatcccgagatctgtggtccagatttaaataacgatatctgagcgtaccccctccgatctagatcgaacg

SEQ ID NO: 21408 - DNA, 2223 bp, Arabidopsis thaliana landsberg
taaaaatatagggtaagtgaagtgagtttccctccaagatttttaattttattttttacgagcagtcggaaattaacggaattttcttagtttggatttattcagatttagtttgttcaactatgccatacacaatatgattgtccgttgtagaacaacattctcttacgcatgttcgagaataggtcaagaagacgtataatatgggcaaatcgaaaacaaatattcgtcaacattattttttccaaaacaatgaaaatacattaatcctaaattacagtacatgattttggatataactgaagaatctacatttacgtgggtgatgacgacataaacaattttttatggttgatatacaatagtctaatttcttaaaattctgttgtgttgaagaattgattaaattgaaatgcatttggtccgatttaagtcattaaagggtaactggaggacgttgagttgtttagcttgggttataaagctaaaaaagtctccaattcgaagagagggtttcgctaaaggacaaccacttcgtgaaaggcagtgattgcttttacataactatgtgtacctttatctttcttcctctgttacgcttcttcttgcttgagattgtgatattgtagagctatgagcatttgcaaataatgatatagtaaattattggatcttttggccgagatgtaagaatcacgcatggtggatggatcatgaatgaccagagccctctttcacgaccctggttgggaatggatgcgaatagttatcctcgtttatttggaactaggaactttccttaaagtcacttgccactatgtacatatgaagtttttagagttgctatatttttgcaatgcaatcctattaatataaactttgttataaataaaagaataatagctttgttaggaatatatgcagcgaacttagcttatcctatctataacttgttatggaatcttctaaacttatctctattgttcaacaacacattcaatatcagattcttcatcttcaaaatgtatagtttgcgtagttaaccgttcttcattcggggtaaatgacactcttcttagttcaaacgccctgtcttgtgatgggctatgtggccgtggtgcgatttgcaaagttgaagggctcggaatgtactgagtcataggtgaactcacatgatgaacagcgctgctcttgaaagtatgcgactttatgtctttctcatcgaagtttctgaataaagacgttagcttacgccatatcgaatcttcggaatcatcacatagtgtatgcctattttcgtacaagaaaagaaacacgaagatgagtagtgccaagaatgaagcaatgcctgctattagaaacagaccccaaaagctacgaaggcttagacggttcgacgaaagagcggtctttggatcaggacaatcattttgtttcatgaaccatttgttctcgatgtgttgcatttcatctccttgagtcacatttaagatagcctttgagacatctcctgtcaaaggtgaattcttcgggaatgcctacacattgatcaaggattcaaaacatgtgttatttgtccccttattttgtaaaaatacatagaaaggaaacagaaggtacttacaaagccaaaaccaccagtcttaaatgtaggttcaaccatgacatatttagagcaggattgagaaaggatagccttaaggtaagcaacttcgtcgaaagctgctgcgataccttttgatttccccttggacaaaaggtcgtcggcatctttggcagaatcaaaaggctttagctgatcttcatgaaatcctagccctaatagaatatctttaacgaaagcaccaccttggtaccctacacaatccctatttttgatgagatcgtttacatttgtgaccgtcggttgcaaactttgtaccgtgaggaaagaggtgagactcgctgtgtagctctgagtgagaacaagcactacaaaacaccagacaaccaccacaaaccttgctaaattgctcactacattctcacctatatacacatgcacaagttttcactttatcattacaatcataaaataagttgagatatctaaaaaatattgacaatgtaattatgtttggagataaaagctacaaaacgtaaatatttatcattattagattctcgattggtgtaagaacttacggtgggcaaaaaccatggtggagaaggagaaccataaac

SEQ ID NO: 21409 - DNA, 634 bp, Arabidopsis thaliana landsberg
gccgccacaaaatatttacatggatttttaaaatcatttttttggctgaggaaaaatttgttatgaaaaaaaattttgccgggaatttttttttttgtcgggaaaaaagtttggcggaaacttttttttttggcgggaaaaaaaaaatttggcgccaaaaaattggcgggaaaagttcagttttcaattacatgtttctattagatgagggtaatttggtcattttgttcaagagaagaggtatttttaaaaatggacaacataaaagggtattgttgcaaaagagtagtaaaaaagtgtaattttataaatctcccttattttaatatacaaacaaatattatttttacttgtgtataattttgtcttttgataattttcatttttttgataatgttaacaattttctagttttgttttaaatatattgtttaatttagatttgacatgtaatatatataaacagatattattttttacttgtataatctaatattttaattgacacatgttctggtcattttaaaaaccaaactttatataataagataaaaatgataaatcttattctatttataaaatgtatttacattttattaatttataaagaatacaacacatatacattcgttct

SEQ ID NO: 21410 - DNA, 2176 bp, Arabidopsis thaliana landsberg
agaccactgtattagttttgagggaagagcagtttatttcaactgcttgaactccaaagagcaattattttaaggatttgtcaaaaattaacctgagttgtatagtgattccgataacttttcttgtgctgcatcctgcagaggcgactaaaattaatagctttttgaaaattagtatggacaaaaatcatttcttttggtaacacggtctacaatcttgaggaatcttagaaaatcagagatcactaagtagtaaatagggacaaaactacattaagtttccaaacaccaaacttcagaaaagggccaaccaagaacaaaacttctcaaagagaaaaaaaaaactctgctctcatgagttacctgtccaaaatcgaggaagctgtgactgtagagattgtatgagacatttccataggctaacgtacgcgagaactcagaaggcacaagctcagttgacacaaatgtaacctaaacgaatgaataaacagtcatcactcacaattaatctattaccatacaagtaaaggtttatcctaaacctgataaatggcatcatacgcatattttcttatcaataacagatttgacaagagataaaacctgggcagaagccccaccgagttcaacaattcccgttgtttttaaaggttcacctccaagcgaaccgagcgcatgattagcaacaacccaagcatatacaccttcatcagatcctgaaaattttccaagatttctagtaattataacaccaacaatagccaatggatctcatttattttactagcactcaactaagctactatataacaaaaaatgaaactttcatcaaaagtatcattgcaacataaatccacaccactccaatcctatcttttacttccacaatgtagaggtcaatgatcaccctaagattccctagtcttaaacaacaactgaagttccgaaaactaaccagagataacagtagcccattcgtcttgaaacttaaaccctgaagatctaagaactcttctagtaacatcaagaatctgttcttgaacaggcaattcaagcaatctcattccagcagtcgccattaacctaatgtcactcttcttcaacttccccttatgaactcttcccttagcgaattccacaagctccgtcactgactcactcactccctccggattatcagcatacgcagacaatccaggactcaacttcaaactagcgtaattctcctctccgaaatcgaaaaccggtttaccggattcaatccggtacccgaacacatgaactcgggtccccgaactcccaccatcgataatgacgctgtagtgaagtgaacttctccgaagaaaacttgcagagaacataactgaatttgaactgaaaacaaataataaccctaacgtgatagccaaggaagcgacgattagcatggcaatcgattttgtcgcttttttcgacttgggcttagtgagcatgtgcgtggacgaaggtgatgattggttatcaggtagaatctgaaccttgagagcatccatatccgattatttttttccaacctggaacgtatacaaacattgtatcagcatttaagactctctaacgaaaactgagaagataaatttatagcaatagcaataaacgtagtgaaaaaacgtaaaaattatttaaaggaaaaaaaacgtaacgggccaatagcaaattcgttttgcctgctcttcttaattagtctagaatctgattttataatcagtgagaactgagaaataggagtccagaggaagacctataactacaagctctagtctttagacctaaaagagatttcacgtaaccaatcctccagggataagaaactagtgtgtaactggtatttgaaaatctattattttgttgtatacctaaattaatagttaaagaaagtaaaagcacatttacaaaacgtgtgcaaaacagaaggacatgcgaacaaaggatcatatatcatcactcgctgtgggccgatttcttaaacagtaccattcataattgctctgtaatctcagatttcgtgtccataatcaaaatcagaatgaaaacaaaaaaacaaaattgaatttcatgttattatgtaccacctctactttaatttggtctctctctttttcttatgagtaatttttttttaatttgtttccttcct

SEQ ID NO: 21411 - DNA, 710 bp, Arabidopsis thaliana landsberg
gtttatgaatgtcaacatcagatatttttcgagctaccttgcgaatggctaatcacgcaagcacgttcctggaggttgacgttacacgtatatggcctatcctacgttcaagattaaacttcttcaatcctttttttttttttttcaattatctctgttttgaataaaatctactacgtacagttgcgaaaattttagttgaatcttgttcatccagaagtagaaaatagcacatctattggaaagactaaaactgttttcatattttcttatgctaaaaatacaaacatttcgtttggaaaaaaggtcgtagaaattacacgaaatagatctcacagtttaatctcatggcaaaaaaagaaaaagaaggataaacgacaaggaagcaaacaataataaatcaatcaacatcaataaaagcaattactctttcggattcaatgaagaaatcagaatcgggtttttatttaatttttaattttgtataaagtaaatatttagaatattaatctttcacacatttttttacatcaaattgttttacaaataagatttgaccatgacctaaacgatggtagtttaatggtaggtgtaaccttcatttgatggtgtgcgtgcgtttttcataaccgttacatttaattctgttcgtataagagattttaaaatataagctcaaactgtttaagagtgtagtcatgtaatcaaat

SEQ ID NO: 21412 - DNA, 1029 bp, Arabidopsis thaliana landsberg
cgacggcaccctaataatcaatgggaaaattacagtgcctgatcgtaaaggattgcgacaaaattttttgaaggcagcgcatacttctttattgagcattcatccgcgaagtacaaaaatgtacaaggatatagggaagtattaccattggcctggaatgaagagatcattggtgaaattggtaagccaatgtgattcatgccaaagggttaaggtggaacaccaagtgccggcaggtttattacgtaatctaccaattcctacatggaaatgggagtcaatcctatgcattctatcactggattaccaacaagaccatgacgtagcaatgaagatataagggaagcagaagatcgctagaacaagatggatcaaaaggtatcaatgaaaagcacggaacagtcacctaacaaggcagaaaagtatatcgaagaaaacataagactccatggggtcaccagctaagatagtgaccgaacgagaacctaagaactaatctatataaaggcaagacctacagcgtgctttaggaactgacgtacacatgagcacgacatttcatccagaaactgacgggcaaactgaaaagaccatccgaactaaagaagatatgattcggctatgtgcactagaatgggctggtgattgggaagactacatgtctttggttgagttttcttacaataacagctatcactcaacgcatcggtatgtcgccatttgaagcaatgtatggaaggccatgtcgaactcctctttgttggactgaagtaggagagaggatgagttttaataatcggttgatcaatgagattgcggagaaaattcagttcatccgagacaatatgaagaaagctcaagatcgacagaaaaagtatgctgaccgaaagaggcgtgaagtggaattccaagaaggcgacatggtttatcttaaggtaactgcgttaaaagggaaagatcgttttggaaaagttggaaggctcgtagttagatttattggtccatacaaaattgggaacagaatcgggg

SEQ ID NO: 21413 - DNA, 487 bp, Arabidopsis thaliana landsberg
attcttatgcaaatctaacaacctagaggggttaacgaacggaagcaaagcaagaatgcaacaaacaatcagagtaacacgttaaaagcacataaacacacaagcaatacaagcaagacaaaagactcgatataatctagactcgacctatgggccatgtgctccattcctccttacaaaacttcggaagttgagttttcctatatggatccgtcaacccgaccaaccactcgttgaatccacacaggaaaccaacaacatcatgacttattgaacccacccaggataccaataagcccaaatgcatcgtcatgcactctcggcctaggttccgagactacccgacgagtgttcccttaggaccaagactcgcatgcttccccacacacatgcaagaactggcagcaccctaaactagactctctatgatactcggattccgcatcaagatcactataccaaatagtgcacatctctcatccgacat

SEQ ID NO: 21414 - DNA, 619 bp, Arabidopsis thaliana landsberg
ctggcccgacattatccgaccctttgcttgatgaatgtacatttctagcattcttcctcctgtgttccattggctcatgagacaagtgccttgcgggaacttgaggaacggtgtggtccctctgttaataggtggatttccttttgttgggcaatgtcgtggcagctggatggcatgtcttcaggcgggttgtcattgaagtcctgtcgggcgttgtcacttctccttgcgattgagtggtttaggcaattccactaggagaccactcaatcataccacttccatgttgcgatcgagtagtttgacattgtcgttgagaaagatgttgtccgaaaaccactagatcgcactctcgagcttttactctcatcttgctatcgagtcattcatcaaaaaattgaaattttttatttgaacactcggttgcatccctgctgttgctctagctgttattcatttcctgagaatcaaagccaaaaccaaaacaaatcaaaagtaacaaaataaattaaaactatatacagggataggcatgggacttcctcccaagtgagctttttttaagtctctagcttgactcctcacactcattaggctcaaggagggtgatagagtagaa

SEQ ID NO: 21415 - DNA, 367 bp, Arabidopsis thaliana landsberg
catatctggacttcaattccgaaaaagatctatgggactcaggaatattggatcgcctttaacggcggaacttcagcaatcctattcgcgattcaacacgccatcgaccttgggctgcatcatcttcaactcacttcagattcatctatactaatcaaagcgcttcattcggagattctctcgaaagaactccacgggattcatcatgatatccttcatctatttgttaatttagatgaactttgctttaatttcattctcagagcttcgaccaaggcatcagatctgcttgctaaagagtctctccgcttagtaatgtcttcatattgattattgaaaaaagagtgtttgccaaatatgtatatat

SEQ ID NO: 21416 - DNA, 797 bp, Arabidopsis thaliana landsberg
  unsure (1)..(797): unsure at all n locations
atcccctgcttgagtatgaatcaagactattctgaaaatgtattttgattacctttggtggcccagggctttggtggcccaatgagagaggttagggtcgatgcgccgcagagccagcaggatgcnnnnnnnnnnnnnnnnnnnnngtgtgcaggtcccacggggcgggttgctacaagaataaattgttggtaagaatttgatgacatttaaattagcatttaaaactaaaatcgttttaaaatcaaataattttaggtatggttagttaggattgatttccgaatttggctaattaggaaatagtcattcattaattccgtagagttttagggattgatttgtgcaatttattagggtagtagttaacaatatctgagtttatgcaagtagttagtgcaatatcttaattgttaatcaaaaatttggtcattgtcctaaagaatatatcttgtctgattgattttgtagggactaaacatacaatatcgaaattaaaaaaggatttttcgacacaaattgtccccaaaaatgtatatgtagatttagaactaaaaacttacaattagtttaattgcattgattacttgaattaactccaataacacttgaatcgcataactccaacgacacaaagtttttatagacagtttccatactcaacgatctgcattcatgtcaattaaaattctcaattcaaatatatgataaatatcaatcggcatatacaacttgtcctatataaacaaattatcatcacacaatatcacattcataatagtcaatatatttaagca

SEQ ID NO: 21417 - DNA, 440 bp, Arabidopsis thaliana landsberg
  unsure (1)..(440): unsure at all n locations
caccgtttcggtgttcgtggacaaagggaccttgggcggaatgactactggttcaggagttttcaccgatgtggcagctattttgggttccatgggttcgctaggacctgaagcgaacattttgaatcagaaaaaaagacaagtataatttatttcaaattgatgttaaggtttcaagcatcgaaacttactagcccagtctaaaccttattcactcaaaggaggcgattcggtaaagaactcctcaaattgttgggggttgaaggatgaagaaggaagagcagctnnnnnnnnnnnnnnnnnnnnnnnnnnnnnnnnnnnnnnngacctctcttgttcttcggagagatcttcacactacaaaaaaattgccatttaccgacttcagttactacaaaaaaattggcatttaccgacttcagtaattctccgttaaacag

SEQ ID NO: 21418 - DNA, 2014 bp, Arabidopsis thaliana landsberg
tctctctcgctatttagtgaccaaagactcaatgaaaagaagaacaaggttgcttagagacagagttagggttttgctcaagaactatgaagataactaggattttctttattaaatttcggatccctagaatagaggacaaacccctctttttatacattattaagacggttaaaagatatgttaaacttccacttcttcgaggcttgaatcttctaatttcctttatctccgaagacttgctattttcaaaggagaaaacttctatttcttcgaattaggaagtcgactagacgatctccctacttcgggctaaagtcggcaaatgacctccttattttggcccattaacaggctaaaccgggataccccggtttgaatgaaatctcagtctaattcgtagtttctctggtttaagccggtattgtcggaggtgctaattccggcaccaacaattagtcccccccagttcgggaaaatccaaatgctaaactcgagtttttccgaattaaaagaagtgaatattcggcttatactttaggaagatgcgaattaaaatttgatccgttgaacctccaagatacgtcagtttagcttggcacgcgtcgacgatataaaacaaggctaagcttgtgagttaggtagtctgatggacctcatgagttgttgaggagctgtgggatgctctcctagatgatctgaatgcctaacagagaaatgacctgactgatgagccgagcagtgagataggttaccaaatgatcttgctaacaagctgcaaggcaagctatcagatgatctgatgagcgatctaggatataggttgctagatggtttgtcttgcgatctgcgagatagccgggcagatgagctaaaaaaaacataagttgcgatgagctgcaaacatgccattatcatttggttagcaagatacgtgagcttttgagctctttttttctttaaggtgcgaggaactctcggcttatcctgttttgaagacttaaagcaagacgaggtcttggtttttgtgaaacattttcacataatagcaagcgtcgagctcggctcaatttataagtgtgactgcgagcgttgagctcggattaactgcaagaattatttttatcttttgaatgtagctcgatgctaggtgaactaagctttttgagtcgggactcaatttagagcttgacttcaacaatcaaaaaatgtaaagcacgaatacttaatcttgatgggagaagaaatggcgagaggctgagctcagaattgctgttccaaaggtaaagttgcattgttcgtctatgaagagtcgttcttatcaactagtgattaccttgcagcagagagaaatactgtgataactctttgtcgaattcgacgttaaggtgtaggttggtctttctagaaagctgagcctcggggcttcgaattgatatgctgatcgccatgtaaattatgttgaattgctcacgaaggtggatgttttcaagtggtgtcaatctgaatcgtcttggaaaaaaatcataactttcaaatcataacctcaaatcgtgatccgctttcttttttgatttgtgtgactatagctgattataccagcaaatatcgtaactttttgagttgttttgatgctccattggtgatcagaatcatgatgacgaaagtaaaagtcattttgtgccgcttcaaaacttttagcgaaggaaggggagacgcgatgatgctcaagttgagatctggaattttggagtcttagtaaccttctttggagctccccatgttattgacttgacttgttggagaaggaatagtagaaaagatgatttttccttggtgctacgagatattactcgtgttgggtgtagttatcccaactctgaaatgttaactcgtaacaagcagatagctctgttaacgagctgcgacctaagaaagatgctaatgggctattaacttagaaagttgtagatcagcggctagctatgaagaccgtcgatgagctatgaagact

SEQ ID NO: 21419 - DNA, 522 bp, Arabidopsis thaliana landsberg
catattatcccctatgcaaatgacaatcctaaatgctacactttatatacaatcctaaaatgatatgcaatctgatgacactctttttttagtgaaataattttctgaaaatttttcaaattcaaatttaaatggtttttatatgacttagatgatgcaaaatttgaaataagaaaagagaacacaatgttaaacatgtcttgaaccctcccccaaacttaaattacacagtcccttgtgtaataaaaatctgaaagagaattcaagaccaaagcacaaaacacacaaagaaaaataaaaagatgctatggtatatataatggagaggtggtgttacctcagttttcttaggtgggtttttgctcgttgatgccatggtaagcatcccaattcattcccgagtattgcccatcttgatcccactgattttgctcgacgctctgctcgttctgaacccacggatcctgctcgacactctgctcgatatcacgtcaagtatcttggtcgagtgatcttttgctg

SEQ ID NO: 21420 - DNA, 553 bp, Arabidopsis thaliana landsberg
  unsure (1)..(553): unsure at all n locations
ccnnnnnnnnnnnnnnnnnacaagttcttttagttcacaatgcgtcctaacttcaactttggttggctagaaatacattgctcaattcacattcttccaggcattctatcgaacacttgtgatgcatagaaaaacctaagttctaaaacagggtgatcaatcctattctagcattaagaacatgtgaatcaaagaacctagagaataagaattccaattcccaattattccattattctattgaaactcctaattagaaccctaacacctaattggtggattactcacacattgcaataaaaatgaaacaaagagatattaaagaaaacattattgaaattgaataaatgagaatagggtttagaaatcttctccaaattgtcaagaaggaatgaatctctaatcccgaaggtgcttacagaaaggttcttagaaatgttgtagaaaaaagaagcgtaaaagaaaccgtaggttcctcgggttttaatacccaaatacaataaaaacaggataactcggttaagggaaatcgggtttggtcgcgagaagtttg

SEQ ID NO: 21421 - DNA, 268 bp, Arabidopsis thaliana landsberg
ctgctggtcttcctgcagaaccaaatgccatactgctgtcgcttgttttgggtccataaaccgtcgatgttatcacggaagcgtttaccgcgccaggctgatacatgccggtaagcaacaacatatgaaagcctccttcgagttctgacttttgccctgacaaggttagagctggctgcaccaaatctgtggcccaatccggagaatcatcctgggacgcttgccatcctggaccagactatgaaccagaaccgtttgcgtgtggacc

SEQ ID NO: 21422 - DNA, 567 bp, Arabidopsis thaliana landsberg
  unsure (1)..(567): unsure at all n locations
tcatctctctccttcttgtgtatgcatagcttcactgccttgactgctctatctgtaggttctctcgaaccatcttgatgttctcttcagcttcgagcagaatgtctggcccaaacacttgcttttcnnnnnnnnnnnnnnnnnnnnnnnnnnnnnnnnnnnnnnttccataaagcgcatgaaatggtgacatcttcaagctggcctggtaactgttgttataggagaactctgcataaggtaatctcttgtcccatccagactgatcttgcaacgcgcaggctctcaacatgtcttcgaggatttgattagttctttcggtctgaccgtctgtttgtggatgataagctgaactgaaattcagatgtgtacccaaagnnnnnnnnnnnnnnnnnnnnnnatgagaggtgaactgcgttcctctgnnnnnnnnnnnnnnnnnnnnnnnnnnnnnnnnnnnnnnnnnnnnnnnnnnnnnnnnnnnnnnnnnnnnnnnnnnnnnnnnnnnnnnnnnnnnnnnnnnnnnnnnnnnnnnnnnnnnnnnnnnnnnnnnnnnnnnnnaatgga

SEQ ID NO: 21423 - DNA, 1952 bp, Arabidopsis thaliana landsberg
  unsure (1)..(1952): unsure at all n locations
ctgatcttatatcaccgtgatggtatagtaccgtgatcgtatatcaccgtgatcatatatttattaaatcaaatagttaaaaaaaaactaatatatatatagattgttcgtaaattctaagaaattttagaccatatgatttgcatgagagtaattacctttttttttatcaaaaattagtaatcatttattgatattgtcaaaaaatttaagtgttttaacctcgatttgactctaccagtccaaccaacttttaaataaactcgatcgtttgacattactgtcatcgtatatgaaacattattctaataattgttataagaataccggagttaaactagattgattatcaccgagattttatatttgtcaagatatatagatggtccatcaaaaggattggtgcttccaaaaccttcgatgtcacctcctgaaaaaagccatcgcttggacgatgatgctccgtttatatgcccttgtagcaaatagtttggccctcaagaaagcattcttaaatgcttgttttgcttctttgaaccagtttattttcccaaaattctgtctagtgaacagcatgaatggtcaagacttgtcgcttatgcaaagttctacctcccggctaatggctccctctgcctatttagtagagtttgtaacctttggggttattatggatgaggtcaagcaagaagcagtgaagattgtaagtgtttgtcgatctctgatgtattctttctttgatttgtatcttatctatctctcgtttaaccatcttttgatgatctttttggcatttgtttctattttttctttgcattttcgttgttctggatatatttttttgttttgtattaaaagttgtgactctttaatttaatgaaaattagatgtttgcccgaaaaaatatagatggtccatatattaactatattctaaaacattttaaacaatacaatttacttgagaataattattctctctaatcaaaaattgacaatccttaatattactagtccagtccagtcaactttaatatgaaaatattattaaaattaaaaaaatgctgcttagtaaactcttacattgaacaagataataagattttatcaattttgtgttgacgttacggttccaccgatttgatcttcaccttgggtaaaccaaaacatttcggttaattttggttcagtttataaactcatatatcttttgtagttaaaacaaatatggatataacataaatatgacaaaaaaaaatttgttgaccaagtaaaatggaaagtaaatataaattttagaagcttttttttcttttctttaaatagccataaacatatgtctgtcaatgtattgtcactctccactgttaatctcttaaaccattcacccacagaaagaaactaaataagtatgaggatttaggaatagattctttttcattcacaccgatttaggtatatatatttcaatttctttgtttcgagtgtaataataccgtattggaaactacatacatgaacaatatcatattttataagggggacttagaccttaatggatacaactatagtccgtgaaatttgtataatcggacctttgcgatgataaatctctgtgggatagtttatatgcctagttaaagtaacatccaattatgtaagttttcataacaattttgttttgttattgtatgttcattatgtacattttgattttttctgttatttgtatttttttgtaatttttatcaaaacttcgaaaatggtataatatcttcgcattttactcttttaaaaagctatcatattgtgtgagccaaaattttgtttaaattcattgattgtgggggagaagctatagattcaaattttgccgcaccctcaggttttacgtattctacatcaaatntagctaagcgtttttaattacatgtaggtaggatatatgcagca

SEQ ID NO: 21424 - DNA, 805 bp, Arabidopsis thaliana landsberg
gcctgcaggtcgactctagaggatccccagcatgcatgctgctccattgctctggtgcttagagacacccacatgtcagtgatgaagaaaataagcgggcctgtttttgccggatctgacgttgctgaagcagtcgactcgatgtttattttgtgcagttccgtactttcctgttaatcatgacgcacggacggtgcagctcttcagtcaagcctagtgtaccagtcacaccgtcccattctccgcgaatttttactactgctcccaatcccaaaaatcttccacttctacaaatcttccacttctacacgcggttcaagtcaacttatttaaatctacctaatttatcaaaaaagaaatataattttagataggtatatcatgaaaatagatttcacaataaacctaataacatttatatgataccataaatatttatatataaaatagaaaactagacgaccattgtttcactcttttttattaagggatcaacgatgtcggagagtaaatcctcggccgggtggcggagtgcacccgccctaaatcctgagatgaggaggggcttaggcgttttgcttgatcgttggaatgaacgggaagaactcaagaacacacaaggatttagagtggttcgggccgccagagcgtaataccctactccactgtgagatgtattgctcgtgagcttgcgagtctaaggtgtgtcctaagattgcgtgtgtgtgtgtgtaacgtcgcatgcctccccttttatagctgaagggggcatgcacaaagggactgggccccgacatgtgggccc

SEQ ID NO: 21425 - DNA, 878 bp, Arabidopsis thaliana landsberg
tgatgtaccaaatgcataaagtattaagctttttcttgcaaaatttatttatttttgaatttaatattttatttacggttttaatttttaattatatttaatttttctaatattatgaattcatcataataatatattatatttttatttcttttaatagtaatatattatatatattttgatttatttttgtttaattactatcacatccgctggtttaccagtcataaaactcccgcaaacgcacctattatcaaacgttcaaccagtcgttcaaaacgcttgataacgcttgaaactgcaaccgccagtttctgcaaacttccgcaaccataaccgcacccgctgcgtttcaacccgtcagccctaaaagagttaatcactaggccgttaatccctatccgtaataccaaacactagagggatagaatagtaaatcgcatcgtgaccggtcataaaaagacacgtgtcgtcatcgctatccaaataattgacaaactcgaagccgccaagggattgccgaagacacatgtcagtcagcgaaaggaggttaaacggtgtagttatcactccctaataagggtatctacgtaattgcaatgtcgttaagatctatataaacactactcttttgctagctcttatccgacggcaaaaggagaattaagatttttaactttaaacgagagtttcgtttatttactcaaaaatttacttctgaaatctctatttgaatttcggggaaaaaaatcctaagtaagggaatgcagagagatggtcggagtatcgccggtgaagactaagctgtgtgatcggttaaccgatccgtcggcggcaggaattgcaccggaaacacgtcgaggacgggtgatccagtt

SEQ ID NO: 21426 - DNA, 382 bp, Arabidopsis thaliana landsberg
cttaaaaggtgtacagagggtcatgggatgcctcgcggccctgagccgttcatctcacgcctcggcgaaagtggtctgcctctgtaccgcctcttaaggaaggccgagtgtttcgcttggacccctgaggccgaggaagcctcggaacctgaaggcgctccttatgaaggcgcctgtcttggtgcccccggcggatggagaagccctcttggtctacgtcgccgcgaccactcaggtggttagcgccacgattgtggtcgagaggccagaggaagggcatgcattgcccgttcagaggccggtctacttcgtcagcgaagtgctgtccgagaccaagatccgctacccacaagttcaaaagctgctatatgctgtgatcctg

SEQ ID NO: 21427 - DNA, 933 bp, Arabidopsis thaliana landsberg
ggatgtgctcaaaaccgcgcacgagggagacgagctcacaaagatcaccaagcgggaaacgatcgagggggagctcggtcggttccggcttcgcaaaggggaggagccacaacacatgtacaaccggctcaagaccttggtgaaccaagtgcgcaacctcgggagcataaagtgggacgaccacgagatggttaaggttattctaagatcacttattttccttaaccctactcaagttcaattaattcgtggtaatcctagatatactaaaatgacccccgaggaagttatcgggcattttgtaagttttgagtgcatgatcgaaggctcgaggaagatcaacgagcttgatgatccatctacatctgaagctcaacccgtcgcattcaaggtgacggaagacaagaaggaggagtctacaccaagtcgtcaaccaatagacgcctccaaactcgacaatgaggaaatggcgctcgtcatcaaaagcttccgccaaatcctcaagcaaaggagagggaaagactacaagccccgctccaagaaggtttggtacaagtgtggtaagcccagtcattttattgcaaaatgtccattatcaagtgatagtgacaggggcgacgacaagaagggaaacagaagagaaaagaagaggtactacaagaagggcgacgatgcccatgtttgccgggagtgggattccgacgagagctccaccgactcctcctccgacgtggacgccaccaacatcgtcctcaccaaaggccttctcttccccaacgtcagccacaagtgcctcatggcaaaggacgacaaaaggaagaaggtaaaatcaaaatcctccactaagtatgcaacttctagtgatgaggataattctagtgatgatgaggataacttgcttactctttttgccaacttaaacatgcaacaaaa

SEQ ID NO: 21428 - DNA, 555 bp, Arabidopsis thaliana landsberg
ctcagttcagatatggtccttcttaatggacaacctaaaggacttataataccagaacggggattaagacatgtagatccactttctccttacttattcatactctgcacagagttgctaatagcgaacatccggaaagctgagctaggaaaattgatcacgggtatcaaagtagcaacaacaagcccttcagtttctcacttgttatttgcggatgatattcttttcttttgtaaagctgataaagagcaatgcggagtaattttgggtattctaaaacaatatgaagcggtatcaggacaaatgataaattttgcaaaatcatcgattcagttcgggcataaagtagacaaagctattaaggcagaaataaaatcgacattgggtatacataatatcggaggcatgggttcctatctcgggctactagagagtttagggggatctaagacaaagatcttttcctttgttagagatcaattacagactcgaataaatgggtggtcggctaaattcctatcgaaaggaggaaaagaaagtgatgataaatcggga

SEQ ID NO: 21429 - DNA, 2043 bp, Arabidopsis thaliana landsberg
  unsure (1)..(2043): unsure at all n locations
aaatatatatgtgtgaaatcaagaaataacttttattaacaccaaaaaagagaatgccctaagaagttaattacttgatgaaataatattgatatatataaaatgatttctagatgatcaataagttacttttaattaccagtggatggttacattgtaagttgacttgttaatgacatgaacgacaagggtgtcgccttctctaacgtttatcgttggaccgggaagacttccattaactatcggtatcatttgctccttgcacaacggtgtcaccacgacgtctttaacctgtttcttagacgtcgttattagtattatataaaatagttttttggcaattaattttttagtggtaataaaagttaaaaattaaaaaaatagtattttgtttaatataggttccactgtaagaaaagtaatcggtaactttttaaaattttatttatagtttatagagcaaagaaaagaaaaggagaaataagagtaaatacgtggagaacatgttcgacaatagctgctgaggcaatggaagagaacagaagaaggacgaggaaggcttgatttgacagagaatgatgaactcgaggcattgttgatgtcaggatatgataatttcctctacttgttgatttcgtcagagactcgtacgcgtatttgtagagatgtggcaaagttttgatgaagtttgcaaaacttttatattataataaaaatattaaattattaatcagccagatatggcaatctcaaacgcgtttgcacacgttgacaaaaaaaatatcttttttctgtcaattgaaatattaaatgaattgtgttgagatgtcgttaacctctacaacacctcaagttttatgctttgtgattaacaccaactctttttaataaaacagagaaaagaacagagactttaagataagagagaacacataacatttgttaccccagttcacatcaatagatactatgtctgggccaagtcacagctggggatccattagaataagtaagttacaagacataatccctcagagaaagagtctcacacttgagatctcttctccgtatcccctctgttacactctcaagagaaacataaaagtttacactttttagtggctatttctttctctagcttactttctacattgtatctctctcttttttactcccctcttagctgcgctcacaacatnnnnnnnnnnnnnnnnnnnnnnnnnnnnnnnnnnnnnnnaattcacatcgagacaaattgtctttctttggccagtttcttgtgcttccaaaagatgtttaacttaacaagagatgaattacatttaactctagttaacatctcttgtttacttgaacataaggttctcatctttacaaattggatcgtaaagaaaagttatttacaaatgcaaccataatttcaagcaagaaccttgaaccatatcgttggaggagagctgcaagtttcggtatagtaaaaataacccgattacgtacggactgtcttggtgtcaatggtacagactagatgactagaatcattttggtgtctcggtctcctattgttgttttgaatataatgctaatctagtgagtataaaggtaataatgtcgaatttgctgaagccccaagtaaatcgccactaacctccaaccagaccgtgtatacatacataagagcatgtaaagaacatataatcacgatcgagtttcgtcaggttcaccatataataaacaaggttgaaattgaatacaaccccaaccacgtattctagcaaactttcctattggattataaaatatctgatgttcctcttttagtctcctattttagattctatttatgttgcttggcaaagtcgtaaagtcgagatctcgtattacaatgtcaatatatatttttctttattatgtcacatgttaaaactagtattagtactactacctccattttatgcattgtatgactttattttttgttttgtgaaaaacatactttttgtaatttaatacggaattttcaaaaaattttaatactctttc

SEQ ID NO: 21430 - DNA, 635 bp, Arabidopsis thaliana landsberg
tgcactctagactcatcccgataataaacccgagcaattttcctgctaatactccaaagacacacttttcaggattaagcttccatcgatatcgccacagactgttgaagaccagctgtaaatcttcaatgaaattttctgagttttctgtcttgatcaccaggtcatccacataagcttccacacgcttgccccagtggtcagctaagcatgtctgaatgactctctggtaagtcgctccagcatttttgaggccaagcgacatggaggtatagcagaaagccccgaacggggtgatgaatgttgttttttcgtcgtcttcttttgccaagctgatctgatgatacccggaatagcaatctaagaaagacaacacagaacacccggcggtcgagtctaccacctggtctattctgggaagtccgaagggatccttcagacattgtttgttgagatcgtatagtcgacgcacatgcgccaatccactttattctttttgagtacaagaacatgatttgctaccactcgggatgtacacttctctaatgaatcctacgcgacaagcgagcagctctgacggatggctctctcttacgggcgtgaacgacatatttttgtcaatcacctgctggggg

SEQ ID NO: 21431 - DNA, 719 bp, Arabidopsis thaliana landsberg
caagtattgttctgtggtcataactagagttaggcacttattttttttacagaaatcctcgcatgtgtttcgtggactaacgaaaatgtactatgccaagaagttagttaaactatcatccttatttccatgatacttccctgcagcatttgagagtgacaacattggtcggagaaaaaagcttagtgacttaccaattcgtttagcgattaccaaattgctatcagtgacgtatagctagcttctttacacccttataaccactattactggtttgcaggtacttgaatgacaactccgaatacattggagaaggggtgaaactttcacagttctcgtttcaaatcccgaaaccgctgcaggatgactacgtgaggaagcgcccagctcgactactggattccatcgataatacaaacacccctgcagctaaagaaggtgtgctgcttatcaaggcacataaatataactgtggatatcttttgtatcaaggctttagattattgatgtcatcacatcagtcaagagtgtctatgacgtatactccaaccggacattggtgtctttagggaactttattaacatgaacacgtctctgcttttacaagtgtctaacatctcgctaggcttgtgatcctccagctaatgcactggcatggatatctccagatgatcatatatcgcctgagctaggtaccccaaccccgtctggacttaac

SEQ ID NO: 21432 - DNA, 994 bp, Arabidopsis thaliana landsberg
ttcgtcactgcatttcaacaacaagaaccactataagggtgaaacgaatgaaactccaaagttgatacatgaggatctaaaggcgagtggtccaccaatcatacacatagtcaatagttgttttctggagaacaaatggactctcactgccaatatagaggatgcttccagagaagtcatgttttctgaatcaagaattggcaagtttgagagatgttctgctgaaagtctcacttatgaagtgttccatatccagaggccaccagagctgttagtagcagagagatggttctgttcctttcaccacctttaggacaaggtgattcttcatcgggggagtattgataggttatggattcccattacctttataaagaagaagaagaagctggtgtgagactaagtgtcgaagaatgagacaagggagaaagactcttattgtaagagagggtcttagctactatctttattttagaactatgtcgctttaggcttgtgggtgtatttaagcactgcttccgcattattagggtttttatcttatgaagatcaatcaaataaactttctaaaatctctcttatctctcttcttctccaccttaaaggtgcaatacttctctccctccatttctttctgttcttttcatatcagataagctccagggcttatcagttgctttcgccggaggtagccatcaaagtagtcggaatctgagtttgattttgacatcgaaaggcaagctccatcttctccatgtcgagaacaagagagctcggtggggaaaggaggagacgatggctgacggggaaaaagtcgtatgttcgccggaggtcgttggagtccggcagtggtgttggtttcacgagatgagaaagagatgacgttggttgtcggagatgtcgatgtcgtcgaggaagtgtgttgttgtcaaaaggtggagattgttattgggtttgccaaaacacacaacattgggcttttattgggccagac

SEQ ID NO: 21433 - DNA, 601 bp, Arabidopsis thaliana landsberg
  unsure (1)..(601): unsure at all n locations
tcgagcgatgataagtcagccattacattggtttttgttataattaacataataatagattcatacggacataattctggttatcaatcctaaagtgtcaatatttagtacaatcacatgctaaaaatcctaaaacacacagacatgttcgaaaaagcaaatcatgtctcataaaaccgagtgggcattctgttaggtacttcatcgtagatctctgttgccatcctaactcgtagcccctggatatttgaatcaataatgccttcaaaagaaacaccaagcaataaacattcaagaatctttaacgtgtaaacgccgcagtccccggtgatagtattctgcgggacctttttaaggtgccnnnnnnnnnnnnnnnnnnnnnnntattgcaggacacggacttcgggagggataatttcgctcatgaactgtggaatcatcctcgtgaacggcctacagtgttccaggattttccatcgctttccggtgtatgacatccgcgatgcagtcatagcagtccatgtgcccctaggcaagtcacgtgaatggtccccaatgattacctcggtttgaggatagtaccaagtgatcacatctgtta

SEQ ID NO: 21434 - DNA, 571 bp, Arabidopsis thaliana landsberg
  unsure (1)..(571): unsure at all n locations
aatccttatatcgggcaaacaaggtcgatcaaactcgtgaagggatgggacacgtgctgttactctttcttttgcttggagaagaagaaaaaatcttgtcgtagccacaaaatcttgaggtttttagatgatgacacactttacaacggaagagacaactttagattgtatgaaatctagattttgagatactaaaaatttcatttttattttgttctgcaaccattgaaactagacaccgaaaaggtgtcttggagcaagttcttgaaagtgaatacgggacctgaagtttcattagtatttgagagtttcatcattgacgaagagaagaaagtcgtcatggttagtgagggttttaaacaccgaatatcttacattcttggagannnnnnnnnnnnnnnnnnnnnnnnnnnnnnnnnnnnnnnnnnnnnnnnnnnnnnnnnnnnnnnnnnnnnnnnnnnnnnnnnnnntttagtgtaactcaagcaaccagcaggaggcaaaaggatactacatagcagagcgctgagacttgtcgcacttgataagcgaatcaataagtaatctacat

SEQ ID NO: 21435 - DNA, 567 bp, Arabidopsis thaliana landsberg
ttcttcaatgaacacagacaatccaaaatcagtagctttaagcatagcattttcatttgtactagcgagcagaaaattctcaggcttgagatcacgatgaatcactcccatgaaatgacaaatctgaacaacattcaaaaccgatctaataacaccagcagctgctttctcagagtaatgtccttgagctataatcctatcgaacaattcactaccaccacacaactccatcaccaaatgtatcgattgtctatcttcataagcacctttgatctcaacaatgttctcttgtccagacaaatactgcattatctgaatctctctcttcacatcatctatgtcttgctttctcgatagtttcctcttgagtattgatttgcaagcgtatgtgttgccctgtgaattctctctgcagtgtatgttataccaaattggccttgacctaattctttacctaacgtgtaaagtttcccttatttcttcaaagggtttgcctagaattgtctttgttgctctaaaaacgattggtttcaatggttgtgttagaacctgttttttttcgattgc

SEQ ID NO: 21436 - DNA, 558 bp, Arabidopsis thaliana landsberg
ttataaaataaatatcttgaaactatacaagtttctttgagatttggagaacctcatcatcgattattacgaatctgatgcattgggaagtcgagagactagctcacctagatcttcccattatttatgcactctctaaacatatatcgacaagtgtttcatatattctcataagagaactatattattaattttaaaaatatatcttaatgtttttaaatattatgtaacacatatttattctttatgaataaaataaataaaataagcatataaattaataataataatttatggactatagcctttttataaaagaattcaggaggcatcaccttctatataagaatttaataggtatagcttttgtttgatcgtatagaaggaggaatagcctaccatatacaacgatcaattccgaaaaaagcgtaacctttcatttgatcgttaaggaaacatagcctaccatatatataacgatcaattccagaaaagacatagcttttttattttatttgattgtgaatgaggcagaccctactacttatatcgatcaat

SEQ ID NO: 21437 - DNA, 1158 bp, Arabidopsis thaliana landsberg
ttacaccatgcccaatcagcatctgaataacctattaaattaaaagtggatcccttggggtaccaaagtccaaacttaggtgtataaactaaatatctcatgatccttttcacggccctaacgtgaacttccttaggatcggcttggaaccttgcacacatgcatacgaaaagcataatatccgatcgagatgcacataaatagagtaaagaccctatcatggaccggtataccttttgatcgacggatttaccttccgtgtcgaggtcgagatgcccattggttcccatgggtgtcttgatgggtttggcatccttcatcccaaacttgcttagaatatctttagtatacttcgtttggcttgtgaaggtgccctcttggagttgcttcactttgaaatcctaagaaatacttcaactcccccatcattgacatctcgaatttttgtgtcatgatcctactaaactcttcacatgtagattcgttagtagacccaaatatgatatcatcaacataaatttggcatacaaacaaattattttcaagagttttggtaaagagtgtaggatcggcctttccgactttgaagccattatctataaggaaatctctaaggcattcataccatgctcttggggcttgcttgagcccataaagcgccttagagagtttataaacatggtcgagtacctgtcatcctcaaagctagggggtgttccacgtacacctcttccttgattggcccgttgaggaaagtgctcttcacatccatttgaaacaacctgaaagagtggtgagtgacataggctaataatattctaatagactcgagcctagccacaggagcaaaagtctcctcgaaatccaaacctgcgacttgggcataaccttttgccacaagtcgagccttgtttcttgtcaccactccgtgctcgtcttgcttgttgcggaacacccacttggttccacaacgttttgctttggacgtggcaccaggctccaaacttcattcctcttgaagttgttgagctcttcctgcatggccaacacctagtccggatcttgcaaggcctcttctaccctgaaaggctcaatagaagagacaaacgagtaatgctcacaaaaattagctaatcttgagcgagtagttactccctt

SEQ ID NO: 21438 - DNA, 1257 bp, Arabidopsis thaliana landsberg
  unsure (1)..(1257): unsure at all n locations
cacaaattcctaattgcggattccgacatccacaatttagcttttgtaggagggcatttaaatcttttacttcagaggttgggttaaatcatcatgagcactgacgacaaccaaagttccggcgaccaagcctccacccttnnnnnnnnnnnnnnnnnnnnnnnnnnnnnnnnnnnnnnnaccgagcgacagcagaccgcagtaacttctttatctgataagttcgtttcttttcaggagcagtgcggcgggcagctcgcagcgctcaccgccagtcattctgaaatcatgacagctcacaacgcatacacggatcgagttgactttctgtccgccggagtatcgcgcaccgctgagttcgagcacgcctcgattttcaaggaggcattagtccaagcatccaaacttcgcaggcgggggcaaatcagcagactccgtcacctcagttgcctcgcgtctctccaatggaaattagaaccacctcgaaccaaaaccaggttgttctgactaccccggcaaatcccgacattcatgtggatggagttgccgcccggactccatcattgtttcgaggggagccctctctcaagcacccgacctcagaatcccctaggatccggatgttgtcagcaatgagcttcagattctcaaagaccaaatttgggccatgaatacaaaggttcatcgacctaccaccgcggcccccgacgttgatagagtaattgaaacaacccgcaggactctgttcactccaaggatctcgagacttcgcattcgtgacttccgagattttaagctccccagctacaacgacaagggagatactaaggagcactttacctcttttcaggttattgccggacgggtacctctcgagccgcatgaagaagacgctggactgtgcaagctcttttcagaaaacttgtcaggaccagctctcacctggtttacctagttagaagaagtttcaatcgacaacttcaaacagctctccaccgctttcattaaacaatatggatacttcatcaaaaatgacgtcagtgaggcccagctttggaacctctctcagtctgctgacgagccacttcggacatacatcactgcgttcaaggaaattatggtccaagtgcctaatctatccgactcagccgctcagtccgccttaaaaaatggattccggcatgaatcgcgttttcgcaagagaagttaacaataaaccgacctgaaacaattcaagatgctctccatcgagcttcg

SEQ ID NO: 21439 - DNA, 509 bp, Arabidopsis thaliana landsberg
gagagttgtggaggacattgtttcgctgcctccaacggtcgctcaccacgagattagctaccacttggggagaggtgagtaggagctgctgacgaagaaagccttgtccaagagagaagctcctaccatgagcagaacagccgctgacgagggcagagcctgaggaaaaccagcctccaaacctgagaagagaaatcacaaagcagcagaagatggttccttgtctcggtgtcaacagagcaaaggcaacattcagcagagttgataaggccccaagaaagcagcctgtgaagggtagggagacggttaaggctagtatccacatggtaaaagcgtgtttaggaacagcgcctttgaacctgatagactttgtccaacccttcaaagaactcctaggcctgaaaccctcccaggttgcggcgactgagaagccctgactagcgtctccattgatactccaaaagtaacagtcactgtccagatgaggcagaggagcagggagcgaagag

SEQ ID NO: 21440 - DNA, 578 bp, Arabidopsis thaliana landsberg
aaatcgaaagaagaattatatttatgtttaaattaggtagaaattttttattaaattagttaagataaataagaaatatggttagtttagagatattgtttatattaaatttggtaattaaatcattaattttcgtttttaattattagtttttaggtaacttttccaaaaattaatgttatccaagatcagaacagaattaaacatgttatctaggatccgaacagagttaaaccgggtaaaacccacccatttgaattaattgttgaattatgactcaaatcttcaacattatcttcaaaaatctcctccaaaaatatatatatagataatacattttcttaaaccatggaaattttaggattttttgatccataattttttagtatccgaagcgaacctttattctattcatatttaaagactgtcactctgtcacaaagaaaaataacccttgtaatctcactaggcaattacgattcctttgtgtagagtaagttgcttttatgtttttggtatatgtgaaaatcaggttatttatggttttctaggccaaaatttgaagaattttatctctg

SEQ ID NO: 21441 - DNA, 2630 bp, Arabidopsis thaliana landsberg
cgaagattctattcattgtatagagtctccatgataccaaaactaaaaattaaagtggtggatcttgaggaacttggctctgaaagtagctaatgcaacattattttttcacctacaagcaaattcaaagaaaatttacacaagagattattttacttgcatttatgagagattacgtaaccacaatggtatgtatatacgcacctgaacatctatcttaacgtcacggagaagctgtgcagcaactgtaccataccttgtcatctcccattcacttagctttccatcccgtagtctcatcaacaaactatcttcattaagacgaggaccatgtgtaacaacagcttcctcttccaccctcttatggcattctccggttgggactttcgtctcacactttggttcgtctgtgtctataacaacttcatctcggcttacgtttccagagctctcggcaggagatttctgtgccatgatgtacagatgaatgctcgggtcttggtattcaccatccatctgcagattgcgttccagaataagcggttgtatatttcatgaaacttaaacagtaactgtgccatcaacgtaccttggatctcgagtatggttttgacttcaaagttgtctttccacatctgaagcattttctcatgaacaaccgtcgaacgtatctcatatcccaactataaaacaacaacaacgaatgatcttgtagttccaatgatatcttaaaagcaaatatcccaagtatcttaattcataccataactgttgtctttggccctgataatgcaagtatcgtacgcaatagcggttccagaagctgctcagaatataccttaaaaccaaatttaaggtgaggtcagtctcccttgagctgaattcagtctttctagattacatgattagagtgaatcatttgaagattccgatgaacttacaacatcagtaccgatgacatagtcaaagggaggctcaacggccgttatatgatcttcgtttccccagtcgagttctgcaacccggagcgatccaaatgctgccacaaggaatgaaaacttcattagccagtaattataacaagtcaagattttcttgtacctggataaagtaagcatcacatcgagagttagttctacaaacttttccttggcataagaaaatgaagaaagctgtagatagaagcagtaaaagaagcgagctagctactagagaataaagtattgacacaaacctgaaccaggattcatctgtacgattctggacgtattccattctacattcctctttagcagtggtaatacctccttttggtcagttgtaaccacatcacaccccagcatcgccaaagctgacacatgaacacaaactccaattgaagatgccaaagttccagtttcaagcaaagatatagtcatggataagaaaggggaatactccagatatcaatacatacatgtattacgtaccaaatcctgcaacgccacaacctgctcctagttcaatagcacgtttccctttcagtttagatgaactaaaccttcccttcctgctatttttcccctgtaaatattttaagcgtcaggaagtcagacaaggctttcttgttaagtctagtaaatgactatttgtaactaatctagggtttgagcaggaggtctagctttgccagactaacaacagaccttacacggttagttgtggaagggttaaaggggagcaaggagagtgcattgaaatcattctgtattggtctaggtctctaggatctttgctttggtcaagagttagacactttcctagttaatcaagtctcttctatgttgtagttctttggtaaataaaataaagaaggagttcactggttcataaccaactaaagcctcaccgaagatctattattaatgagtaacagccctaagttaccaatctaaattacacagtataaagaagataatctctgaggagaatcctagaatttaagcgggatacgaaagatctatttataccagatatttggcaaacaccatggacgcatcccacacggtcgttcctaaatgcttcgaatttggatcctatcatgtagaaaattgtagcatcattgaccttaaatgtaagaattcaaggagaatataagagtcacacatacctgagcaaagtctaattcgtgccccaaaacctcaatggtaacagtacaggtgcttggagaatttaaccttaaaagacagcaagtgtcaaatttaatcaacttctcaattggaaaaccttggctcaaaactcaaaaaaataactgaagtatttcagaaaaatgtaaaacttaattctcaaatgaatctacaagagaatctcactggcaaagattttacctgaaacagcaaagatctcgacttgcctactaacgaaagacagcaaagataacaaccaccgaagaaattaaagcttctataagctaatatgattgttccgtaaccaaagaccattttcatatttgtttgcgcaaagcttataacaaaaaaaattgtctgataatgaatcataagccaagttaccccatagatcccctggaatacctgtcgggatacatttgttcgacgtccgatcgaaacacaaaatacggcaatttatcgttt

SEQ ID NO: 21442 - DNA, 608 bp, Arabidopsis thaliana landsberg
  unsure (1)..(608): unsure at all n locations
agcccgagcctcgaccatgtatcggacgtacccagagtcatccctcgctctgcgtgttctggggcggctgcgaacccttcggggggccagccttcgaacccctgatcagtagtgggcgtggagccgagtgctctgaggcggctgtcgaacccttctgaggggccaaccttcgaacctctgatcagtaatgagcctaaagcccgagtgctctggggcggctgtcgaacccttccgaggggccagccttcgaacccctaatcagtaatgggcgcggacccgagtgctctgaggcagctgtcgaacccttccgaggggccagtcttcgaacccctgatcagtaggagggctcgggacccgctttcttcgcggagaaggatccctttcagagtatccctttcccggtccctgtagcaagagaaagaaaggggaaggagaaaaggatacgaatttaaacgatgtgacgcacctttttgacgcggtcatcatggcggaggtgaaagtcgcccgcttcaccnnnnnnnnnnnnnnnnnnnncctgccgcgaagttaatgcgacgggacgggtggtttgcggggcagcggttgtgcgtgcgcgagtcgtccgaggg

SEQ ID NO: 21443 - DNA, 357 bp, Arabidopsis thaliana landsberg
  unsure (1)..(357): unsure at all n locations
cttcactcctgtctnnnnnnnnnnnnnnnnnngcttgttatttgtgagatccacgaatgcaccaggggcaggggttcattaggtcgggctttaccactttgcacacacaaacatggccattattggcccaccatgctctccgattgcaataagttagacgccagatacgccaaatacgagaagcttctaaggcacacaccatttattcacgcaccgacggagctcatgcatcctattnnnnnnnnnnnnnnnnnnnnnnnnnnnnnnnnnnnnnnnnccgaacaacttcaagcgtctcgtcaaatgacatacattctcgtcttgagagattaatagaccaaatgggtcgagccggag

SEQ ID NO: 21444 - DNA, 176 bp, Arabidopsis thaliana landsberg
  unsure (1)..(176): unsure at all n locations
gattgctgcttattcagaaagaagttcaagctgcttgagatttgttttaaatgcaatgcttcaagatggnnnnnnnnnnnnnnnnnnnnnnnnnnnnnnnnnnnnnnnnnnnnnnnnnnnnnnnnnnnnnnnnnnnnnnnnnnnnnacttaaaaagatgtttaagtctgagcaaat

SEQ ID NO: 21445 - DNA, 953 bp, Arabidopsis thaliana landsberg
gatgttgtaacgttcaggcgttaaacacagtctgggaagacgagttaaagaagcaagggacgtttcgtatttccgttgaggatgctgacatggaatgatgacatggaaaattacagcctacgtcgttttgaagtggtgaggtggcaagtaagccaccaaacgaacagttcataacacaaccatcaagcaaatctataagtcagtcgcaacatgaatactattacagtaattaaaacaggagaaaaacaaagttaagtcagtcgtggtatgtcgtaactaaactaactcagccgtaacgtttaacaactcggctgtaactacatgctattatagtaattaatcttttgcaaataagtcagccataacaaggctgagttataccgtaatccagctattagcggctgatttataacactcgaccataacttagccgtcacatcattccataactaagccgtccaaaaatataactgggccgtgtcgcggaaataagtcagccgttttatcataactcagccataacgttgtctgggttatcgtataacttttaataactcgaccaacattctttaactcaaccataccgttgcctgggttatattacaactcagccgtaacgtctggctgagttctactcatacttcgccgttttgttatgactcatatatttttgtcgtaactcagccgcaatataccataactcaggcgtaactgccgctgtatcgcgttacggctgagttcatttaatccacgtcagcaaattttaacgtggcagtggcattctatataattatgttttttccagtaacgtttagtagaagcacgctggatattaaaaaaaagacgaaaatatcatagtaattgacaaaaagttttgtcttgttttattaataacacctaatttgttacatcaaaataaatcttctttatttgaatggatttatttttgggga

SEQ ID NO: 21446 - DNA, 3839 bp, Arabidopsis thaliana landsberg
  unsure (1)..(3839): unsure at all n locations
tagggtatttacctttcacctgttagcctcttgatgaacccttatttgtttcttataatgaatccatccttagggcatctattcttcttagatttattggtattcaccccctgattgtacttttatttacctgttatttgtatcccctgttgattgcattttagttcttaatattgtcacatgttggttatactcgacccaatgatcgaatagggctcttaagttcttatttttacctgtttgaatcctgacctaggattgttactagaaacccaccatcattataatgtggcttgacttagttgcttctgtacacatcttgattgctagcaataacagtggactgggttgacaccccctatagctgcatcgacatgttagtgtttaagggaaattgaactgaacctcacattcagcacataagtaggcctaaaaacctacttatcaagtagcaaggaactggcagctcccctccttgcatccctcgaacttgtaggtaaggaatgtctctagcatggttggcgtatggggatatcttgtcccttcaaacttaagatccattaggtactggtaatgctcttctatggtgggctccctctttttccttggatagttccttctccttcttacagtaactggcaaaacctcctcaacaatctctacatctttttcagatgcttccccctctaacataggctcttcttcttctctagttggcacaacttccccttgtaacttcctctctaacagcagcagaacgacccatagaagattctggagtcatactcggccactgcactcggcctgtcaaccgagtaaaaccaggactcacagcttcctgattccaaaccggagctctctcgttgatcatggcaaaccctctagctacagcacaagcagaggctcttcgtcttgtttcttcggaatccatagtcttgtggtgaggtactgcagatagtcacccaaaataacccaaagtaggtcaaagtagaagagaatttgaagttttaagaggttttgaaatggtttgtatggaaagaaagtataagattatggttcagtttctgggaattctaaagagaagtgagagcaaaaacttgaaatttcttgagagaagtagcaaattgcgaaactaattgagtaaagagagagagtgagtgtcttagcttgttgaggtgggtttataggcaaatagatttgatcctagctcttcaaacactctagatctccacccttcatttggtcaaggagacaagctctcactgtttgcaaaagaatctttgatggcctttggggagcaggatagatgtgtggggccgagtagatcccaattcaaatttgaatttgaattgtgttgactttgcacgtgtgatactcggccgacatacctcgacatgcgtgtcgagtacaatgttgggcttggtgggcttcatcttactcggcttatggtcaagtggatcatctttttgggctttgaacagtgaggcccatactcgattttgggccgagtggtcttggccgagtatggtctactcctaggctttgatcaattaaagtccacactcggcctgtggccgagtggtttggtcgagcatggcctgaaaatttcccaaaagtctttttttctgaaacacttaaacaaaaacattaaaaataacaagaaagcaatatatacaaggatagacatgggacttcctcccaagtgagcttgtttaaagtcacttagcttgagtctcacaatgtttaggtagagaagagattgaagagaggaactaagaagtcctcatcttcacttgctgaatcctcaaagtctgaatcatactcttcattttctctagatagctggagagtagagtattcattagatcttttctcaaagtaagcctgtttctcatctgtagtctagtctccttctcctgaatcaggttcctcaaagtattcctctacttcgggacttggataccccttaatcatttccttaagctccaagatagtatagtttagttcttccatcttgaggtccaacttgtcaatgatgtcctcttgagcttcatactccttcccaagctccataagctctctagcaatagaatcaatattcaataggtctcccttagtctctacccttgagcttgattctcctttcatcatagaaggctttttgggctgcttaggctctcttaggcagtgagttggaatggagttttccaacccagtcaacaactcagcatctaaaactccttcttcaatgaagaaaagctgcccttctatggtaggcttcttcatgttcttggaaatgtcaaagctcatatggagattcttaccaaggttcaaatctatcttccccatttgcacattgtttagagtacatgcagttgctagaaatggtcttccaaaaatgggagggtcttttggttcctcatccatctctagaaccacaaagtcggttggaatctcaactgatccaatctttactggtaagtcttctagcatcccatgaggcactctcactgatctatcagccataataaggtgaatgcaactaggttcgaaattagtgaaccccaatctccttgcaacaaacaaagacatcaaactaactgaagctcccaaatcagagagactcttgttgaacactaaaggtcctagagaacaaggtagagtgaaggaacctggaccacctagcttctttggtatcacctttctttgtatgatagcactgcactcatagtgcaactcaactatttcctgaacctgttggggtctttctatcatattttccttgtgagtatcaaccaagggtatcttctctttaaactctttgatgcacttgatgaacatcatcttgtgttttttgaagatcctttcttcaatctgtgcaattcttcctggaaatggtagttcaggtacataaggaggtggaataggaattgggttactcgggtcatgtgctcgttcaacaagtcgagcaaagaagtcgagttcaatttcttgtcctgattttactcttaaaacttctctttcttgaatctcattgtccttaatgatagaagtatgaactgtagagatagcatgagcatattcctttgggttttgaacagctttgccaagaagttggacaggatgcttagaagccatctggttctcaatggtcttaactcttgagttgattgtatcaatcttgatgtttaaatcatagtaagagcagtcaattcttgtagtgacctcagcaagactcttttccaaagccatggtgcttgatgcatgtccttgcacgagttgctgaagcaaagtctttatctctgaatctggtgtagaaagagcttgttgttgctgagtgaagcctggaggtgcaaattgctgcttagggttgaagccttgattgtaaagggcttagcttgagtttgttggttctgttgagggtaaacttgatcttgtgggttggccacattgttgcttctatagaagagatgaggatgaggaggcttgtagttattgaatcctttgttgtagccaccttaattcnnnnnnnnnnnnnnnnnnnnnnnnnnnnnnntctccctttctagaatttggttatgctcttcctctgtaatgaagtgaacatttctctgctgagcaagcaccaacttgtcaatcttatcattaagagctttgatctctctcttgtgcttttcctcagaatcgctgcttcctctattcgagcgatcatagtcttcattgtaattcccatcagattgagctaggttttcaacaagttcccaaccttcagctacatctttgttgagaaagttcccaacaaaaaaaaacggtttttacgactacatctggcatttata

SEQ ID NO: 21447 - DNA, 328 bp, Arabidopsis thaliana landsberg
ttgttcctgaatatttattgcttcctttccatgatccgatcattatagtagcaaaatcctgaataaatatgtatttttatatgagatatccctcacccaaattattttttctaatctcaaggagcggtgaatttcactatgaagcgcaactagagctaactgctatgattgtgcctctttttcaactaaacataatacctctagcggatctttatccacattctcaaatattttttcattccttactttccaaatataccaaattatccatgaagatgaagaagaatcaagttctcaaggtattcttgagaataagtgaaccaaattc

SEQ ID NO: 21448 - DNA, 577 bp, Arabidopsis thaliana landsberg
aactgaaaagataccagtcaagacgggtgctccctctggaatatcagccatggtggtgaagttcagcctgccttgcctcacttgcactttctgtctcttgccttgattctgattaacattctgcccctgcctctgctggtttctagggcaatttttggcataatgtccggtgttgccacaagtgaaacacctgttgtcattggcttgacgatgttgctgctgttgattgttcctctgaactggatactgggtgcggttgggtgcctactgctgctgctgctgcggtcggatcacccaacgtccttgctgctgctgcggtcccctgttctgagtgtcagacataatcctgaagcgctgtggctgagctgaaggtcctgccaccgtggtcttcctcttcttctctgcctgacgagctgtgatacagtcctcctgagaaatggccatgttgacaactcattatagctgttggcctgacggtgttggacggtacggagcttagtgctgagtcgcttctgaactgtcctctcttctcgctggtgtctcgtgatatcggcatatggcacagtcattgaagcct

SEQ ID NO: 21449 - DNA, 1463 bp, Arabidopsis thaliana landsberg
tatcgttcagcaattaaatcttcaatttaaaccttatccatagtaaaattctaagtttctaacctatcagcaatcaaatctttcaatcgaatcataaaacttgtttcaggaaaaagctatcgtatcagcaattaaatcttcaatttaaaccttatccatacaagaaaaagcgagatgtcaaattcttctgttgttacacttgaatataagatatcttacttaaaaattatgtaatttttttttttcgttcaaaatctgttcgacacttgaataacaaaacaaattcaaaacaactgacgaaatagcagaataattagagaggaaaatcacaagaatctaatccagcaagcttaccatgtacctagcaaacactctctctgttgatgtaggaaccaccacctcttcgtcatcgcctaatatgtcattgagtatgctacacttacaaaatcaaatgcaaatcaaattatatgagtatctaaagaaaatgataatttaaagtttgtatcgttcaatgtagtaataagtatcttttaatatttttaaaattaataaaaacggttttttcttttacacatgtcaaaatatgagacacaatcctataaattttaaactttaaaatccatacgttcatactttatataataaaactagattgataacctatgcttcgccagggtgttaaatgttgatatataaatacatgttgcggggattttcggaaactattgtactatgacattttaattatattatcgtatttattttgtttttgttttttgatcttatggttttgttatatttataatactaaattattataatatatatgtgttgacactcattattttctatatataataatattgtagcaaatgattgaaatgtaaaatgttagatttattgattatagtatttgagtatttttttttggatgtgcatttattgattggatggaattttatttttgaattttggatagtattatatattataaaatatgtttgtcaagtgttagagataattttttgattacatctagttaattttattaataatgaaaattaggtaattttattaagaataattataatatgaaactgaatttatttttttctgtgtgttataaagttgcaattaaaaactctatatgtacaaaacaaaatcacaaaataatatagaaaacatatgtgatttacaaatgtaaattttttttattctgtaaccttttcaaaatcattagtattaattaaagacaacaaaaaaataacaacctatgtgagagacacttagaccaaccaaaaaaaataaagagtgcttcttttgaatgtaaaaaatacaaatgttattcgattaaaaaaaaaaattgtgaataaaaaacaaatgttatattagttagttagtcgttttgattgatgaatattattattactcaaaagaagaatcataaatcgtagtactgctaa

SEQ ID NO: 21450 - DNA, 598 bp, Arabidopsis thaliana landsberg
  unsure (1)..(598): unsure at all n locations
taattgcttcaaagggtttactcgttaccttcgttacaacggagctttggggcaagaaaatgagacaagccaacaaaatcgttgacggtgaacttaaaccggttggttccggttcaatccggtttgagttctttgatgaagaatgggcagaggatgatgaccggagagctgatttctctttgtacattgctcacctagagagcgttgggatacgagaagtgtctaagcttgtgagaagatacgaggaagcgaacgagcctgtctcgtgtcttatcaataacccgtttatcccatgggtctgccacgtggcggaagagttcaacattccttgtgcggttctctgggttcagtcttgtgcttgtttctctgcttattaccattaccaagatggctctgtttcattccctacggaaacagagcctgagctcgatgtgaagcttccttgtgttcctgtcttgaagnnnnnnnnnnnnnnnnnnnnnnnnnnnnnnnnnnnnnnnnnnnnnnnnnnnnnnnnnnnnnnnnnnnnnnnnnnnnnnnnnnnnnnnnnnnnnnnnnnnnnnnnnnnnnnnnnnnnnnnnnnnnnnnnacaagaagt

SEQ ID NO: 21451 - DNA, 1217 bp, Arabidopsis thaliana landsberg
agaaatgtcatacaaaggtcttgtaagggaaaaatgaataaaacagaacaagaaaatacaacttattttcccatatcgaaggacatcgcaaatctcacgagcatcaatcaagattctccgttgcgtgggctcttgtctttgaatagcttctctacccactcgttgtagtaacttgtgcatcactatatttccttccgccgatatttgtatgagagatttatacgcgagcgttttcaacccgagtttgacatccaaactatcttcaacgagcattgctttcacatgatcatcgtcgacgtagttgaagaagaatgcaatgaggagatatagaaactgatcgtcctcacataaatggtcgtatccgactctaagaactccatcgatctttcgatcaaggctattttctagcctacgcaatataccttcccagtcatcttctttctttccgcgtaaagttgaacccatgacacggagacctagaggaaggttgctacaaagccatgttactctttctgcaagcttctcaaaaccatatggtgcaaagctccttctgaaagcatatgtacaaaagatcttacaagcttcttctctagttggaaaatcaacatgatatttattgttaatatcatgttgctccaaaagctcttgatcctccgtggctacaataatcctactcccaggaccaaaccagttagtttcattagccaaagcctcaagttgcttcagatcgtccacatcatcaagaatgataagcactttttggtcgcatagcattccctgtattgcacttaaattgtataccctcataccagtttggtttaaaatcttggaaagaagttgttcttgtaattgcagcttcaaaccatactcgtcaagactactattatagcttcccctaagattctccataaaacaagtaagctgaaacctatcagagagtagactgtgcaaagctctggcaatggtagtcttaccaatacctgcagggccatagattccaacaatcatagcttcatcatcattatctaaatgtaacaaagactgtattttctccaggtgtgtctcaactcccaccatgtcttcaaaatccctagagattgtagtgtttactttgtttgaaatatctcttgcaatcttctccatcatcttcgattcattatccctaacaacagagaaatagaaattgaattgcagattcactaagaaaattgcccgaa

SEQ ID NO: 21452 - DNA, 615 bp, Arabidopsis thaliana landsberg
  unsure (1)..(615): unsure at all n locations
acctaacagaccactcgaccccctggtcgagtaggggatttcacaatttcatctcatcactcgaccccctggtcgagtgtattcacctccaccacctgaccgtcactcgatcacatcacatgacctcgaggtcgagtgtcttcacctccaccacctgaccatcactcgatcacgtcactctatctggaagtcgagtatcttcatcaccaccagtcgactacatactcgatggcaagcttcagagtcaccattccgcactcaaccagacactcgagcacaaggaagaaaagaagactctatctcatcactcgacctctcactcgaccaaatgggttgagtacagttcttaatccgtcccaatactgtttcgttttgagtattagggtttcagaatattttgctataagtagcatgtactttacattttcgagaacaaatttttatctagttttattccgcagacactgtgttctagaccttttgtaatccgaatttccctttatctatttagtattcagtatttgttcttggatttcgttacaggtgttcatcctgttatcattttgctattacctctgtgntatcatggtttcaatccattcaacctttatgctt

SEQ ID NO: 21453 - DNA, 651 bp, Arabidopsis thaliana landsberg
  unsure (1)..(651): unsure at all n locations
agaaggagttgattataatgaaatcttctcacctgttgttaagcatgtgtctatcaggtatctcttgtcaatggtagtacactacaacatggagctgcaacagatggatgtcaaaacggcattcttacatggatttctagaagaagagatctacatggctcaaccagagggatttgaaatcaagagaggatcagataaggcatgtttactaaaacgatctctctatggccttaaacaatcacctaggnnnnnnnnnnnnnnnnnnnnnnnnnnnatgagaggaattaagtacactaggagcgcttatgatagctgtgtgtacttcaagaaatgcagtgatgatacatacatttacatacttttgtacgtggatgatatgttgatatgtctctgcagtttacttcaagaagtcttaagtataccaaagactctcggtcttttagagggtttcattctacagctttcaagaagaacacgtgagatacacgtgcggtcgttgtggccgtttgacgcaagggcaaagtcgtctttctctcatctctctgtacttcatcttcttcatataaggttggagatcgatctaaagtctgttagatcagagatagagaaagagagagaattgtaatcaagtctagagagacctagagagag

SEQ ID NO: 21454 - DNA, 766 bp, Arabidopsis thaliana landsberg
gattcagctacaagacgagactgattcacaagctttcaacgctttgatggattcttgtacgttagtgaagacgaactctgaaagaaacttctctgtttttgaaatgagattctccggtgagtactcttccgtcatttctagatactcggcggcgcaacggagtggaacagctgtggaaacagagatgtcgactttgaaaccgtagcttatctttatcaccatctcgaaaatctctgaacctcctggaaaattctcgagcttgatgtgagaataaactttactctgttcttgctctgttattagttggtgaagttttttgctttttgacattagaggaaactgaagaaagaatgatcaacatatcagttttagtttttaagagtaaactctgaaagaagaaaaaaaaacagagaagaagatgagaccttatgaagatgaaatgttatatcatcaacttcgatttctatgtcacttggtaagcctgtggtataaaaaaacctacacaagagataaagattttataagtatttgaatatgaaaacattactattgaaaaaaatgagtgttttgttcttcttcaccatgcttgcttcttggagttagccattggagaaaatcacaggaaaaaacaaagaaagaaaatctttcgaggaagtggaaactattgggatgagattatatttcggtttttgggaaagtgaatcgagttttttgatcaattctttagcttaataataaaatttctgccttttgctttttataaaag

SEQ ID NO: 21455 - DNA, 518 bp, Arabidopsis thaliana landsberg
tacatctattacaaatactaacattcaaatcatgaactagatttattagcttcctctagcttaacatttaaatcatcattcagaatctttaaactagagacagattcatgacaaacagaaaattcagaggatagcatttcattccttttaatctctaaagcaagagatttctgcacactaacaaatttatcatgctcttcatataaaatatcctcttgtttttctaacaatctatccttttcatttagagcatcaattaattcattgatcttttctaccttagctctatctaaacctttgaataagctaaagtaatctacttcatcatcactagaatcatcatcactagaagtagtatacttagaggtatctcgaacgcttaccttcttctccttggccatgaggcaagtgtggcgttcgttggggaagagcgaagacttgttgaaggccgaggctgccagtccttcatcgttggagtcggatgaagagcagtctgaatcccattctttgccaaggtg

SEQ ID NO: 21456 - DNA, 4371 bp, Arabidopsis thaliana landsberg
tctattctgtagtctaaaactcgttaccccataataaaaaaaatgtgataaataaaaccattttgtttacaatttttctatccatcatttgtgaaaagaaaagaaaagacaagaaatgattttcgtatcttgtacatattctctttacctaatttacgagacgtttgtttagacttgaacacttattaattaggacatgaatcctaagaagttaaaacgtagaggagttggaaatgacgaactttgtattattgggggacccatcacaatcaaaagtcaatttctcagtatatcttcagagggaacaaatttaattaacactatggtttttattcaattattaacatgtgacatcgttcccattgctgaccttgccatgaggcacaccttggaagggccaatattttcattatcaacgttagggccacaaataactatatatattaaaattactattctacaaattactactatataaattagtccgtcgtaactaattacgatccacaccaactgatataatgtaaaaatagtaagaaaaagtagttttcttacctgcttaatcaaggtatgtagtttttgttataagcatctctgtcaaaatttcagagatttaaagtgttttggcttggagaagtatttgtatggttgagaaagaaaaaatggaaacaaaaccgaagtaacccattattgcttatcgaaaaaacaaatttagaaaaaacgaacctaaaccagttggaaaacgattttgttaagaaaatatagtattagttgaaattttcagaaagaaatatctttctttaaataaaacctaataggtgtccaaaaaaaaaaaaaatgaagaagaggacaggctaagcagcaagtagtatgttgcttagtcaaatataaattaaaaaatccaagcaatgtatacctccaccaaatatttctttcttgatataatgattcatgacaaaagaaagaaaaaaaacaccaaagtctatgatctagtaattaaaaaaagagatattacaaattagtttctcttataagctacttcctccttagagtcccttttcaaactactataaaacatcaaaatatctcaaaataaaaataaaataagaattattaacggtagaaaattttgttgtttaaaatgaacaattattccataattaaagtgtaattaggacccacaaaatatatacaaatttgatttgggttcataagccaaaaatattacattaatcaacggtcaaagggtgattaagaacttaaagaggcagcaaaataaataaaaagggtaacaaatatagagagactacttggtaatgggacccacatagccaaaacggcggagaaaatcgtcgtttttagtggcttataaaaggaggactcgtatcgactctgcaacagaaccacctaatctctcctcctctccttctctctattttgccggaatacatatgatcgagtgaaacgcggacaaagctgtcgtgttgagtactaattcgccgtcgtttttctcagtgaaggagtggtgagagatgtcgagtctcgaagatatcaagaacgagactgttgatctggtataccattttttatcctctgtttttattttatgctcacaaactgttcgatgatctgcctgaatgagagtagatctgtatccacttggtggctttaaagtctttccttggttattacttactctcattatggtttcgttttttatatatacattttcatcgatttagttttgaatatgtgaaatttgtttagaaagactatatttttgtttctgggtagtaattaagtctaagaaacgtttggaggacatgaagagtttgttcatgagaaaaaagtagatctaagcatgtgatatactagtaaacaaacaagataaagaaaacagagtctcttttttcagtggtggagctagctacgtctcaataaagtccaaacctacttgtacaatgttttgtcttctctttttttggttactagtaagaatttatttggtggtatttagaaaaaataaatatgactttaatcaaatctgttacttaacacgaagttcggattttttttttggttgtacctttccgtggtacgtttaacttctctgtctttagcaaccaacaaaaaagaacacatcttttgtgcagacgtaacttcttttctgtgtttcttgggacaataatttgaatcttttttattaaaatgctacttttacataactttggactgtatttacgcgaccaagcctcgatttttacgccggaaagtgaggggaatctttcggcgcgtgtgtttcacgtcgccatcacgttggtcggtggtggcggtccccacttcaccaccgctatttcccccccgccaaaaatatttcattgtcaccgaactagtcaacgacttttttccaactattgtacttatgaaacagagtagatttatctacggttacaaaatcatcaaagttttctgttttacttaagaaaaggtttctcctttttaaggtttagaaacttgttttgtgtatgtgaaagtttgagttgtttggatttggtcatctgatcgaatttgcttttgattttttcaggaaaaaattccgattgaggaagttttccagcagctaaaatgttcaagggaaggattgacaacgcaggaaggggaggacaggattcagatctttggccccaacaagctcgaagagaaaaaggtctgattttgcatttgtagctctcagataaaacacatagttggtctcctttttttttgttaccgagtgtttggtgatttgtgcaatgaaaattgacaggaaagcaaacttctgaagtttttggggtttatgtggaatccactttcatgggtcatggaaatggctgcaatcatggccattgctttggccaacggtgatggtaggcctccggattggcaggattttgttggtattatctgtctgttggttatcaactctaccatcagttttatcgaagaaaacaatgctggtaatgctgctgctgctcttatggctggtcttgctcctaaaaccaaggtatatatatgataagagaatgaatggtgtgaatttgttatacagaactttctgaattttccctagagctaatgttttggttcttgttgtgatgtttctctgtttcaggttcttagggatggaaagtggagtgaacaagaagctgctattcttgtcccaggagatattgttagcattaaattaggagacattatcccagctgatgcccgtctacttgaaggtgatcctttaaaggttgaccaatctgctctaactggagagtcccttcctgtaaccaagcacccgggtcaagaagttttctctggttcaacctgcaaacaaggagaaatcgaggcggttgttattgccactggggttcataccttctgcggtaaagctgctcaccttgtggacagcactaaccaagttggacatttccagaaggttcttacagccattgggaacttctgtatctgttctattgctatcggtatggtgattgagatcatcgtcatgtacccgatccaacgccgaaagtacagagatgcaattgacaaccttttggtcctcttgatcggtggtatccccattgctatgcctacagtcttgtccgtgaccatggctattgggtctcacaggttgtctcagcaaggtgccatcaccaagcgtatgactgccattgaagagatggcaggaatggatgtcctgtgcagtgacaaaaccgggacactaaccctcaacaaattgagtgtggacaaaaacttggtcgaggttttctgcaagggtgtggagaaagatcaagtcctattatttgcagctatggcttccagggttgagaaccaggatgccattgatgcagccatggttgggatgcttgctgatccaaaggaggtataactctaatcattttgaattacttctttagtttagtgaaaggtcgagaaaacaagttcttaatttcttatgtttcacttggattttcataggcccgagctggaatcagagaggttcacttccttccattcaaccctgtggataagagaactgctttgacttacatcgactctgatggtaactggcacagagtcagcaaaggtgctcccgagcaggtgatgaatcttcaactttctcctaaagatgttgcgtttttcctttattctgtgtactaattcgattctcccacacagatccttgaccttgccaatgccaggcctgaccttaggaagaaggtactctcttgtattgacaagtacgctgagcgcggtcttaggtcgtagacagtaaaatcgtcaggtacttttttacaagcaatttttacattggtctatttgggttttttatggcctgtc

SEQ ID NO: 21457 - DNA, 1121 bp, Arabidopsis thaliana landsberg
  unsure (1)..(1121): unsure at all n locations
agtatatcactgcgacggtntactgttatgtatctcgaaagactacactagggtcgtggtttggaatccgtataggagccaactttgtaggctcaaacccagtagtcctgaccatagaatggactggtatatctgtgctataggatacgagaagcgtannnnnnnnnnnnnnnnnnnnnnnnnnnnnnnnnnnnnnnnnnnnnnnnnnnaatttgttgagtacgaaatatacgagttaaagtctaattcatggagggttctcgatgtcacttccgactgggaagtagagttttatgcacgaggtgtctctctcaagggaaatacttattggtttgctacagacaagtttccagaaatcagcactaatcttatacatagtgtttatttcttgctctgttttaattttacatcggagagatttgggccgcgtcttcctttgccgttttaccctatggatgtagatactgtgagtctttctagtgttagagaagagcaacttgctgtgttatttcagcgtaaggacaacttacatatggagatttgggttacgactaacattgaacctaaagaggtgatgtggagcaagttgttcttagcagtggatatgcaaccactcactgattttaagtttggaattgcagatgcgagtttcatcattgacgaagagaagaaagttgttgtagtctttgctaaagacaaagatgtaatgtatcccactcgcaacacagcttacatcattggagaggatggatattacaaagaagtggatctcggaaaaactactgataaaattcgagatccacttgtgtgctcgtatgttccaagctcagcgcaaatcaagcaaggaggcaaaaggaagaaaaaagggaaattgattactgattaacatttatatcttgctttgtgatcttcttcttttaacaaaatttggtttgaaataggataaaattttgttaaaatcgaaagtctgtgaaactgtaagtnttggtgtgaagatactatattatctgaatcactcgctacttccagcaatctaatcaaaggaccagttcacgtagaaccaaatcttcaacaacanangagaagacngattggagaaacagatcgaaaaacacgaccac

SEQ ID NO: 21458 - DNA, 1950 bp, Arabidopsis thaliana landsberg
tcctagctactttctttcttttgaacaaatgcgcttaaaggaagaatatggaaatgatttgactcaaagttcgaaactggctcttagggaatactctttggtatgcttcagtttcagattgtattgcagaaaactagtatatggttgtttttttttgagctcacttccatcgttctacttcttcgccataaaaaggtttgattctaactatctcatgaaacttacattgccattaaactaaaagctttatatcactccaaatgtacttatggttcactttttgacaagcaaaatgaaagttattaactatacatttgagagttcttagacaaaacaaaccataaatgcagatatttgtatataagcttcatttctctcatacctccttctctgttgttatctttagacaccctcagagcaccataggattgtccctataagaaatcaccaaattccaaacataagagttgtttacactttttaaaattttcagcggtttaatcaccgaaacagattttcgattgcttctgggtgctatgtgcgaaaaacgaaagatcaaagagatatttcacaaatttcggtatcaattacggacctatattcaaaagtttgtccacgtaatttattctaatgtttgctaacaaactcgttttaaaagtcggaacattacctctctagtgggtggtggtgtttctgcgtcgacgattgtttcggccaaaagggttcatgaaccactctggtttgtaggaaaccaatatgtatccaatcgttaatccaaagacaattccaggtatgaatcctattgcggctgctatccagcttatctcttcttcgtcttcttcctctgtttctgtcgtttcattctgttgtgatgctggcgtatgtttatctctgcagacttcgtcaagagaagggccaaaaagtcccaggttattctcaaaggcagagcaattttgccttcgaaactgcgtacctcctggtactaggcctgcaagctggttatgagagaagttcatatacgcaaggaacgaaaggtcccctagctcttgtggaatctctcctgtaagcttgttctgggaaacgtccaatgactcgagagctgtcaggttccccatagatgatgggatgtggccaccaaaagcattgtttgacaagttgagcacgagaagctctttcaatagaccaatggactttggaatctctccttcaaatttgtttccggaaaagtcgagtgctgtgtagattgttagaatacgtaccagctccgactctacacctttattcatcaaaaccattgaatcttggtaatagcctgatcccatgtagtttgcattcgaccgatcttcgtctgtcccaagtgatgacatagcactccacttcacaaaataatctgatggcaaagttccattgaaatgattatgcgatatgtcgatgattcgtaacttaaggaacgaggcttcatgtattggtccatggaatgcattggagcgaaggactagaacttgtagctttggtagagaagtcaaccagaacggaaacgtgtcattgattctgttgctttccacgttcaaaacttcaagagtagagaaaaatctcaaagatcttggaagctttcccactagctggttatggccgacatctagagacctcagtatttcaaatatgtgctttggaagacctccgctaagattattttgacgaaggtttagatgtgaaagattactcttgagatttcccatacaacgagggattgaaccactaaagttgttgtctgataaatcgagagtttctagagaacgcaactcacatatgaaagaaggaatcttgccggtgaagttattgttggagccaagcaagtgttccatagatggttcacgcctctttggtctttggaaaccgatgaaagaaaagaaggaaagattcacgtagaacaagtttggtagcgtccat

SEQ ID NO: 21459 - DNA, 1292 bp, Arabidopsis thaliana landsberg
attaactttcgttaactttgccaaataagacatgtcgttaagtcaactaacagaccaatttaacagagttagagtcaacgtttatatttttttattaatttttagaaacgacgtcgttttatgtttaaaaacaaaaaaaaacaaaaatctgttcaaaaaagaacaccaactggattcgaacccgtgaagccttaacatgtaatatggtatcttaaccaccacgctgaaaaatacttatggcatcctatacacatcaatatatatcatatacgaatagatagagatttgacaatcgaatagaatgtgaatatttgaccattgaatagaatgtaaatgtatttagttcagttgattaaatatacagtaaaacctctataaattaatttataatatttaaagagattttcttaatttggtaagttttttaaaaaaacttttatgaaaatataagcttccattcattatttgaaatatctttctaaaactaattacaaataaaaacaattatcatgtttagaaaacaatacgaacagtttttgatatagtaaaaattattaaaattaaattaaaaataactaatgtgagtttaagcaaaaagaaacaatactaaaattatatttcactaaaattattatatataattataacatatatatagttgatatttttatataattattaatttatgatattaatgggactatatatttatataggattttcaaaaaagattattatcatattaatttattaatttatagagattattaatttatcgagtattagttttactttagcatgtttttctttgagaatttagtagttcgaatcccagtttgatagttctaatgcttgatttttactttttttcatctgtctgtagaggttatatgtatatttgtgtgtcaattagctaataaatactttagcttgatggttgagtactacgctatacgttatatatgacatgtctctggataattatttgtttactatccattcgttggcttatcacgttagatggttatcaggcagtcgctacaactaggcagcgaaactgctttgatcaccatctattgtttttttttgtccataatttgattaaagaaatgagaatatagcaacaaatgattgcatttttagttgaaattacaatacaatcattgcaatcgcacatcctaaaaaactaattgaaattaatatccatataaggaagaaactcattagtgtcgacatgcattggaataacaactttgtttttgtttgactttgattatagccgcccttaacaa

SEQ ID NO: 21460 - DNA, 1685 bp, Arabidopsis thaliana landsberg
caaaaggcaaccaccaattcccatgtggtctggttctgttacccgaccgttattgcgaatattgacatactattaagaaacacagcatttagcatgcatagaattgagaatgctgtgccatactcctaattatttaaaccttgattagaccgaagattgcataatgagttgacttagcaccacgaacagacactggcaataatgccataccaagatgaaaatcttgacgaacgagtatcattcctacgtcgcagtcattattgtaacatgattttccacctgactgttccatcaatatatacattttcttactaacatgtatacaaaatataaaaattaaagaaaaaatttactagcatgatatgcgtgactcacatttgtatagacgaaagtccgaggttggtcgtccttgtacaatgttggatttacctgaattagtacatataatatgtgttcatgaaacaatataatacatattttgttagttactaaaataaattaagtaactagagctcgttgacaggtgcttttatctagtgcaagttgtagatggcaaacaaattaaatcaaataacttacagtaaaaccggtttggaggaaatcacttccaatctgaatgtgaagtcgagaagcactgaattggtttggcctaaccttaggagcggttaaacaaagttccatcgttgctccattgaacctcttgtctgagccaaccgtcctagccaccgcaaactaatagcgttcaatttcattcaataaccaattcttattatcagtaatcagtataaatatatcaaaatatttttaattaaaagaagcaacgtacatgtttctggttgttactattagaatcatcagtggtataattccaagagccacgaggtttatgattatcgccaaatgagtctaatctcaatagatcttctttagtgactctttgcatggggacggtaccaatgggacaacccacaccattctcccataggtaaccaaaattggtattgtttgtctttctttctctcattcctttccatattggacgcatctaaaacatgtcgaacaccataaatattttttatttttatgtttctaaaagaatataagtatatagaactgatatatcaaaattataccttgtaatggtatgtgtgattcttcattgaagggtgatcaaatgctggttgcttgaagaaatccacacatccgtatctttctccatctatactctatcattacaccaatatataaagaagttaacatttattacttaattgtataatatatagagaacagtaacatggttatgaagatatattaaaaccttgatgatcttgacagcaggtttgttgatagtccttagtctcttctcgatttctaaatcttcaactttagaaaggctcttagcttcaacaaagtcattgttatgatttataattatgttaccaaagatgcaacacattaagaacatccatatcactgggcctctcacttccattttttcaacaatagagacaaaaagagagtttactgatttgaagcatggacgacacaggtttaatatataagggtcgaggaggctgaggaaggaacataatagtttgttctccttaattcaagacagttgaccaaaaatgcttttttggaaagacttttatgctgataatcaatcaaatggattcagtcct

SEQ ID NO: 21461 - DNA, 494 bp, Arabidopsis thaliana landsberg
  unsure (1)..(494): unsure at all n locations
ttaaacaaaaatggaggcttaatagatctcaaccacaaatctaaacaataaataaatatatatatatatatctttaaattataaaaaatcacataaatatatatgggattcaaattttaacaattatttgaacaggttttctaaaatatatcaaaaccaaatatattgaagataaaaaaatacaagtaggaaatatattaatttaagagatacaaaatatttaacaagaaattttgtttttttttttcaaagaattcgatataaaatttaaatataaatagtatacaatttttcttattatattgaaattgtaaattgactcgaaatatcttaaataaaaatattattaaaaagaaaaagaacaatttgatttttagttatcacgggacagatttatatggtggaatgaatttagatgagacgggtttacatagtanngacaggttggataagacgagttttatggtgttatgagtttagatgggacagatttg

SEQ ID NO: 21462 - DNA, 458 bp, Arabidopsis thaliana landsberg
attttgcaaacaatattgcacaatattataagattctataatattattactaagaaggaatattctcaatttagaagtgggatttgtttcaaatacatgcaatattcttttaccatcagatataatcaaccaaaatttcgcaataattatcaacctactagtatttatcacccgttttacgaacgggtaatgtaatacttgtgactatgactggtactccgtcggacggtcgcgaacgtagaagtgcgatcgtaacttaggaaaattttcgataagaaaatttaaacggacttgtgggtaaatcaaacatagaagaatagtttatcgtggtgtgatttaagaattaagactttgttgatatttttattgggtgattttgaaaattgccctatttttaagtatttatttgacaaatacactctaccctatttttaaatagaaatacaatattacatata

SEQ ID NO: 21463 - DNA, 406 bp, Arabidopsis thaliana landsberg
cgagtccccgcctatctttccagggtgttgtggacatttcacaccccaaaagagggtatttactaaagtgttgtgacgcacgggtattgtgctactttatgtgtcgaatttggctggagacctaattgacccttttgttttttaggttgtgcgactatactaaagtgtacacagattaatatgtggtgtgagacgggtggtggaatgaggactgttttaaatgtatagaatacaaaaagtgtattactagaaaccattcgatcttctcatgcccgtactctacaacggttcggaaagaccatgcacatatcctccttccatcctactactcgtctagctgggccagctagccgcattgctctatatcacaagcattgctcgtctcaaccgctacctgatccgttgt

SEQ ID NO: 21464 - DNA, 625 bp, Arabidopsis thaliana landsberg
gattcccctgaaaaattgaggtcagattatgataaacccgttattaaggttcaacttagctttagaagcaagtaaatttcttccttgtgtgttaagtaagcttaccggagagagcaacaacgtcggtgagatcgagaccttggttgttaaatctcgtgacaattgtgttgaaagtgttgttgggtgcaggaatgttgttgtttgatccactcaagcttgcacttgtcgaatctcttcttcccaaaggaaccatccagcttggtccaccagtctacacacaaaccgaaccaaattagatgttgagaacttaaagaagcaatagagagagacagagaaagaaagcgacttacaagaacagaggagtctctagcggctagagttaaggcatcagcacaagaaacagtgttagggcattcgttctctaatgctgccttgatctcgtcaacaacttcaaacccgcgagccgatctgctgttagggttagagttcttctcagtaactatactcccacatggtgtctagaagcaacgatccatcacaaccctacacattttcattcgaacagataaaattaattaatgatgtgtctcaacactaacttattgagcaagttcattaaaaaaac

SEQ ID NO: 21465 - DNA, 267 bp, Arabidopsis thaliana landsberg
cactcaaaaactttcctttatgccgttgttagataaaaaagaacaattgatttgcttctgagtaatctacatgattgttgtgtataggaatcagcggcgtttagaagtatacctgtagttataatgtcatctgagaacgttcctgcaagaatctccaggtaagagctctgtttctttaaagttaatttgagtattattgatttgagaattggcaagtggatactattattcgattctttggtttgaataagtctttgaactatctac

SEQ ID NO: 21466 - DNA, 503 bp, Arabidopsis thaliana landsberg
  unsure (1)..(503): unsure at all n locations
aaacccatctttccccgatacctatcagcttttagctcctttttgcttncattcatgcccatgtttgggaaacgctaaaggcttttactttttcgttaacttcaaatttttttttttttttttttgaaagaatgtaaaattttattccatcaaaaagcttttgtacaatgaatgcaactgtttgtttagaatatagcagaggaaactgaaattacaaaactgagacaaaaattcatagtggttgtggggaagaatgaggctgcctcatggaaaaccatagctgcatacagtcgttgtagttatgatcttccgtgtctcggattgagctgattcgattgcgaacagttttgtctatgagtttgatgagccggtttgtaggtgagctgatttctccatgccgtcgtgcattcctttttcgccagatatggtagatagaggcttgaaagacttaccggaaaaggaagaggtggtcccgtggcagttttgggtacagagcaaagtga

SEQ ID NO: 21467 - DNA, 1341 bp, Arabidopsis thaliana landsberg
tgtccaagttgcaggtttctttagatgccttttctgctcttgtattcattcataagttttgcttcgaaatgagttcatcttattagctgtgatcacaatttgaatcccgagcctgaggctttaatttgaatgcttttcgtgtctgcagaagttaatgttccggtgattggtggtcatgctggggttactattctccctctcttctctcaggtttcctctcacttcctctctactcagactgtggtcgaatgttttatatcttacaactgcggtttagctctgttcgactcaaagttattctgtttgtaaaaatataggcaactcctcaagccaacttgtcaagtgacatacttaccgcccttactaagcgtacccaagatggaggtacagaagtcgtggaggcaaaagcaggaaaaggttcagctacattgtccatggcgtaagtattgtacttctttacatagttgttctcacttggtaaattttcaggatcctacttttgatttcttaacttcttaaatctgataatcacagctatgccggagcattgttcgctgatgcatgcttgaaaggactcaacggtgttccagatgtcatagaatgctcatacgtgcaatctacaatcaccgagcttcctttctttgcctcgaaggtaatcctcaaaacttaacatcaaacacagtatgtacgtcctatggtcttgtgtctcggttgatgaatatgagggtttaattattattcaggtgaggttggggaagaatggtgtggaggaggttcttgacttgggaccactctcagactttgagaaggaaggcttggaagcattgaagccagaactcaagtcctccatagaaaagggagtcaagtttgccaaccagtgattaaaccgagtttactcggtaatttttccaattttccagctagagttgccacctcctccttcatcgggttgtatcaataaaaaatccatgtttgtgcctccattagtgaaaccataaggctctttttggttaatcaccaaactcaaagaaaaactgtaacatgtcaaagttgtaattctttcttcctttttggaaccatgcgacttttttttcatgaacaagagatcataagtgtgggttggttcctttttaatgctgcgtctgtgtcaccatactttctgtttctcagatattactttcttcttttttgggtttagtttaaatttcagccaaaagtaaaagagatttttacagatgtgatcttcattggcattttaccaaaataaactcaaattgagaagctaacgttttggaggacttgcataggtagaggtgatgttaaatgggttccatttgattg

SEQ ID NO: 21468 - DNA, 457 bp, Arabidopsis thaliana landsberg
  unsure (1)..(457): unsure at all n locations
ttctccgtagccctcggcgtcgggagtccgagggagtccatcagctatccgagctagtactcctccaacttcgctcggcgtgttcacggctcgggcgaagtcgggattcaggttgcgcccgaagaatggattctcccggcgttgccttgcatcttgctcggcttgttcctgagcccggcggcgatctcgtcgtcgggagttccttcgttctctgaagacgcgttcctccagagtttctcctatctccgagacctcgtcccgcgagacaggttgctccggatcccgttctcctgccgcgtgatgtcgtcgaacgttcctgcgccggtttctccgtcggtgggattctcgttgaggtggttcttctccgggtgcggtcggctcatcgtcggagagngtaggtgactccactctcccgatgaagaggacatcgggatagaatggtgctgctgtcgtggcg

SEQ ID NO: 21469 - DNA, 543 bp, Arabidopsis thaliana landsberg
gtggtcgtggcgacgtagatcaagagggcttctccggcagcggggggcaccaagatgggcgcgtttgtaaggagcgccttcaggtccccgagggcttcctcggcctcaggggtccaagtgaagcactcggccttccttaagaggcggtacagtggcaggcctctttcgccgaggcgcgagatgaagcggctcagagccgaagcgatcccatgactctctgtacgcctttcaagtccttgatgggccccatgctggtgatggccgcgatcttctccgggttggcctcgatgccccgctcggagacgatgaaccccaagagcatgcctcggggaacccgaagacacacttttcgggattgagcttcacgcctttcgccttgagacatcggaatgtcacttcaaggtcggaaaggaggtcggaggctttcctcgtcttgactacgatgtcatcgacgtaggcctcgaccgtccggccaatgtgttcgccgaacacgtggttcatgcaccgttggtacgttgcaccgcgttcctcaagccgacgaca

SEQ ID NO: 21470 - DNA, 677 bp, Arabidopsis thaliana landsberg
tgtcacggtgagaatcgtgagtagtcgcacaattccgtctcgcttatggtatatttctggaacttcaagtttatttactttattgatatttttatatacggcttctaatgattgaaaaaatatttttaaaacaaatttatattgacttttaataaaagaaaggatttccaaatacatatgacatgatgaactaaaaaagtgaaatatagtaaaagataaataagttgaacgcacacgtcacagtattgactgagatgagtgtgacatttatccgcccattctgcctgaaacagagtctcgatttcctctgttctactcaatttttttttgttttaagtcggtttcttatttttaaatttaaatcggtcagaaagagtgtattatttcagctaaattttttgttctctaacttatatatcctcatatagcaataacataatggcattactcgagctgagtatgttaacttttatcttcaacttcacatcctattagtcaaagactttgaacttttattcgcgtgaatccgttatgttgctcagaacaaatgtgacatatctgagaaacaaatatgaatagagttctaaaaaacaacagagataaacaataattcatgtggttttataagataattcttcatgttatctaccgggccgttgggctcagttcggtatcaa

SEQ ID NO: 21471 - DNA, 2363 bp, Arabidopsis thaliana landsberg
aaaaggctgttgaataggttgtttcaacaaactttgcggatgatgttgcggctgcggtgaccgagcttgttgttgcatgtgcgaaggtcataaattaccatggcggatttgattcatttgaggctgttgctgctgaggaagaagttgttgcctaccatgtatctgtctttgagaaccgggaacggttatagggacctgacttggcaaagtagatgacacaggaatgttgagattgctctgtgtgttttgctgtaaccattgttggctcgttgtagtctgcatatatggcaacaaggcgggaagagattgagcttgattcacaactacttgagaagctgatgtttagataaacacatagaaaaaaaaaagttagttagtgatttctttgttattaagctaaaatagtataattatgaaacgaaaaacttattacctagaactctagtgtaagttctctgtatataatgcagtgtttcactgagtttcctaaggtaatcattctgaaacatagcaaggggacaatgagtaagatatcaaattcagattctgaagttaatagatggagaaacaatttgtagtttagcaccttatcggttgctatgctataaaaattctcttcaaatttggaagcgatgtcgttaatcttatattcttcatgtgcaggaaacttttccttgaacttttcaactctacacatacatgagaacaaaatatcagtgactatgaagaatttggttataactgatattcaagaggaagtgataccattttaattgcactaaaaatacaaaacagagaaaataatccgtagttaatattcgaacttacgataatcgtttagcgaacaaacactgaaacaattatacatatgtgccaagcaattgtacatagaagcgagagtaaaacaagattctcctagtgaggaagagcctaaatgcaggtaatgaggttaaaagaatatgcaaaacttaaagtacaaaaggttgaagttaggttttgtcaactatgataaacatttatgcacaactcttatgctttaactgttgcaatctttatcatgcgcaaactacaaatatcacatcgaaagcatgaccaagaaaaccttactctctttcatgaatgttaataatcaaataagaacaatgagtccaacaaaagaaacatgaaagaatggcttacatttttgaaagaaccttttgccgtaattcaggctcaagttgtgatctccaatcaatacaattattcgcagcagcgcggtctccgcgttgttcattaggcttccagttagtatttccctccattaagttatgcgtcctaacgggaagatgtatgtataggctttgaccaagaaccgccttcgataaaccttaacaaacaaacaaaagaatgattagagaaatcactcaagagggtaacacaaaacagataaatatatagtacaagaaaacgacaaaagagtattcaaaaatcaatatgcatatcacgctaacaacctatcgcataatatcacacaacacgtattatagtatttgttggtgcaggaattagcacctccgacaatactaatttaaaccgaggaataatgtgaataaaatcgagaattcgattgaaccggggtatcccggttagcctgttaatgggcctaagtcatgagctcgcccgaagacttaagtcgacaatcaagatcgccataaccaacttcttaggtcgtgtaaagggaaaacttccatttaagagaagaggatctcatgaagaatagaagtaatgaagatttaaacctaggataattagaagtttatcatattttggtatattcgacccattgtatgaatagaggggtcaaaccccccattgagatcatctttaaccttatacaagagactactattacagagcaaaccctagctttttgttcaagcaacctagttcttttcctttgattatttgtgagccaaaagaggagtgaatttgtctaaatcccttagtacaaattcattgtttgattacagaatcaacaatatttaatatataatcctaacattttaacaatcagcacccaatatctaatcttatacaaatgaaattcagaaatacaaaagtaaaggtgatactatgtttccacagatcctgccctcaccttggcaactcggttagattttaagaaataggactagcaacaatggaaccggctcaacaacgatctcaaactacaacaatttagattaatcaatcaagattatattcccttaataatttgttatttaatctaataactaaaccaagtctaataatttaatattagttgcttaacacgtaattgactacgccacatccatttacgtgaccaaatactccccgggtta

SEQ ID NO: 21472 - DNA, 1401 bp, Arabidopsis thaliana landsberg
tatggtacctaagggtgcaaatattggaggctcaggacgtcatcatcgtgtctgacaaatcccgtgttccagaggtctttgtgcgagtaaaagtcggtaatcagatgttaaggactaaatttccccagagaagcaataatccaaaatggggtgatgagttcacgtttgtagtcgcggagccgtttgaggataacttggttctctccgtggaagatcacactgctcctaacagagatgagccagtaggaaaagctgtgattttgatgaatgacatagagaaacgtatagatgataaaccttttcatgaccggtgggttcatcttgaagactccatctcagacgctatggatgttgataaagccaagaaagtgaaattcgctactaggctccgatataaggcggttctcgatggaggctaccacgtttttgatgagtccatgtataacagcagtgatctcagaccttcgtcaagaaagctctggaaatcagcaattggagtcttggagctcgggatacttaacgcaaatgtgtttcattcgatgaaaactcgggaagggaaaggtacttcggacacgtacgttgttgccaaatacggtcacaaatgggttcgatcacgaactgtgatcaacagcatgaatccaaagtacaatgagcaatacacatgggaggtttttgatcctgcaacggttttaaccatctgcgtcttagacaacgctcatttcgcagcaggagatggcggaaacaagagagatcagccgattgggaaagtccgcattagactctcgactcttcagacgggccgtgtgtacacgcacgcttaccctttacttgttctacaacctactggtcttaagaaaagaggagagcttcacttagcggtgagattcacctgcacatcggtctccagtatgctgatgaaatacacaaaacctctcctgcctaaaatgcattacatactacccttatccacaaaccaacaggaagctcttaagatgcaggctatcaacataattattgttcgtttaggccggtccgagccaccgctgagacgggaagtggttgactatttgacagattggaaaagtcagctgttcagcatgaggagaagcaaagccaacttcaataggttcacgacagtgttctccggtgcgctgtctgtttggaaatggatggaacaagtgtgcacatggaagactcccgtgacgacggctctggtgcacgtgctctacactatgcttgtgacgttcccggagatgattttgccgactgtgtttctgtatatggctgtgattgggatagtggaattacaggtttaagcctagatttcctcctcatatggacgccaaactatcttatgcagacaatgtaaattctgatgagcttgacgaagagtttgatacc

SEQ ID NO: 21473 - DNA, 472 bp, Arabidopsis thaliana landsberg
tgccttcagaaaaccagggcattttcccagtaccccacgaaacccatctaagatggctggacacagcgtttttgctcagaatcaggggtttcgctagcgtgacccgttttccctcacgggtggacccgaacttccacgtctcacgcggggtgaccacgggagggtcctgtgcccttccacgtgcccgttttcgcggccgtggccaaaaatccgtttttggcccgttcgccatggcgaacccctcgttttcacccaaaacgcaaggccgaacagccctgccgcctgttgccttgcgtctcctcccgtttttcctccgttccaccgtgcccttcaaccgagacctacgtagcagcctcggtgtctttccacgcgcttggacttagcccgttttcgcggtcgtggccgaaccgttgttttcggccgcgcgccatgcgaacacctcgttttcagccatacgcaaggcgaacagcct

SEQ ID NO: 21474 - DNA, 490 bp, Arabidopsis thaliana landsberg
tatctcgtctcttccggctgaaactcctttggtggtgtttaatttcaagttattaaaatcaaaactcagaccggggaaatctatggaattctacgtgattcgttacaagtttgagttgaatcaagaatagctactcttttacttatattttacatgtctctcatttaattttcctcacaatcgatctatttagagacacttctacttctatcaatgttttgattcatacggtttagttttcctccttgtatccctcaaacatattcttacgtttcttaatttgattgttgttatttggccaataaatttcacactgtcttccccagaaaaatgttgctttccgatatgtattataaatcagccgtaaagtgatgtgactcagccgtaacgtgatgtaactcagtcgtaacctataatttacacaacctttcgtctttcctgaatgataactcagctgtgacatgtaatttaccgaacgtttcgtcttccc

SEQ ID NO: 21475 - DNA, 813 bp, Arabidopsis thaliana landsberg
taatgtctttcatgtgtctcagttgaagaagtgcttgcgtgtgccggaagagcagttgccagtggaaggtctggaggtccaggaggacttgacctatgttgagaagccagctcagatccttgaggttgcagatagagtcacccgaagaagaccgtcagaatgtgcaaagtcagatggaatcaccactctgaggaagaagcaacctgggagcgtgaagatgatctgatggccaagtacccagagctctttgctagccaaccctgaatctcgagggcgagattcttttaagggggataggtttgtaacgccccaaattttgcagttgaatttgttcttttctttactcgccaaaattcgggcgttaccttttctttttctttttcccctcgctaaaccttgaccttttccaaagttctagcgggattcggtttggatttcccgtgtaagaaaaccctaagtactttatgttgtttgatgcaccatgtcgaaccttgcatttcttttgattgctttgaaaatgcaaatgcattcatgtagaaagatcggatttcgaaaatgaggagaagatcttttctttctttttctctctctttctctctcctctttttctctctctcccgcgccgtgggccgtccccggccggcccagctgcccctggaattccccctttgggcccaattggcccatgcagcaacccccctccctttatttttcccaaaaccccccaattcctctccctctctcgcattttccctctctctcccctagcgccgcccctagccgcccctgccctagcgctgtccctacccgtcg

SEQ ID NO: 21476 - DNA, 1820 bp, Arabidopsis thaliana landsberg
tgttagtactagaactacctctaccatataattccatccatatgtcaattataagcgaagcacgtatcttttggtcctgaagaaatgaacccatgtccatgaaacactctttaagatgaggtttcaggacattgaagctaggctgcagacgttgtcgcacagtaggattagcgttaccaagaattgtttccccttcagaccagctttccacttgacctttccataaatacagagcttgtcctttaagtgaaacgccgagtgcttcaattacgagagggaatccattgcaacgtttcaatatctaccatgtgaaaaaagaagatgaatctagtgttttccactaacaggacaatttaagcttaaaacatgaatgttgaaactaataataataccttttggagaagatcttcatactcatctggagatgtgtgaagaggtggagatgcccactgaatgagaacggacctagcatattcatatttcaaaggtaccaaatggtaagtgggccataaatctcgtaaaatcaaactgagaagtcaccaaaatcttattatctggtaaatcaatttgaaattttcgaagcaagaactcggatccctgccacacatcatccaacaccaacaatatacgaccatcttttgtgagttcctccagaagatctcttaagccagtttctgcttgagaatcatcgtcaaatgtaattgctccgcaaccgttgtcctggagtaagttttgtactatggccctgaaattaggagtattcgacacaacgctatagaagattttcttgaattctcctgccaatgtaacaaacactacatgagaaacaagaaacatgtgtaaaaatcaaaactttaagacacctcatatatatacatacctttgatctctgggtcgtcacaaagcttagtaaccagcgtggtcttcccacaaccaggaggaccagacaccacaaccacggaattgtcaaggagtttcttcttcagctccaccaatggccaatccaatccaaccagaaccatattattaagcttgggaacagaacaacgcttcgaaacaagcggaggagcaggagaaccactcaaaaggtcgagcttctcattgatgatttggaaatgattgttaataatagcttccatggcaggcatagacttcaattggttcctaaagagaagaatctgaagttgaacctgacagaacttgagcatcttcctattgatttcctcaacttttctcgtgtacttcgatttcaagatcatattccacttctcgacatgtgaacacttctcaaccagtaaaagagcttcatcgatcgtatctttaagatcttgtagttccataccatcttgcatcgattcgatctctttgatcaccggaagcacagactccatcgtcgatgcgagctcatgagacacagatttgaaagctaacaccttctttgcctctgaaatcaaaattttcagaccttccgagaccaaagctccagcaacagagcctaatcccaaaccaagcaaatcgaccacgaccattcttgtttcctcttcagattcctttcctccaaacttaggcaaaacagagaaaaccaagaatgaaaaaaataactcacagatttgtcttgagaaactgaaaatctaacatgttgagaaagatttagacaaggaagactatatcagatgctttagctttgttgcaaagcaatctcgtagttgacttcacttcacagtgcctggaaactgcaataaaaagttttttctttttttccgacgtcatctttctttacgtcattgcaatcaatagtttcaggcccattaatatatata

SEQ ID NO: 21477 - DNA, 1649 bp, Arabidopsis thaliana landsberg
  unsure (1)..(1649): unsure at all n locations
atgtaacttgcattctatcacaactttatatatagtttattgagcttaagttctgggtgttattcaagctaatttctgactacatagcaatgcaacatgaagatatgactgaggccgagccagccgagacaatttcaattctaagattctgaatctttctaaatataactcaaaatcgaaccattagttgagtttttgtcttctccaataacaaagtttctcgtgttaatatatattataaattttaatattgcatacatatatctttctcagtcatacgctagaaatcttaaaatttatataaatttggatggaatgaagaaagatgtagatgatggacttgtaaaatatgtaagggtgaagaattccaatcaagccaactagacaaatgaacttttatgatcgaataagaactaaacatgttgtataagtatctttatacattaacacaatattattatgttttatatatatatatatatatatatatatatatatattgtaggaatatgtactctaattttttgttttataattatatgcttcttgatatctatgagcctttttacaatgtatatatatattaccaaaggtttttaaaaaattgaagaaacacttttttgttatataaattatatagtttgagagaagagaacttgatgatctaaataattactttttaatatttgacaaccagatatgatataagcataatttatattattacataaaacaaactaaactaatttttattgaatatgtttaaagtgaaatatcataactctgaaggatcaaaacttccaagataaaacaaaaaaaaaaacatttttgcagccattttgtaaaataaatcctggagttgggacttatttacaataactgtcattggcttttaattattaatttttttcgagcaataaattgattaacaaactaaaaatatttcaatctcatatgtcacgcacacagtattcagcaactatttaaaacaaaaaatgtttgacaaacaaaaatataattgtaatcctttaaaatgagcaaaacacacctaaatacaatctttatctatccaataaatcttttttctccaaaatttgaactagattttggcaactatttaaaacaaatatttgtttgacaaaccaaaatacaattgcaatcccgtaaaatatttattttaattatatctttaattagcggtgtacagcagtttttttttttgcctaacgggtttggcaggacgttacttaataacaattgtaatctataaaataaaaatattttatagatagatattatttacaaacttttatatatacttattttaaatataaaaaattgtcttctcggtgtaccgtgggttaaaatctagtaaattttacataaataaagttatttttttggaattttccccaaaattaaacttccatttctgtttttttcattattatggttggcaacctcattcttttttctttatatcattttcagtatatatattttttgaaatatatttttataactatattataataaatataataagaggtccgtttgaatctttcaaactacaaaaccgactctggttctctagagagaccgcacctgatacttttcagaaaacataaganaaacaaaaaaagttttga

SEQ ID NO: 21478 - DNA, 590 bp, Arabidopsis thaliana landsberg
  unsure (1)..(590): unsure at all n locations
ttttcttgctttctgtttctttgctttcttctaacaatgtcaaagagagaaagaccaagctggttcaatgtcaaatagagaaagaccaatgcacaagactttgaagacgatgaccttttgggggaagaactttaggattgtctgtcggagtgcacaattcagttgcgtaaggggtcgccagatctgacactattgtcaatttcggtcgcgattttggtggcgtacgattaggctttgaaagctcagcgggcttctcagattattactgctacggttcctccgacgagcgcctctgtctcgactggatcgtcaaaaaaggagattaaagagcccaagaagaaaagaactgaggctcctaattaatttagttacaacaaagtttcatcacttgaatggaaggtccccaaataagaggttggcaaataagtcggcccactgaaacgagggtcttctagacgggctgattcgacttctcgtaatggagctctcttgtttacaaagaccanagtttctggttcatgtgttacgctgggggcacttattcccccatacgtactcatgagaatcttacatggaattcctaggggtgg

SEQ ID NO: 21479 - DNA, 305 bp, Arabidopsis thaliana landsberg
  unsure (1)..(305): unsure at all n locations
acaagaagcgtttccatgtttaaccagtgtgagagtgagagggagacatactaatgcaagacagaacattgctgtgtaagtctgaactcctactttccgatatagcttagctccataagcttgaccactcaaagtatctaaggcacatgacaatcctacctagcatcaaaaagtaacaatcaactaatcaagtaatgaggggatgcaatttgataactagtaatagatagagataaagaggagagaaggaagagaaaacagacgatgaannnnnnnnnnnnnnnnnnnnnnnaggaggaggcgag

SEQ ID NO: 21480 - DNA, 487 bp, Arabidopsis thaliana landsberg
tggaaatttcttattccatcatgatacagttttggagcgttacatttgtactaaggatattttgtgaaagcctcataatggatccctagccattcacctcggcagtgtttacgggtccgatcaacccaggctagatgggatacatggcttgttggtaaagttgtaccacctctacagagtgtaaaatatatatgtcagccgtgctcacggttaagagcaacctggaccctcacatgataattgaacttaaagatggaaaataaatcgtgatctgatgatctatcagtggtttgcttaagtgatttcacttatgtgcttttgatataatcttatacctttgattaattgggctatatgggatacacacttatttgtaagaaatgtattgctaataaaatatcgatcaactaaaatgcttactacttatccatagcctaccatgttaacttgcactaatttccccacttgctgaccctgaccaaagtga

SEQ ID NO: 21481 - DNA, 349 bp, Arabidopsis thaliana landsberg
aggattaggctagcgacctcccctagtcagctgcctgtggtgggttaatttacgttggctacgtttctattctgtgtactttgatcatattatgtaaatgactctagtctttcatattattacttactctttattgttattcgaagcattgtgctatgatgagtcatttatgtaatcaccgtgtacgtgaatttctgatcctggcacgtacatggttcgcattcggtttaccttccaaaactgggtgtgacaggcgcgcgcgccacgcccaacgccccaccgcgctccccacgccgccgcttggtgcactccagcgggcccatatgccaccccctccctctaaaactac

SEQ ID NO: 21482 - DNA, 612 bp, Arabidopsis thaliana landsberg
ccacatttattccagcacattgctagagcattgcaagcaccaaaagcctagtgaggaaattagagaatcataatccgcgtttgttcctcattagagctagtgagagccacctagagcacacaccacttgcattaggcttctcttggtcaagcgaaagtctccggcttgttactcttggtgatcagcatcacctagacggcttggtggcgttgggagctcggtgatcaccgtgaagatcttgttggtgacccgactcaagtttgtaagcggtctcgagggatccaccgcgccggagtggcaaaggatcatctcgtagtgagcacttggttcttgcgaggaccaagggggagcgatacccttgcgcgggtgctccaacgaggactagtggagagtgccgactcttcgatacctcgggaaaaattggaggagtcttctaaaccttgttttacattccgcacttaattcaagcactttacattgtgtatttgtttagcaagtatttgaagtattgtcttagcattgttgcatttcaagtattatattcttagtgctaattgttggggtgaagttgggccttgcttagctcttgcttagtctttaattagtgttgag

SEQ ID NO: 21483 - DNA, 1524 bp, Arabidopsis thaliana landsberg
gcaattttatcaaatctcttatcctcataagaaatttgttttccatttaatgttagatcttactttttaatgtgtcctactaagttgacttcacaagtcaataagagtctttcactctgtcataaagaattaaatatgaagaaattgatcaacaattctctgaacttgtttatgtgcaacgagcgaccaatcgatatatactcggtgcattggtccatgtccaaggtatgtcgtgcctcattggtgtgaaaatgaatgtttgtctaggatgtacatggcatgaggagaatatgcttttattgaaggagaaggaccaacaccacggtgttattgcataaacttatgagaattgatcctcctagtaattggcaatttgagcgttatctttctctcttaactacattttaaaatatgtatttctatcatctgttactcttcaaattcttgataacaaatgcaataaaataaagttcatttaaaatgccaaaaaaatcaaaactaattttaatttagaagtttgatacccaatatttttggattggaataaaaatacctcatctaattttttgtaatcataaaatacctcagatataaattattggtggaatcaatcccaaaaattaacggacgttacataatcattttacggtgttaaattctaattatgtatgatctagtcgatatatacagttgtttaaatacattttgtgagaatattatcgtatcctagcggttatagttacgcgaggctatctaattctcctaactggggttcgaggtccctctctctaataatgttttttttcttcgccggctgttcgttgagagatcaaaattgagagagaaatccatagtggtcgccatatatcgacggttgcttgagtagattttatgagtcaagtgtcaaagaagtttctcgtgattcggatttgttatttgggaagattgaaacagaagagcttctttgtagagtttgggaagagttccaaaagtaaatatatacttcaaagttcatcttcttcatagttcttcttctcattcgtctcctccattcattcctctagagtcggagttctctctccgtaatctagatccgtcgtggtttgagcattaaccagctcctgggtgttcaccttctcagaatttttaataattcattaatttgggtttgaaaaataattgaattgagaataaaattcatattgatttggtgagtctagagtaggagatccagcggaatctcgatccataagatagtaatttcaagctcatgttcaatttttgatgaagaaaacacagatttgaatagcaaacctaacaatcaacattgaaactgaaatgtgattgggttttacgaacgtgagaaaacaatggagttttcgtagtttcaatttagtttgatagatatttgatataaactttgtttgctgaacctagacaataattttactgtggcaaattcggtttaaaagcttgtacggagtttcacatgtcacatgaacgagcataggctattgcgatttt

SEQ ID NO: 21484 - DNA, 495 bp, Arabidopsis thaliana landsberg
  unsure (1)..(495): unsure at all n locations
atttttggaggcgcgtcgggtccgcatcaaannnnnnnnnnnnnnnnnnnnnnnnnngctcggaagaaggaaacacccgcgtgatcctcgggaataagcgagaaacgtttccacttctcaaaaatagtcgtcggcgcgcaacggaagtttgaccgtccaggaagacgaaacgacagttaaaatctaggaagataaatagtcggctcgagaaccaatctataaagctcatcgtctctactaagtcaatgagctgggggcaagctgttggggtcggattccacctagaaaaccgagccaacaatgattaatgcctcggcgatcttgtcaaaggaccaccccgagccagggtccaaaacacctcggggatcacgtcaaaggaacttcccgaggcgacaccaagaacgcctcggaacattgccatagaggattcccgacctgatcttgaagcgcctcagaaagaaacccgggaaatcattcaactaaaggggcagctca

SEQ ID NO: 21485 - DNA, 638 bp, Arabidopsis thaliana landsberg
cagacgacgagatgtcgcctcctgcctggccacggttgccccgtctcctcctcctgcggcgaggagggtggcgggacaaacccggatgttgctcttttgccacggggggaagatgatagagctggagtgcccgatctttcggtgagtggagataattccgatttggtggaagtagaccctcacgatccgactacgacgagcaaacccgaagcgccaatgcaatcgctgaaccaactcccaatggttaccgaccttgctgatgcgagattggcctgatcatgaagattgtttcctgtgcgcaatcgtagaacgaacaagaaaaagatgcgagcaatcttaatatcactcgaggtggagttctaaatcacagaggacagcacgtatttgtgcatgttctggggtagctaaagctagatgtaaaacaaaactcaagttctaaatgaaataggactctgactaaataaaggagaggcgtgaacagtagggccggcgctacagtaccgcggttactgttcacgacttccctaggtgcccatccgggccttcctgttgggccatctctaacttctgggccttcgtctttacagcatgatgtagtcaatctcttgacgggccgagtactgcccaggtgaaggggt

SEQ ID NO: 21486 - DNA, 463 bp, Arabidopsis thaliana landsberg
agggctcttccccagaatatttccgcacgagcctccgtgaacttcattcatgattttgtgagctgctcctttttccacgcaagtcattaagggtccggacgaccgccacttgaaaactttctcctcgaccagaacgaaacgtgcagcctgagctttaattttccaagcttcccacttatccgagggcacttttccttcggatatgtagcttgtgatgggttcaatccattctcaatcgcagcccaggtccgagctgacatccgaggcatcttcgcaatctgcggcaacttgtacgaggaaggcatgttcctctttgtcgagctcgatgcttggattttcgataaactccactaggatgattcttctcaagttcgggtcggatgttcaagccaaagcagctaaggggtcgtccgatgtattttgcccttggggaatccatgtcaactcgaacgagtcgaaatac

SEQ ID NO: 21487 - DNA, 1016 bp, Arabidopsis thaliana landsberg
tatccctaacaagcagattactcagacatattgaatgaaacatacaacttatttgagtatgaaagcataaacacagcaaagagattaagggaaagaaaggatctcttcactgtattgagatcttaatcaatgtctgaaaacactcgatgaatcgcttatatctcttagtaaaagggttttcaatagcttgataagaacttgagaataaaaaccggatgataaaaacttaggtctaaacaatgtatataaaccctaaaaacgtccagggactgattaatgcaaatagggaagtcttctggagcaaatttcctcttctgtaaactcgaaagcatctaggactttgttgggccgaaactggtgttcgatcgacaccaagactgtgtcgatcgacactactcgctgattcttgaatccaaaatcatccttaacttccttttccttagcttttgctccaaaatgtctcctcatttccattgttgtcccaatgcataaaatacctgaaaaaggcactaaaaagactcgagaaataacataaagactcaaaatcctatacctaaaacatcgataaaatcagtaaaaatagagatatatccactccccaagacttaacttttgcttgtccttaagcaaaacacaaaagtcgaacccgtggaagaggttttgaaaacaaaggaactcccaacattctctagcctattgccatgatcatcaaaactaaatccacatgcctaacaatcaaatcctaaccaacatgtacttctctgcaagcttacacatcattctagattccatacctaagtttcacaactatatccactagcctttcatcgctgtgtctcatcaaacaagctaacattcaagattcttctagacttattcttgtactataccatgataagtggaccattctgtatattttttttctttggtattctttctctccccagacttattctttttagagagtaaacaaaggggaactcgcatactggatcgacaccctcgacattttttca

SEQ ID NO: 21488 - DNA, 537 bp, Arabidopsis thaliana landsberg
cagtcggctcttaggatgtcagaggataaaggctagtcacttgaaggcagcaggcctgtgcaacgccttcccataccatcttggaaatgggaggacatttgcatggacgttatagtgggattacccaatacctccaggcaccatgactctatttgggttatcgtggacaggttgaccaagactgctcatttcttgccagtgcataccacccacacgggcagagtagtacgctgacttttatgttgatcagatagtaagcttacatggtattcccaagaccattgtatctgacagaggagcaccatttgtggcacgattttgggagcaattgcaagagtcacttgggacccatgtcatccgaagctcagcatatcaccctcaaactgatggccaaacagaaagggtgaatcagattttggaagacatgttacgagcatgtgcactacattatgggaaggattgtgacaagtgtctgtctttggcggagttttcttacaatcacagctatcagtcctagtttgaagattccttgcttca

SEQ ID NO: 21489 - DNA, 657 bp, Arabidopsis thaliana landsberg
  unsure (1)..(657): unsure at all n locations
gactttttgtaacttcataatcttggtaaaagaaagcatcccactcaatgatatgagcaacattattacatgaaattggagcttgatcctttgcgaattgtttttcatacaaaaaagacaaaaaaaataaagatgcaccagaggtaggatattcttcagtagatgtgcttggattcgggcacagtgctattgactgtgcgagctttagactcctctcgaaaatcgcgctgctgctgagggtgttggtgcccttctagctattggcttcgggctagagtaggtggtagcggtggtggtggtgggagctgggcccaggaagcctgagaatggcttaccaaagcaaaagaggtcgtaggatgttgattacctacatactctgggacgtagggagaatagcatgaagcagtatgtaggacctgcttcggctgattctgctgtgcttnnnnnnnnnnnnnnnnnnnnnnnnnnnnnnnnnnnnnnnnnnnnnnnnttgtggtgtgacctttgtcttcgccgcagaatagacaaaacagtctcctgggctggtctttgtatcttcctccgaagcttctgccctctatgcctcttggagctggtggcctgaatgaactttgttgcggccctgatgnatgggagctgtctgttgcctttggggtt

SEQ ID NO: 21490 - DNA, 1015 bp, Arabidopsis thaliana landsberg
  unsure (1)..(1015): unsure at all n locations
caccaatgaaaaaacaaaccggctgaatgcaatttttccagttttatatctcacttagacattttatcgaacatctagagtgcacagggagctcatctacagaaaacttcataatcaaaatcccaagtcaaactcgttaacactaagcaacatcgatatagagagatagctcttaatcgatccacaaacccatatcgatctaactgaccacgaactaacaaagcaaagacgtagagagaaagaaacatagaaacaaaagattgagggaaaaaacaataagagatacggataataagaagaagtcgaaccaaagcttcgataatgacgttcactacaaaagtagacaacgacaacctaatctaaatcgcagattcaaaggagaaagagaggcaaaaccatcaaccttctccgaccgaatccaacttgccttctacttctagagattcaaaatccaaaatggttgggcaagagggtgagcaaaatacaaaacaaaggaagagcaaatgacttgaagaagaaagtagagtgaaaatttagatttagagatggacacgggaagaaattgaggggttgaaggtggattgagagagacgtagctttagatttgggttttttctgtcttattcggttttatgaataaattatgatgattaaattttcagatctgagatagattgctcttaagtaaaatatttcttctaattattggcggaataagggattttagcttcccgcttaatgattttctatcttaacgttgttttagtgctattatatagtaatcaaattaaaaaactatctttcataacagttacggaaaatgattatcctcgtctgctatcaatgtggatatttctggtagtttataattaactataccaacagacttatttccatttttctggcaattaactatgtttttctgagtaattctgctgccactacaaattactcgactttatgagtcaattacattnttctatcttttaactttgccaccacgttacagtatata

SEQ ID NO: 21491 - DNA, 839 bp, Arabidopsis thaliana landsberg
gtacgagtcttttgggaaagactttgattttgcgtgcctatgattccggctgcattcgtaggtgacttttgcgtggagacttttggaaaagacttcgattttgcttgcctagtattccggctgcacccttaggcgacttttgcatggagagtcttttttggaaaagacttcgatgttgcgcacttattgtgctagtccggctgcacccttaggcgactttttgcatggagaatggtttcgtgcacttattgtgctaatcgggctgcacccttaggcgacttttgcacggagagtcttttggaaaagacttcgattttgcgcacttattgtgctaatcctgctgcacccttatgcgacttttgcacggagtgtcgcacgcgagggaggttcgctgccctcgcaggtgacttcgatgtggtcgaatgccgaagaccgtcgatgcggtctttttcgacattgctttaattttttgcgggggattttcgtgtgtatattacatcgtccgcctcattaaaaacctcaccccccgggaggaaaagagtgcgggccggaataagactgtttggtgaattacaagtgcgtgttagccctgaggatttaaacaaaaaatttacggagattgtcaatattccaggaatgttctaggtcttcgccagattgtgttgttagtctgtacgcgctgggagacgacttcgtcttgacgataaatggtccttcccactttggctccaacttaccccgtgactctgtctaggttgtgcggacaagtacgaggtccccttcgttgaattctcttgggacgactgcgtggtcgcgccaggccttcgtttgggcttggt

SEQ ID NO: 21492 - DNA, 1099 bp, Arabidopsis thaliana landsberg
aaagaaagtgtcgactaggacctttttcactgaaatcctttttccggaaactgatgcgatctgggaactccagagaaggcgtcatcaaggaacaagtcgactcggaaccaacggaggaactagaagaagacatgatattatgatgctgaagctgactaagtagtgcaatctcccatagaaaataaaagatatagcaatgagataatgctacagatattagcacttaccctgaactgccttcatacacagaaccaaatgatactcgtcccagaaatttcctcttcagccaagaagggacgatagatccttcagaggcataactcggcgaaataatggatactgtacttgaggagtcagcctcgtttgtagcgaatgggcatgcatcatgagccgtatcccccaactggacaaacatacctcgcgtttcttccttttccacttcctcttcatcagagctattatcagaagaggaggaactcggccgcttaactgtttcacttggagcaaaatacgtaaggaaatcccaagatgatcctggaaaatcaataagaggtagttttattcccggagggggctgaattattggtggtcttaccgctttaataccaccatcaacatccacaacatcattagggataagatactctctggatttcaccaaaatatcaccggcgaagatagcagttacgtccattgtagtctgtagacgacgtcaaagagatagagagaataaatacacaagtggaaatatccaaacaactggcagtgacactgatactgttagagaaaaaggaagaagcaaacaaaagaagttgacgacgacttatgacaagagttgacttttcaatctagtaataatatctgaataataattgaatactgaattttaaaaattcttgtattatttttgcgggagacttggtaaaggtccacggataaaatatttagcatcaaattaggatttttctccgtgtcttcatcacttgattaaaaattcttaggtatacaaagaaatctaaaagcgtttcttgaagattatttgcacttagagaagctcatcgatggcaaaaaagttttcaacggggcaaatattgtaaga

SEQ ID NO: 21493 - DNA, 802 bp, Arabidopsis thaliana landsberg
gattgagcacactctaaccaacagtaccctttcatacattctatttctaatttagtaattggatgcttacttatgccaacctctctgatgcttactaatgccaacttttcactgtgaatttctccaaactacattcacatgtttcaactagaaacgatactcatctcgttatataaatttacagttttgtaggtacttgttttaccttggcaagatcaggacgattcaacttgagtacaccgatgcaaaagagagtctcctccaagctgctaggaaagcacctgttgcgtctctgggattcagaatccagtgcaacaagtgggctatcatagttcggctgttgttgggtgaaatacctgaacgatctatcttcactcagaaaggaatggagaagactcttaggccatattttgagctgaccaacgtgagttcaatcttttttacatttctaacatatgctttaattaaggttttcttgctaatactcttgtttaaattttgtaaggctgtgagaattggtgacttggagctgttcgggaaaatccaagagaagtttgccaaaacatttgcggaagacaggactcacaacctcatagtcagactccgacacaacgtgatcagaacaggactgcgcaacatcagcatttcctactccagaatctctctacaggatgttgctcaaaagctgagactgaactcagcgaacccagtggctgatgcagaaagcatcgtcgctaaagccattagagatggagcaatcgacgcaaccatcgaccacaagaacggttgtatggtctccaag

SEQ ID NO: 21494 - DNA, 1055 bp, Arabidopsis thaliana landsberg
acgccagccccaagcaaacggacgacgccagcacgctcgcaaaggacttgctgggcgtcaccctcgtacctgagacagcggacgggtctacccctgacgtgacttcatcaccgcccgtcgaccaagaggtaccgaccgattcccatctcacgccttctggattcagcctcaacccaccaagcgacttcgctttggtggacgctctcacagaggcgagtccaaaccctctggggtatcatatgcggtcaccctgggactggctgacggccatctcgacctatgggccctcggggtccgaggaagatgacgagcccgatttctgttgggattctccggacttggtaacccagtgccatgcgggactttatgaccgcgtgcgactactgcctttccgactgtttcgacggtagccgcagcctcggcgacgaggactgcggccaagccatgaatgttccatgtcgatctaggggtctcgacgaaggcaaccatcttggtatgccagagaacggtgatccccctaggcctgcgcctcgcgttgacattcttcgggagctagctgtggtcccaagtcttgcggggggtcaggatgcacagctcgagcaaatccgcgaggtataggccaggctcgacgaggaagcaggacaacttgtgcggcttcggcaaaatataaggcaggagtgggcaggccgagcaccggccggagaagcgcgtcatctggcccaggacgtccagcaccacatcgccgacgatgccagggcaaggctgccccccgcttctagtggggtcggccagaacctggctgcagcagcgacactactccgagcgatgccggaaccatctaccaccgaggggcggcgtatccagggagagctcaagaatctcctggaagatgccgcggtccgacgggccgagagctctgcctcccgaaggcaggggtacccccccggagcatcgcgccgcggcttcccgattcacgcgggaagcctcggtccacaccgggcgcacgcggaacacggcacctgcggccccgggtcgcctcggcaacgagtaccacc

SEQ ID NO: 21495 - DNA, 741 bp, Arabidopsis thaliana landsberg
aaattgcatttactagaacttacaaacgaataaggaccaactcttctgtatttgatatagacactctctcgaaacttaatcttctctaatcttcactgtaaatcttaaggaacaactctccacaagtttttataatttatatatacataactaagctattacctatactattaagattgtgtcaacgcaaaattgagttattctttcttatttaaatttgaactattaaaaatatgtaaataattaatgaaaatctttgtcaaaacactattaagaaaataatttcaaaaattaacatgatgataaaatatagattgttaattgtttttttaattgttttcaagtaatttaatcaataatatgatgaggatgattaaggaaattactataatttgatcttttaaagaatatcttagcataggtatgagttgtttttgcaaaattttaataattgatttaagttatctaaacgttattaaaattattatccaaattatctataattatccgaacatattcgactcttgtctattctggtagtgatattttatgtatctatattattcatatatcgtatcagtataatctgacttatttaaaaatatctatttgatatgtattttgatattaaaaataatttaaattcgaagtttgtgtacctcgttaaaataatcccaaaaattttttagccggaaaataaaacattattttaccgtatattgttggggggtggaaattttt

SEQ ID NO: 21496 - DNA, 609 bp, Arabidopsis thaliana landsberg
cttgaaggtcttttgcatcataatgatactgggacattttgccttcaacacaatcaaacataaatcgtctaacctgtaactctcggttctcagcagccaggttctttagttgctcttttgctttggtaatcctctccataaggtaagtctcttgatccatcatcttcttggttcgggctgtcggcggcatctccagaaaccttgaagccacctttttagcaccttcccttgacggccatgactctggaaccggtatgaatggactgtagatgagagcacaagcttggacaccacacagagttgacaactcgtggagtttcttaaaaatcccgtctttcctcttcatgaaggatgttttccttgatctttcattagctatcaaagatagcttcaccttcttcatccccatcaatttgtttttttttgttttgttttgtgtggtttgtataatttgtttgctcaaaggatgtttatatagcaaagaaaggtgattctatagacactaggattcttatcactttggtggactaattaattctaaataacatccaggaaatctcttatcaattaattgaccaggtaattcattattatctatataaacatatt

SEQ ID NO: 21497 - DNA, 674 bp, Arabidopsis thaliana landsberg
ggtattcaccccctttactctaaacctatcattatgccatgtcatattataattaagaaaataaaatctgtaagcttttaattaaatgaggttaattatatgtaggatttagactttataattaaacaaaattgtatatctgtttgtatttataaatataaattaaggtttagattttagaattaaaaaaaatgatatgttagtttgagtttattaaaagtggctagggtttacattttacaattaaataaaattatatgttagtttgagtttataaaagagtggttagggtttagattttacaattaaataaaatttatatgatggtttgggtttataaaatagaattagggtttagatttcttttataattaaacgagtttatacgacggtgtgggtttataaaagagcggttagggtttagatctttttttacacttaaacgaaattaaatatcagtttgggtttaaaaaaagagtaatgtttagatttgttattaaatgattgttttttattttataaacaaatgattagatttgattttataattaaatattttataaattatatggcacattctaattggctaaaaaaggaagtgaataaaagggttaatatcgttcgtttcaaattactttttacattattttttcatcaaaaaaattttacctaca

SEQ ID NO: 21498 - DNA, 3760 bp, Arabidopsis thaliana landsberg
tctttactataaatacgttcgtttgctcattgtaaagggtaagtcaaataagagaagttcattcactctcatattctcttgcctctctcttcatttttcttttattgtttttatttgtagaatattatatattacaatattcaaaagtatttaatttttatttcctatcaaatttatttcaaaaagatattgctttacatttatatcattaattaaatcttatttttattaaattatattatattcaattaattgctaattttctaaaaacatgtttctacattaacataatagacgaaggtaggattttgtgagaatattctcaagatattgcatatttttagaatatgacatattttgagaatttggaatatttccaaaaagattcaactcagcaaacccaattactcacacacatgacggtccacacgtccgacagccctctagtcgacgtcgtgacgacccgacaacccgcaacccgactcagcccggttcggttcggtccggtttggcccaagtgtcccactttacacccttatttctcattcaatacaactccgtttttgacgtatgagtataccattttgtaaaactctttaccagctttccaatgcactaatcacccgacaattccgttcagccgtttggccggaatttggccggaaactcaccggaaaaaatttgtcaaaaaagttcgaacatcaacttcaactcatcatccattttattatcaggtttctttgtttaagagattttttcaatcacttacaaactgaaccaattacccggacgcttgaatagacccatgaaccaatgatcccatggtcgagttttgatcaacagaaaaagccagagagcatcttacttaagttcagagttttacattttttcttatgttttcagatgtcttccgtaatgtaatctcggtgtttaaaaatctgtttagtctatctgttggctttccaaacaacttcagggttttactgccaattctgctaaagaagtcagcaaatctaaaaactcatcatcaaggtaatgcattagaaagttgaagcatatgaagcgattataataaaaacgataatcaatgataaggtgaaattaaatgtaaattgtctttcctcttgtttgtaccgaggttgtaacaataattattaaggggtttggggagaacggagtaacttctttattaatgacgaacagaaagacaataattaacagaacggaaaaccgtaagtacagaacggaaaaccgaaagtacaggtcagaaaatcgatattaatggtcggaaaaccagaaaatacagaacggaaaactagaaaataagagataaaaagctaggcaacaattctctcttaaatcctctgagtggtgacttaggttctggatccctcttcttagtagtgtctcctcttatttataggcaagaagctgatctagggttctcttagtctctcttgcgatttctccgttttgcccttctgaatttatcgggctgggccaagccgtgatgggccgagctgtgatggaccgagcagtcattctgatgggctgttattctgattggccgttcttccttgttagtagctttcttgacttgttctatttgtgtttgggccgaattgggcatggagggcaaagcccgtatcccacaattagtccccccccgagttcggcgagagaaggttgcttgcgatcggcgaacattttcctgaaatcggaactatgccaatttggcccgaaccaaggaaaaattctttgtttgagcaagtgtggatttttgcaagagtcggagaatcgcaagaggtggaaagatatatgctcgtttgagagctcgacgatcttcgaagatagatgattgtaggagagcttgattatcttcgatgataggcgctcgtgggagagctggaagatctttgaagataggcgcttgcgggagagcttgacgatcctgaagagaggtgctcatgggagaaattgatgagtttggagatagtcgctcgtgggagagctataagatcttctgagatatgcgctagcaggagagcctgacgatcttggagataggcgtccgtggaagagctttaagatctttggatgtatgtgctcgtacgagacggaagagctcgacgatcttggagataggcgctcgtgggagagctagaagatctttggagacaggtgttcgagggagagcttgacgatcttggagataggcgctcgtgtgagagcttgacaatttcggagataggcgctcgtgtgagagcttgaaaatcttagagataggcgcttgtgtgagagcttgaggatctcggagataggcgctcgtgggtgagctagaagatctctgagatatgcgctcgttggagaggttgatgatctttggagatagacgctcgtgtgcgagcttgacgatcataggagacatgcgctcgtgggagagcttgactatcttggagatatgcgctcgttggagaggtagaagatctttcgagatgtgcgctcgtgggggagctaaaagatcttttgagataggagctcgcgggaaagcttgatgatttttggagataagcgcttttgaagagttaggtgtttgtgcaagagcaaagttgttttgacgaggaacgtctcggtgaagatactaaaatcgatgcaaggcgtgctggtcatgtataaaagagctcaatgaggtcaattttgaaggtgtacttggtgagattagtgtgaggagcatgaaagataaaggaggtcggccgtagagatgtttaggcgagatcgatgtgaaatgcgtaaatgtgagcacgaggtatttgagctcggctacaattttccgataggaggtcggtacaagttgcgttgaggttgcacgatatgcgttaaggtcaatgcatgttggatcgtgcactaggtgagtcgaggtcgacacaaagcgtgtaagctcggcaagaatctttcgtcgacgtaggaaggtgaactcgttcttgcttgagctatgagttcgaataggtgagtgagttcggcgggactgagttagcgaatgaggtcggtaatgagttcagggagaatcgttgtgagatttgctggcgatttaggtaactgctttagagctaggcgaactaggattttcgcaatgtcttatgatatattgcgaaattgcatggcttcctagctctaatctgctgcgaatttgcaaagctgcctacctccgatatgttgcaagtttgcgagacagcctaggtttgttcttctacaggtttgcgggaatccttaactctaatctggtgggagtttgccgagctgtcaacctttgttcttctaggagtttgactagctatgtagctctgatattctacaaatttgttgagatgcctagctccatgcttctaggagtttgtcgagctgtgtagctctgcttcactacgagtttgctaagatgcctagcaccgatatgctgagaatttgccgagctatgtagctctgatccactgcaagtttgctacgacgcatagcaacgatatgctgggagtttgccgagctgtgtagctctgatccactaggagtttgctaagatgcctaacaacgatatgttgggagtttgcgaagttccctagttcgatcttttgcacatttatgggaatgcctagcgctgggtgaagaacgatcggcgataagtcttgtttggtgcgatggatcttgtcaacaagatggttctgttccatgtgatggctttgtatagtgagaaggttcggtggaggttgaa

SEQ ID NO: 21499 - DNA, 559 bp, Arabidopsis thaliana landsberg
tcatttttggtggaaaatgttgaatcgcgtttttggcgggaaaatgatgaattgcgttttggcggaaaatgtttttggcacgaaaatgttgaattgcgttttggcgggaaaatgttgattgtcgtttttggcgggaaaatgttgaatgtcttttttggcgggaaaatgttgaattttttttttgtggtaaactgttaaatcgcggtttaggagaaaaaaatgtgaaatcttttttgacaagaaaatgttgattcacttgaaaaaggattttaaaaaaaacgtgggtacccataacccaatgaggtaaacccatatgggttttatttatttgggtaccagcccattttaaacctgtgtttttttccagaaaaagtagatttataggcttaaaattttatgtgggttttggatacccaatggattttaacccatcattaacatctctagctgcaggcttccttatacagttttaccacatctggaaagagagaaacgcaagacttcatacaaattcctttcgtttcctcttgctcttattctggacattatatatccattc

SEQ ID NO: 21500 - DNA, 586 bp, Arabidopsis thaliana landsberg
aaaatgggtccaaatatgtctgatgtgactccctacaacaaaagtataatttacagtaccgtctctctttctcctcttccatttttaggtgcataatcctaaaagacttcagttttaccctttacttataatggatacgattaatttccttgtcgtatatgtacaaattaagttttgttttggtataaccaaatacaagccctacaattaagatctattgccttagctagattttaaaattttattaaatatacagaaatttaaaaccaaattaaaagaaaacttaaataatgtatacacgactataatgaaactacataacaagttgtttacaaaaatatcatattttcaaaattaatgaaactcttattacaaaattcaacattcattcactaaaaaccttatactttcatggtttttatgtatatttgagtaaaaagaattaatttttttaaatacttgaattctggtatataaatacattgatacaaggaaatggtactttgatgagggaataccatcggttccactcacaaaaaatattttaatgtttgataacaacctagattttacttaaattttttga

SEQ ID NO: 21501 - DNA, 836 bp, Arabidopsis thaliana landsberg
  unsure (1)..(836): unsure at all n locations
acttaacaaatctgttttagtgttgtactctgtcattgatgggccgtcttttggttttgtcatttgttcagatccttgtaagtatcttgttgatggattctcgttgtactactcgctcaaaaattaaaatcatacatgaactcttaacagcaaaattttcaaaatttattcattaaaggttctaaagaggtgaatccttgtgaaaaaaacaaaaaattaaattaaaatgtgaattaaggtcaagaacgcaccttagacttttttttttgtttgtaagaggctcatacgtgtcaatttttnnnnnnnnnnnnnnnnnnnnnnnnnnnnnnnnncttgtgtttttttttatctttctcgtgtttctctctgagattgaagctctgatgacaaaatcggaagagctggttaccatcggcaattggccaattgcaatatttgttttgccggcaaaggagatgaggagtgttttttgtggatttaggtggtcattaaattgagatccaacagttactcagttcatgcaacagattcgacagtatgtgctcttcgagcttttcctcccttactacttcttcttcgatcggaaatctagttttctatccgtaatggtatccaatttcgtaactttttgtgttggatttcaactttgtggcctaaattcgagaacccatggtctactgattgagaatctgnnnnnnnnnnnnnnnnnnnnnnnccatcggtaaattaaggggttcttatgtgctattgattgcaattactctctttgaggtattttgatgaataaatgcgaggaatgccactttctccaaattaatacctaagaacgtcacccc

SEQ ID NO: 21502 - DNA, 1108 bp, Arabidopsis thaliana landsberg
gaacattccaaaaaacattcaacattcaagtttttaagtaaaccgccaaacaaacacaagttcatgttttcaaagtcagggaagagaagtagggaagctaagggaaatcctcagttggatcttctaaaacagtagaagactcgaggaaggcgagaaaatttgggtcagttttggtgaagtacttcttcaccatcctcaagtgctttatcactacttgttgcccattttcaacccgcttgatctatgcttgctcagctgcaacccggaaagcctctgcttgctcagctgcaacctggaaagcctctgcctcaggatatgcttgtagagtagcttgttcctctattttgcgattggcttcctcaagctgtgagtgcagggttgtgaaaggagaactgcttccttcctgggtactttcgcttcccattgatgctccctaagcttccaactctatagtattcccctctatcgtttatgatagttgactgcataatcaaaagaaaagaggattagtctttgtcagtttcaaagcgataatatcaaaagtacagagaattaaccacattacctaaaagaagatctcatcatcttcctctagagatagatgtgatcgatgcgaagtaccattagacccttcatcattctcaaaaacagccaacttagctcccttattcttcttatatacctcatgaaccttctgcgccttcctatcgacaaaaatgtcatcctttttggtatgagtcctgagaaaaacttcaccaatagtaggcggtcttcccaattcaactttttgaaatgttgaaaacaaaacaagtgaacttcttaacattgtataagtaaagaaaacaaatgttcatagctaaaagaacttaccatctctacctcgatttgtaagaacgacattggctccgatacatgcttgtgaggaccaagacatccgtgctaatgatgtggttgaattctttgcgttggcttcttttgtgtcccaatagtcacactgcccacagtgtggtctcaatccaaggaggttgttgctgtaacctcgctgccttataaactatgtttttcatacgcagttgacagatcttctagaatttagcttcaatcaccg

SEQ ID NO: 21503 - DNA, 582 bp, Arabidopsis thaliana landsberg
cgtcttaacggacataatttccgttgtgatcactcttttcatcttcatgaattgttcaccgtacggtgaaattcccattgatttgtaattgtctccgattgtctccatgatgaaaagttgaggccggtctgccaaatctgcgtctcgctctctaaacgcttctctagcgatctcgtcggagtttatggtgatggcacggatgccggcaaagttgaaacatgctatatctgtttttagctctttcatggcaaggcggaaatatttggacctaggacgagtcatgaatagttcgggtagattgccgaggatgggccatcctggtgggccaggaggaagctggcgagatcggtctttggttttggtgggccttgagagtattcgacccagtagagtgattgatgccatggagaggataaagactagtaggatgtgaaaagggtatggtaatgatgtggtaaagctcatcatgatgtatgtatgcgtgtagtgaggtgtgcatttgttagaaatgaacactagcgatatctggaaagtgattgttgtgtggatgatttatagaatcgatttcatgcatgtgatgct

SEQ ID NO: 21504 - DNA, 731 bp, Arabidopsis thaliana landsberg
tcatcctatctacatacagaaaagatcaaattttggagttgtatataaactcctcattcgaattttgaaatccataatagtatatcgttggattaattactttcgtaattatctaagttttagcttcgtaatatatgttaaacctgcatgcatgacagaaaacgaaaagatgatggtgagaggtagatcattgatggtgagcaccaacgactacggcgagccatcggccaacgccaaacacaatccacctggaaggcgtcgtggaggaggtcggagagggtaaagaaataaaaagataaaaataaaaaaatatggttttggattcatttaagatctttaattttactcattttctctcagtatgtcatctctttatatactgaaaaataaaaaccttccatcaaataatacgttctgatacatttataaattagtaatgaacacctagactcgtatcttctaatctcaatgtttaatgaatggtaaaaataattatttaattttccgtggtcaacaatgcataacctttttatttattttgtcttcttacctttcaaaaatttctcaacttgtcaacagaaaaaataaaaatcccaataacaaaggtgacaaccgaaacagaagcacatggccacaatgcttaagatggattaaaaaaatagagcaaaaagaaagaccaaaatttcagtagtcaagagtattattaagcacgtataatttggcaattgttt

SEQ ID NO: 21505 - DNA, 2471 bp, Arabidopsis thaliana landsberg
tattatagttgttgatttatttcggcaaaaacaagattccaaaatatttaaggatcgaactgaattagtttagtatttgaatttcttagattctctaaacaaattaattaatttaaatatgataaaaaaaaatattacaaatttttctcacgttcaattcgtttctctcctattttgaggctgaacaattttcagctaaaaagtgtaaattttcagctttatggtggtcccaaaaaaattgggttgaatctttttttaaagcaaatggtgaatttctggaggaataaagttgaacacacgattcaactcttccaacttagcaaatctatgtatccatttgcagccatatacaggtggaggttcacataccactttgttcttcttaaaaaactttttgtccttcctgtacggatgactcatcagaagaaaacgacgatggcaatcaaaccagcttgtcttacgaccatgtttcagttgaaatgcatatgtccgatgaatgcaataaggacaagataacctgccatgtgtagtccaacctgatagcattccatatgcaggaaaatcacttatggtccacataagcattgcatgcattgtaaagttttgttgttgtgagtaataaaatgtacgaactccggtataccaaagctgatgtaactcatagatcaaaggttgtaagataacatcaagagaacgtttaggatgcttaggactagagactaaaatactcaaggataaaaattctcgctgcatacacataaatggaggtagattgtatggtgtcacgattaccggccacaaagaatactcccgaccggacataccaaatggactaaacctgtcagtgtatagaccaagataaacattcctactctcccttgcaaagtcaaaatgtaccgtgttaaaatgttgtcaagccttcgcatctgatggatatgtgacctttccatctaaacgtgaatgctcagcatgccatctcattgatgcagatgtcctttctgattgatatagtcgctgaagtctatcggttattggaaggtatcacatacgttggtacgggatcttggttcgtcgtgaacttggcttatatcttggcttcccacaaaatcgacattccagcaattggtcatcttctttccagaatatcatgcaattatcaatgaaaacatctatcatctctgaaggcaacccaatactatataccaacttgtatctcataatactacaagaaaacatggtgatatcctaccaattttcctacgaaaagtttggtagaaaatctttcttaccaagtacttacgattttcctacgaaatttcctacaaaacatacggtaggaaaatggtaggaaattttctacgaaaatccaataaaatgtagagtcgtaggaatatttgtaggaaatcggaaggaatttgatgggaaaatacttggtaggaatttggtaggaaactttctttcaaattttctacgaaacttttaccaaatttttttttatagaaaattggtaggacatactccttcatatttcctacgaaaacaaagtcgtaggattgttgtagaaattttgtaggaataatattaatagagttataactatttttttcttgagctgagagacgtgaaagaccgagtgaatcatggaatcttgtggcagcaacagcttgtaagcgacctcgccacatttatccacaatcttataagggccataatatttgggagctaacttctgattatacctcatcaccacggagccttgtcgataaggctggagtttaacaaaaaccatatctccaatgttgaaactgcgttcagtacggtgagagtcagcaaattgtttcatacgatgttgtgctcttaagagatgaaacttcagcaccaacaacatattttctcgctcttgtaagctacgcgccaccactgcctctttggattcaccaagtaagtagggaaggtgtattggtggagcttgaccgtaaacagcctcaaatgggctcatctgaatagaagtgtgaaaggtagtgttataccagaattctgccaaggacaaccattcactccagaggtgaggtttatcactgcacatacaacgtaaatatgtctccaaacaccagttaacaacttcggtttggccatcgctctgagggtggtaagcacttgaaaacttaagctccactccttgtaaagcaaaaagctctttccaaaatgtactgaggaaaactgtgtctctatcactgacaatggatttaggacaaccatgaagcttaaagacattgtccatgaacacttgagcaacagacatcgctgtgtaaggatgagctaaaaagccatgaaatgagctgcttttgtaagacgatcaaccacaacaaagatcactgttttgcctgcagatggaggaagaccatctattaaatccatggagatatcagtccaaatggtttcaggaattgggagaggttgtagaagtccag

SEQ ID NO: 21506 - DNA, 1830 bp, Arabidopsis thaliana landsberg
  unsure (1)..(1830): unsure at all n locations
aacggtctcgttgttattttctcactagctaaaggaaaaacttggccacgttgatgaaccaccacttgaaaaatcttgaagcctccatttacatcaaaacagtcaaaccaaattcgcaatctcacaagtttcccttccatcccaaacaacactttattatctcttgttatatataaatctcaaacaataacactaacatttctcaaaatcaagaaatatggccacaagagcttctacatctagcagagtctctccagctttcactttcctcgtcatcttcttcctcttatctctcactgcttcagtagaagctgctggtcgtggagttaacaatgacaagaaaggcggcggattaggagcttctttcatattcggagattctctagtcgatgccggaaataataattatctatcgacgttgtctagggctaatatgaagcctaatggtattgatttcaaagcctccggaggaactcctaccggccggttcaccaatggacggaccatcggtgatatcgttggtacgtaacaaaaatgaaaaaaagttctataacccatatatagtaaaatgatatatgtggtatacattattagtctagagattatgttcaactaacacacctacacatgtatgttgacgtttattactctttttctttgttaaaatgattaattttttttagtgaatgattctaaaacgttaaatatttgatttacgtttttttcaggggaagaactcggatcagcgaactacgcgatcccgttcttggcaccagacgcgaagggaaaagctttattagccggagtgaactatgcatctggaggaggaggaatcatgaatgccaccgggagaatctttgtatgtaccaaactaattttaatcatatgtgcatttaaaaatttctaaaatttattctagagttatgaagttttaaggaattgtaaatatttggtaggtgaatagattaggtatggatgtacaagttgatttcttcaacactacacggaaacagtttgatgatctacttggaaaagagaaagcaaaagattacatagccaagaaatcgatattctcaatcactataggagcaaatgatttcctcaacaattatctattcccactactctcggtaggaacacggttcactcaaactcccgatgattttattggcgacatgcttgaacatctacgcgaccaactaaccgtaagcaacaaaatattgatctctatccatcaaaataaagttagagaatttttgtttagttcatttgttatcatatgcatgttatggttgaaatacagaggctgtatcaattggatgcgaggaagtttgtgatcgggaacgttggaccgattggatgcataccgtaccagaaaacaatcaatcaattagacgaaaacgagtgtgtggatttggctaataaactagcaaatcaatacaatgttcggttaaagagtttattagaggaactaaacaagaaacttcccggagcaatgtttgtccatgcaaacgtctacgatctcgtcatggagctcattactaactacgataaatacggtaatacatatatttttgtcttctacaactcacacacgcacactaccannnnnnnnnnnnnnnnnnnnnnnnnnnnagattatgaatatatgaaaaataaagatttgtggatttgtaaacttggtagggttcaaaagtgcgacaaaggcttgttgcggtaatggaggacaatacgcgggtatacttccgtgcggaccgacttcgagtttgtgtgaagagagggatanatatgtgttttgggatccctatcatccgagtgaagcagcaaatg

SEQ ID NO: 21507 - DNA, 689 bp, Arabidopsis thaliana landsberg
  unsure (1)..(689): unsure at all n locations
taatgtaaatagggaagtcttctagggcaaatttctacttctggagactagaaagcgtctaggactttgtagggccaaaaccggtgtcgaacgacaccaagagtgtgtcgatcgacaaaaagagtgtgtcgatcgacactcctcttgatacctgaattcaaaatcgtccttagcttcctttttctgagcttttgctccaagatgtctccttatctccattgttgtcccactgcatagaatacttgaaaagacactaaaaagagtcgagaaataacataaagactcaaaatcctaactctaaatcatagataaaatcagtgaaaatagggatatatcaacaagctctcctagcttttctagaacactctccttctgtgtaatagtattgcactcttggctcagctcaaccatatcctgaacttcttgggatctttctttcatcatcaatttgtgatggtaagcatcaacaaggatatctatgcttttaactctttgatgcacttgatgaacatcatcttgcccttccattgtcctgagtttggacctagtgatcaatctgtntttggagatcactanagtagaatcatcttggtatgcatctcacanatgttgtctacactgtacacattgtctgagttggactagtgtgacatactgtgagcgggacagctgaggtgtctgctgagtga

SEQ ID NO: 21508 - DNA, 520 bp, Arabidopsis thaliana landsberg
gtcatgcttcggggaaaaaattatcagaaaaagaagaacaagaggcccaacactatgcccaaaagttgaaatatccaaagggggcgttgatatttaatggcagtggagaagaagatttcttgtattgcctccccgacagcaaggaaatttctgtctgtcgggagatgagcagaagcttcggattcccaactttagaagacggactttcggtgctgtcaaagaacgatctggctgacagcctagcttacaacagtttaaaggtgcgacaaatgaaattcttatatttttgttgagttcaagatttttcgtttgtttaaaactattaacacagacatattcctgtctgcagggcctgatactcagcaatgccctcagagcacagaaagatgctgaggacgaaggatgtactatagccctgaacaaccttcgttccgaagtaattgaactgaggaacgaaggtctcgaaaaagacaaaatattgcattccttaataaataaaataaaagaagacgaagctatt

SEQ ID NO: 21509 - DNA, 848 bp, Arabidopsis thaliana landsberg
ggccgagtgaattgctgcctcctctgtggctgccttgatcgtttgaactggtcgagtagaattctctgctgcgttccgtcttggttggatagagtagaaggtcgagtagaatccttgtaagctccttttgcacctgaaaacacaccaaaacatgcaatatatatgcaagatgattctaaatgccttagtgtgcaaaataagctaaatgatataaaacaatgactgatcactaagctaaatgatgataaaatacatgccctaaaatgagtaaaatacaatgttatcaactgattctcatacctccacgcggcagacgaccacctgggagaccacccaccaaaagaatccatctaccggggaaaaccgggtaagtttttccccatcctaactgctatgcaatttttactttattttaactaagatactaaggttttacaactttcagaaaaagaggcagaaaagactcattcctaatcagtgtacaagatgttggaaaaccggtcataacaagaagacatgcaaaaaccctatttagtcgatgacttttttactcgcgatggttagagtttacgtttctgtgcttttggacgattttctacgtacgttttttggaaatctttttatcagtctaatttttattttaaatattattttgtctgtacgttactgtgtgtacgaacgtttgtggacctcgtattatcggttttacttatcatcaactttttgaagtagcgttgttgtctgacgtaacttgaaaatgtttcatttgtacgagctcgtcacttatataagagtgacattaatttactaacgtacatgattgggcacacgcgcgttaaactattaga

SEQ ID NO: 21510 - DNA, 5288 bp, Arabidopsis thaliana landsberg
  unsure (1)..(5288): unsure at all n locations
caggcccaacgtttgtgttttaaatcagaaccgcaaccgcaaacggcaaacccaatatttcccacagttctttgcatgtgttcaccaatcgcccttgacagccaaaagctccccgcaaattctacacaagaagggtgataaggttcatcagacgtatgtgagaaaacggattcagctttctttagaggaagcgaaggactacgtgaatgatttcgtggcagagaagaaaagcaaagtcaaagaagagaagcacgattcaattatattaaatttcaaggactaaagtataaataagtccatcaacttgaaagcataggagaaaacatagtcactctatatataaaacaattgtgctgatttatctattttacagttgtatataaagtagggttggaaaagaatttaaaggtttttctctaaaataaagtagggtttcaaatgtcataaggaaatatacttctgttacaaatttgatgtttgtgtcttataagggacagtttatttaacacatggtttgcctcttgcttctcattgagaatttgatgaacaaatggtggatatacccgattgttctttacaaatgcacattgcaatttctcaaaaacaaccaatgactcaatcaattccttctttgaacttgagtgatctcctgaatcggtgaatctttgtcagtcaagtcacctccacccgacaattctgtatcctgaattgcttcaacatttttgttcgaaactatctcctaacttgatgcgcttacaacgatagcttctgattcaagaaatttatgtggctccctcttgcgatcaaaatctttgatccaatgcttcatttcaagatcgagttccataagtactcgctttttgtcctgattgtttccaaacgttaacaataaaccatccttcacctggctccaactattgaacggaatccacgatagttccttgtggaaccaaaattttgcttggccaccaaaaaaaccagaaacacacgccaacttgtctttctcactatagtcaccaccaagaaattgagcttcagtcatcgcaatccactcttcggattacctttagtgaagatcgggaggtccagctgtctaccgtcatcttaaatcgatcgagattgaatcctctatactgcgcaaaccactcgcttcaaggtttcctccatcgaagtcaacatctccaaaaattgcacctccggattggcatagtaacttaaatccgcccttgagaaactccaattgtttcttcgcagcatcattatccatcataacgtttgaccggaaccagtttcactgcaccaatgttaagttgttgatatcccaaactccaatttcaaatacaatattcaaatagaaagatgatccgactgattatcaaaacaataaccaatgcaaatccagaaacataatcattcgcctgaacattcaacctcacgataacatagagatcaacattgatctctactcaagcacatcgcttggccaaagtctaacaaaaaaaactctcacaacatcaaaagcataatccctctaaatcgatctctctccttatttataatagaacagagtctgttaaagatatttttagatcctaaaaatatcttcttcttcaagcaagcttccttcccacgtgcatgtggcgtgtcttgaaatggtgtctaggagagaaaatagaggctattggaaccgttactgtattcatattcacatatatcactgaaccatttaatagatttaatctaatagatctatgctgctctacaaataaatattcgtaacaactcgtaacaacatgtgactacaaaataaaaccaaaatggcatatgggtatatctgcaagctacgatttgttttcatagcaataatttgtttggacaactaaaaaagtaaagcacaacgaaactctacagaatttgtttgctacagagagaaacaagaaacatatttaaaacaattgctaaaaatggacaacattagtttcactatataaatcaccaagactaacccaacattacccaccaaatcatctttttcacatatataaagaaggagtaaaacattttgtaaaactcatttgtattaaatcatcactaatacttaaaaacgatacgttatggggattcaaacacgcagtgttttaatgattgtagctatattgacgatgatgttttcagcacacattgctcaatcaaacagtataacaatgtgtgtgaaacattgcgcacagaacgagtgtttgaaagcggtgaaacaacctactcctgaaatttgtgatgaagcttgcaagaaaatctgcaacaatcaattaatcggtgatgaaaagtggtttgttcctgctccaaagggaagctcccgaatctgtagatgggcgcctaagtattgccaattctgaattatgaaaactcctaatgatttgttttttcatgactataatataaaaatataaaaatatgttagtacgtgatcaattcattattcttataacataatttcttcctttaatttttgatgcatattaaaacaagcgtttatgacaacaaaacattggtctagagagtatttcgatttaaccaaactagctagatcaacccaaatacatacattggctatatattaagtctttctaccaacatatatatcaaatatttggccttgaatttaaaagaataaaaatatgacttatcatcaacaactgttgcaaaacttctttacaaactcaaatttttaatgtaagaaaaaacaactataattcagtaacaaactaacaatcatacaatgtaccagtaaaaataaaaataaaatgttaaatgttgaattatataagataaatacaaacaaatagcaacatattagttaatttctcaattaaattcaagaagaaaaatacacaaatagatcagttgattttccaattagaataaaaacaattcaggggtttaattcttgacagatataaaatagttctttttttgttgaaatttttccaaaacttttcttgaatgagattacactataaagaaatcagaatatttaagtgcatatgcctggtcaattttgtattgatatgtttttcatatttgataaattcaaaccctattatatttttaacgagacaattaatgataattttctctaaataacatttgtagtaattattataaacaatgaaagcaattttctcatttatacctttgtgttattaactaaaatggagatgaaaaatatactggtacacttcgtgttcctaatttggaacaattagataccacattgtattattattataaagtaaatagatactccataagcgaagagaaaaagatgcccaaatttaaaaaaaaaaagtctgggagacagataaattagaagcctgctattaaaaaaaaagagtcggataaggcccatgaccagacccaaacgccttaacatggtccttaagggaacgtttgtgtttaaaatcagaaccgcaaacggcaaacccaacgtttcccacagttcttctcatgtgttcgccaatcgcccttgacagccaaaagcttaccgcaaaggcgacacgagaagggtgataaggttcatcagacgtatgtgagaaaatgggttcaacattcttcagaggaagcgaaggatgacgtggatgatgacgtggtagagaagagaaggaaagtcaaagaagagaatgacgattcaactaaaactaattaaattaaatttgagggactaaagtatacataaaaaaggttcaactctaaaatatagttgctctatatataaaacaattcttcagatttctctattttagagttcaataaagagtaaggtggaagaagaatttagagtttttactctaaaataaagtcgggttagaaatgcccttaggagatatacttctcttcccactttgatgtttgtgtcttctaagggacaatttatctaacacctagtgtgccttttgcttctcattgagaatttgatgaacaaatggtggatatacccgattgttctttacaaatgcacattgcaatttctcaaaaacaaccaatgacacaatcaattccttctctgaacttgagtgatctccagaatcggtgaatctttgtcaatcaagtcacctgcacccaacaatgctgtatcctgaattgcttcaacctttagttcgaaactatctccgaaattgatgcgcttacaacgatagcttcttattcaagtaatttatgtggatccctcttgcgatcaaaatctttgatccattgcttcatttcaagatcgagttccataagtactcacttttggtcccgattgtttccaaacgttaacaataaaccatccttcacctggctccaactattgaacggaatccacaattgttccttgtggaaccaacattttgcttggctaccgagaaaaccggaaacacacgccaacttgtctttctcactatactcaccaccaagaaattgagcttcaatcattgtaatccactcttcggattacctttaatgaaaatggggagatccaactgtttacagtcatctgaaatcgattgagattcaattctctccactgcacaaaccactcgcttcaaggtttcttccattgaagtcaacatctccgaaaattgcacctccgattagcatagtaccatgagaaaatctaattgattcttcgcaacatcattatccatcatagcgtttgaccggaacaagtttcattacaccaatgttaagttgttgatatcccaaactccaatttcaaatacaatactcaaatataaagatgattcatctgattataaaaaaaaataatcaatacaaatccagaaacacaatcgttcgcctgaccattcaagctcacgataacatagagatcaacattgatctctcctcaagcacatcgcttggccaaagtctaacagaaaaactctcacaacatcaaaagcataatccctctaaattgacaactctccttaattatactaaaacagagtgtnnnnnnnnnnnnnnnnnnnnnnnnnnnnnnnnnnatgacgctttcaagtttacagaagaaaaaatttgcccagaagactttcctatttacattattagtccctggatgttttatagggtgtttatatagttttagaggtcatcgtttaagacctaagtttcttttatcaagttctttgcaaaccctattttcagagacataagctattcatctattgttcttcagagattcattcagttcataataaaatgaagagatcccttcttactcttatcttatttgatgtgttatgctttctatc

SEQ ID NO: 21511 - DNA, 1119 bp, Arabidopsis thaliana landsberg
aaacaaactcaaccacaacatataacaaactcagacacatatgcattgataaatcataaatcagtcggcaaacaaacaataactcagccatcgaatcaaacagatctaacaaatcagccaccatatgtcaatcaacgacgacgaaaagaagccggaataagcatcgttaaaaaccatcaataacatcacgatggtttttggaaaacggttaaaggtcgcgtgaatcacttgctattgaacttagatgtcggaatcttgtcgaaaattcgaaatacagttaggatatagacttactggacctttgagaagttcagttcaaatgcgacttgatagggatgtgactttactggataagaaatgcaattccgtcgtaagaatttcgtccggaacagaagagagaaagagaaaacggcgacggaattaggtctcaggaattgtttcccgtcgagagagaaagcgacagttttttttccgttgatgaacagtaatttcaggcagaaaccgaaaggtttatgcagttatgtgaaatgacgtggattatatgttatgaatgttttttttgttttttttaattaaaaatgaattaaataatattatttaataattactaataagggtgttaactgtaattacacaagtagtaaaaacatatagaaaaaaggtatatgatattctaggaataaacatacaattctatgctatctgagtaattttttctaaactagttaacaaactaacactatagttttcaaaatatagtaactaaccataaagggtagtatattgaccaaattgacttttttttagggtgactggagatggtggtggccggagatggtgatggtcggaggtgttgattgtggccgagggtagtggccagaggtggtggtggccggaggtggtggtggccagaagtggtggtggtcggaggtggttaagaggaatagtgaccggaagtggtggtgaccggaggtggttatgaggagtagtgcccaaagtggtcgtggcgaaagaggtggtggcggacgtggtggtggtagtgatggctgtaagaaggatacaatgcattgatatcattatattacgatacatatgacttttcttggtagtactaattat

SEQ ID NO: 21512 - DNA, 360 bp, Arabidopsis thaliana landsberg
cttctaaaagacagaacgcatcaaattaatttgttaatgctctcaaacctactacgaaatgatcttgttccaagtgagcaagggtcctcacttgatgatgatgtgctctgttctggtgggcttaaagatggtgcaacatatgttgtcttcataccatcaaacctaagatcctctacatggtctacaaagtaattaatgaactgtatgatcgtcaaaccattcttcctcttctctaacaccttggatttcaacacttcggagagtgttcctatcgggattaaagtagaaaacatacaacggtttttatgcataattcttcgccaaaacaatttcacctgaagccagtgccccaagaacgga

SEQ ID NO: 21513 - DNA, 558 bp, Arabidopsis thaliana landsberg
tgcgccttgtcttcttcttcttcccttccttccgtcgatgccccgagccggagtcggtaggcttgtcgtccttcggctcgttgacgaaggattccttctctttgtcgttgatcacgattcccttccccttaggatccatctcttcgggcggtaagtccctttgtgaagagaacggctccgataccaattgagagcacctagaggggggggggggtgaataggtgatcctgtaaaaacttaacttatagccacaaaaacttgttaagggttagcacaataattgccaagtggctaaagaggagatcttgcacaatatgactatcacagagaattcaacagagaggagacacggtgatttatcccgtggttcggccaagtacaaaacttgcctactccacgttgtggcgtcccaacggacgagggttgcaatcaacccctctcaagcggtccaaagacccacttgaataccacggtgttatgccttgcttatctttatccactagcgaggaatctcacaaattggagtctctgccttaacttaagattccaaagaacacg

SEQ ID NO: 21514 - DNA, 652 bp, Arabidopsis thaliana landsberg
cgaacatatactttgctaagagaactgtgtttttttattattttatacaccaaactaatgggacttggaaccttgaatactccaataccacctgtgccacttgtcaccgtaaactcaagggaggcttcactaaaattgcatttatcagagttcttctcttcgagacaccttatcgaatgtgggctactaatgtaggctatgaaaacatgatccgactcaatcttgtctttcttgtttccctctctagtccaagttcctaccgggcaagtaaaggggacccaagacttgtcttcagcttttattttaaaggtgcatgtcaccgagaagcagctgagttgatcttggctgtcaggaaatgagactacagcacatagagctattccagaaagcctcttgtcatgccaatgtgggaggagttttacttctaactcagatccaactgtttcatgacaaaaccaagaaggcacttcacatccaggaaagcaagtgctgaacaaagattctgaaacaagaccctgcaaagttcaaataagtaaaatcttaaaatcgcagagtttctttgaaatgcaaaaatctgagagagggatacagagagagaggcaaagcgatagatataggtatagagagataccccattgtagcgtttccgagc

SEQ ID NO: 21515 - DNA, 560 bp, Arabidopsis thaliana landsberg
actgtggcggcggaggagttgcgcgccggcgatacggtggattttggtgtgtcgcggatgtcgtcggtccgcgtgcaagatatgcagcggcttggttactttggcggcggagtcctcgtgtcccggggatggaggaagtccccgagccggaagcgagttggttgtgttcgaggcgttctttgtcgctggtctctgcctgcctgcgcaccgatttgttggagaagtcctgcgcagatttaacattcagatccatcagctgactccgaatgtcgtggtggctctgtcgaagtatgtctgggcgacgacttcgtacggcggacggccatcagtcgaagtcttcacgaagtactattgcctgcactggcagaagaggatgattggagatgatgttgcccagtttgggtcctgtacatttacgccgaagaccggcaagaccacgatggaggtagttgagttggttccttgcgcccgcaacaagtggggcaattggcatgagttttggttctacgtcgcggagggtacagtcgaagcacatctggggctcatcgtgtccgagatgt

SEQ ID NO: 21516 - DNA, 532 bp, Arabidopsis thaliana landsberg
cattcctctgctattctctcttctacaagaaaccaaaagactcacgagctaactgtgatcgtcctccgagccccccttctctaccaatcatcggtcatcttcacctaattctctctaatttagcccacaagtcttttcagagactctcatccaagtatggacctcttctccatctccgcatcttccacatcccaatagtcctcgtttcgtcggcctcagtggcctacgatatatttagggcccaagacgtgaatgtctcctttcgcagtacctctacattcgaggagtgtctctttttcggaacttccggcttctttcaagctccctatggagattactggaaattcatgaggaagctcatggttacaaaacttcttggaccacaagcactggagcgatcacgaaatatccgtgtagaagagattgatcgactttacaaaaatctgctcaacaaggcgatgaagaaggagagtgttgagattggtgaggaagcatcaaagctaagtaacaacgtcatatgcacgatgatcat

SEQ ID NO: 21517 - DNA, 424 bp, Arabidopsis thaliana landsberg
gaaactgaacggttggttggctgtttgactcggcgatttagatagagcggtgagaggctgctgatggagggttggtgatatattataagcgatggagggctagtgtttggctggtttgtaggcagtttctagagagagaagtgagcttatgatgctagagctttgtagtgaaagagagagaggtgttggtgtgtttgattcttcattgaagcttggtatttataggtgaatggtgagttaggagcgcccttgagtgtgtggaagagagtgtgtgcagcttttggctttagatcatgtggaggagagtggagcttccattgaacacatggggaaagaaagtgggtaagttggtggcttcttcttggtgggagacaaggcatgggcgtgggggacatggagacatgatgggaattcttccattgac

SEQ ID NO: 21518 - DNA, 607 bp, Arabidopsis thaliana landsberg
  unsure (1)..(607): unsure at all n locations
ttgtaatagtggatgattattctcgcttcacttgggtattctttttacaggaaaaatctcaaacccaagagaccttaaagggattcttgagacgggctcaaaatgagttcggcttaaggatcaagaaaataagaagcgacaacgggacggagttcaagaactctcaaatcgaaggcttccttgaggaggagggcatcaagcatgagttctcctctccctacacgccacaacaaaatggtgtagtcgagaggaagaatcgaactctattggacatggcaagaaccatgcttgatgagtacaagacaccggaccggttttgggccgaagcggtcaacaccgcctgctacgccatcaaccggttatatcttcaccgaatcctcaagaagacatcctatgaactcctaatcggtaaaaagcccaacatttcatactttagagtttttggtagcaaatgctttattcttgttaaaagaggtagaaaatctaaatttgctcctaaaactgtagaaggttttttacttggttatgactcaacnnnnnnnnnnnnnnnnnnnnnnnnnnnnactggactagttgaagtccatgtgatgttgtgttgatgaactac

SEQ ID NO: 21519 - DNA, 1365 bp, Arabidopsis thaliana landsberg
  unsure (1)..(1365): unsure at all n locations
atcgtctcaattgagattaatgtacttcaaatgaaacttccaaacaaataattgagatgaacttaacctgagttatttggattggttagaaaattgtttaactgttattacatctaatgttgaactaaagtgatattgataagtctctctatattcaaacttctcattcaaattttcttgtttgacataatcaaacttctatatagtgtctgtgtatatatcagagccggtccaataaattattggaccttgtgctatgctccaaatttctttacctaaaactctaaatatttaaaaactaaaccctattttgcaattatttgaaaatttggaccctaaaatataaagaaaaaactgaataaagaagtgggacccggtgcactagcacactcagcacctcccaagagtcgggcctgattcacatacacaatttggtatactcagaaacgagcttctctacgaatttgtcgataacttttataataaaggagatcatcgtacgtgtccacgtaaatgtttttgttttggtcaaagtgcacgttttctattgtccattgaatcctttgtgtttactcattctccaaaacttgaaactatatgtacataactcatttttagtatagctttaagtgatttgctatctacaatagactatagtaaacgaatattttgtaacatgatagattaataaagtagagatctaattaaggagggaaggaaatcatcagtgtcttcaaaccaatacaaataagagtgagttttggttcattccagccctacacctagagcaaccgattcacaattttagtttattgttttcgaatattcttatatgattctcttataagcatcacacctgaacaaagaaacttctagcctttctacaatgttccgatagagtagctaattcggacaatgttccaacataaatccgtaacgtggcatacaaaaagttacacgaaatcttgaaccttgctgttaccgctcctgttttactttcagtcacagtttcttttttccacagtgttggtttcttctgatgtttcaaaagttggccaaccccacaatctttttctcagacagtgtagttagttttttttggtgaatggtatctatcaatcagtcaaatgagtcagtctaagattcaagatattgatcctaccatatcatattagattccacgtggcgcaagccaaggcatggcttagaggaggggtcccttacttcatatggcctgtgacattgttttcccaaaaagtggtnnnnnnnnnnnnnnnnnnnnnnnnncagccactaagacttgctcttcaacttcttctactacttctggttcctaaatcttgtctgctcaatattcctaaccca

SEQ ID NO: 21520 - DNA, 638 bp, Arabidopsis thaliana landsberg
  unsure (1)..(638): unsure at all n locations
tttatatcaggctgcaaaaaaaaaaaaaaaaacattatgtaaatattaccttaattctcttgtcttatatatcaagtttccttttgtatattaaatccttaccttgaacattttgctaagatgctcaacacattcagagactaactgttgatgcgccaacacttttctactcttcatgatccgaacaagagctgcatctattgcatagcgtctatctttatcaacatcttcaaccactttcttcctctcatccattggaggcaaaggcacctatttaagaaaagaaaaaaaacatcattagtctttttgatctaggctacattataacagaatgcttctcatcatatttaccctaatcttccgcatcttatttgtgaacttggagttnnnnnnnnnnnnnnnnnntttcgagatggttctcgacattggttcctttataagaatcttgtactttaagcatgacagtgaatgaagcagcctgacaagatcttcatggctgaggtttagctgctccgaaatctcagtgtagcttaatctctctgcgttgttgaagagcaacaacacagcagcctggtacgtggaaacgactaactccattgtttttttctcgaatttccaagaatgtgacaagttccaag

SEQ ID NO: 21521 - DNA, 494 bp, Arabidopsis thaliana landsberg
  unsure (1)..(494): unsure at all n locations
gttctagggcagacaaaggataagaaacttcatgctatctatcttgctagtaagacacttgatgatgcgcagagaaattatgcaacaacagagaaggagctgttagctgttgttatcgcttttgaaaaattcagatcttatcttgttggatctaaggtgattttgcatacaaatcatgtagccatgaattatttgatgcaaaagaaggatgctcagccaaggctactaagatggatttagcttcttcaggaatttggcatcgaggtgcgagataagatcagagttgagaatagtgttgcagatcagttgtcacgaattaggattgaagatgatgtcccatcaatgactatcttgcttgaagcaaatatatacatgattgatacaactaagacagacgactaccaaattgttgagttgatgaccaagctgcnnnnnnnnnnnnnnnnnnnnnnnnnnnnnnnnnnnnnnnnnnnnnnnnnnnnnnnnnnnnnnga

SEQ ID NO: 21522 - DNA, 883 bp, Arabidopsis thaliana landsberg
gaggattatgttcacagctccccaaagccttttagctccaattttcttactaatcactccaataacaagggacatgactccaagaacgatagagttaagcatcaaccccaacgaaccaacttggattccgtggttgtatagtttcttcattttgtcatctcctgctgagtctccaccatacacttcacgacccatccaatcggtatcgtataaaagaaaaggaaaccatgcgatccagttcaaggccgtgacggctagaagcatccacattggacgtttcatcaccttgaaagctccaaagatctcgccaaagaagggagttttctcattgtcggaatctgcattaggcgaccattgcttgtcttccacgtaccaaagagctatgattgtgaggactatgaggagagtgatggaaataatgaaacagctcttgagatttgcacaatagatgtcgcatgctttagtcattgtgaaagggaaaatcttgtggaggttagtgtacgatccggccgcgtatcccaaaacatttccaacagccatgaagaaggagaaaaatgcgtttgctgttcgtgttttcttagcgtctccagctgctaaatcaccaaggaatgcgcggcaaggtccttggagagtgttgttagccacgtcaaggatccagaaaccgagagcgaagataactacggctcgcatcttgacaggttcgtcgactttgtctcccatgctgtgaccgaaatcagccgcatatccgattagtacgacagcaacggcgacaagtaaggcgcccatagcgatgaaaggacgacgacgaccgaatcttgacttgcatcggtcgctgaagtaaccgacggatggctggacaagcaggccggagacaggaccacag

SEQ ID NO: 21523 - DNA, 542 bp, Arabidopsis thaliana landsberg
  unsure (1)..(542): unsure at all n locations
aaaccgccgactgaaaagaaccattggctaaccaagtagcttgctcgtttacnnnnnnnnnnnnnnnnnnnnnnnnnnnnnnnagcttcgtacaggacgtgaagcatccatatatgaatttggttgcatatgatgtaaagaattatccatgtgttctagagaacttcagagttttaaatcatgatacacaaaagtgatttgatctcaaaaattgaactagttattttaggaaaagtgtggtacggatttcttaaaagattcttaaaactcaaaacatttttccgtacctcctcgatagccagtttaaccgtttctgctggccatctcctcagccattaaaaaggtgtcacataaccttttttttttgtgtgtcaagaaggtgtcacataaccatttggtcttaatggcgagtctctaatttgtctcttactatgagtgatgctatttgttttttacgactatgctttatatatgttactattttctggatgaataaatattatctttgtatatgagtctggttgtatcttttgcacaattta

SEQ ID NO: 21524 - DNA, 1674 bp, Arabidopsis thaliana landsberg
cctatcttttaagtagtttaaaaggtcaatctttgagccagagaaacattctggaagtcccaagttagtaccagccccgccttctttaaaaatccccaacttatcctgaatcaacttctttgtaacctcatccactttcacaccaaaggagatagacgatttggatgggttaacaacctgaccagtagttgcaccataagcagctaaagtctctaacaggacctgagattcctctgcatttgctttgcatatgaatagactgtcgtcagcaaataagaggggatggatcatcggcccttcattgtgaaactgaatacctgtcaatcttccaagatgttgcgcttgatttagcaaatgagtcagaccttcagtacacatcacgaaaagaaagggagagagaggatctccctgtctcagacctttttcagggacaatcataccaaaagcttgatcattaatgaggaccgaataggttacggaagagacgcaaaccatgatccagtcaacccacttcaaattgaaccctagcgcaatcagtaatgctcttaagtagctccactcaactctgtcaaatgccttagacatatctgatttaacagccatgtaatcagaggagaaggaggcattggtgttgagagagtgaaccatttcgtgcgccaccatgatgttgtcagttatcagcctttcagaaacaaaagctgattgctgatcagagatgattagaggcagaagaggttgtaagcgcctcaccaaaattttggatatcaccttgtagattacagaacataagcttattggtctcaaatctgtcatgagagatggatgatgaattttgggcagcagacaaagatgtgtgtaattccattcttttggaaaggagccggagacgaagaattctttcacttcagtaatcaccttaggaccgatagtatcccaataatgctgaaagaaaagacccgacatgccatcaggaccaggcgcacttgaaggtctgatagagaacaccgcatctttgatctcttggtcagagacaggacttattaaactctcattcatttccccagagacttttggcaacatttcagaaaaccaatcagtgaaacttggaggatttgatgatttgaagagtttctgaaagtaagaagtggcaacttccccttttgctgcctcagatttttgctcattcccattgatatccaacaacatctctattctcttttttgacctgttgtctttgactgaggcatgaaagaacttcatgtttctgttctgcttttctgatgccaatacatctcttcttctttgtaagctgaaaccaaatcttgtttgatttcccaaaccacctgaagacggggaaaggaagaagactgttccacttctaacgcatgttcaatctgggaaatcttgtctttggaattgaggttgttaacctttttccattgactaagagatttcctacaagccctcaaactgtcagaaacacttgaaaccctcgtcactggaccattagaccaagccaaggagatagcttctagaacattaggcttattgagcaacctcttgtcaaacctgaactgacccctgtaagtgtcttgagatttaatgagctttataatcaccggtctatgatcagatcccctccaatccataaaggtctaatttaagctggaattg

SEQ ID NO: 21525 - DNA, 2621 bp, Arabidopsis thaliana landsberg
  unsure (1)..(2621): unsure at all n locations
tcggcaattgtaactttgcaaacatcaaaatctttagccttagcaatcaaattttcattctcttttctaagactagcaagagaaatgtttaattcttcaatcctagcaagcaaatcattattatctctaggattgggaattgaaatattacaaacatgagaatcaaccttagcatttaaaatagcattttcattcctaaggttgtcaatcatctcatggcaagtgcttagctcactagataatttttcacatttttctacttctagagcataagcctttttaaccttaacatgttttttgttttctttaattagacaatcctcttgggaatccaaaagatcatccttttcatgaatagcactaaccaattcattcaatttttccttttgagctatgttaaggttggcaaaaagggtgcgcaaattatcttcctcatcactagcattgtcatcactagaggattcatatttagtggaggatcttgattttaccttcttccttttgccgtcctttgccatgaggcacttgtggccgacgtttgggaagaggagtcccttggtgacggcgatgttggcggtgtcctcgtcggaggaggagtcagtggagctctcgtcggagtcccactcgcggcacacgtgggcatcgcgcccctcttcttgtggtacctcttcttttctttcctctttcccttcttgtcgttatccctgtcactgtcacttgataatggacatttagcgataaagtgaccgggcttaccacacttgtaacaaaccttcttggaacgggatttgtaatccttccccttnnnnnnnnnnnnnnnnnnnnnnnnnnntttgatgattaaagccatctcctcattgtcgagcttggaggcgtcaattggttgtctactcggtgtagactcctcttcttctcctccgtcgccttaaatgctaccggttgtgcttcggacgtggagggttcatcaagctcgttgatcttcttggagcccttgatcatacattcaaagctcacaaaattcccgataacttcctcgggggtcatttgagtatatctaggattaccacgaattaattgaacttgagtggggttaaggaaaatgagtgatctaagaataaccttaaccacctcgtggtcatcccacttctttctcccgaggttgcgcacttggttcaccaaagtcttgagccggttgtacatgtcttgtggctcttccccttggcgaagtcgaaagcgaccgagctccccctcgatcgtttcccgcttggtgatctttgttagttcatcaccctcgtgcgcggtcttgaggaggtcccaaatttcctttgcattcttcaacccttgcaccttgttgtattctctctatttagagaggccaagagtatggttgtggcttgggagttgaagtgctcgatttgggcacctcgtcctcatcataatcctcatccctacggatggtacctgtgctccaaactcaacaacattccatatacttttgtggagtgaggttagatgaaatttcattaaatcactccacctagcataatcttcatcgtcaaaggttggcggtttgcctaatggaacggaaagtaatggagtatgtctagatgtacgaggatagtgtaaggggatcttactaaacttcttacgctcttggcgtttagaagttacggagggcgcatcggagccgaaggtcgatgttgatgaagtgtcggtctcgtagtagaccactttcctcatcctcttgtgcttgtcgcctttccgatgtgacttgtgggaagaagatttttccttcttctctttgtggtgagaagaagaagatcttttctccttccgcttggaggggtccttcttcttctccttcctcttggtgcgggactcttccgatgaggtgctcccttggctcgtagtgggcttgtcgccggtctccatctccctcttggtgtgatctcccgacatcacttcgagcggttaggctctaatgaagcaccggcctctaataccaattgaaagtcgcctagagggggggtgaatagggcgaaactgaaattctcaaaaataatcacaactacaaaccgggttagagttagaaatataattgagtccgcgagagagggcgaacaaatcacaagcaaataagacgtgtgacatgcggatttgttttatcgaggttcggttcttgcaaacctactccccgttgaggtggtcacaaataccgggtctctttcaactctttccctctctcaaacggttacctagaccgagtgagctttctccttaatcaaacgggtcactcagacccctcacaaggaccaccacaacttggtgtctcttgctttgattacaagtgtcttgagaacaagaaagaggaagaagaaagcacgattgcaaaagccaagcaacaagagtgacaaatgtcacacggatcactctctctctctcaagtcgctaatcactaatgatcactttgtctcaattgtggaacttggagagattggaagctttgattgtgtcttgtaatggattgcttgccctggaattgaatgtgagagattggaatgcttggatgaagtgaatggaggtggttggggttgtatttatagactccaaccacttcctag

SEQ ID NO: 21526 - DNA, 2200 bp, Arabidopsis thaliana landsberg
  unsure (1)..(2200): unsure at all n locations
cttattacacatctataaaccagattcatcaaataattgattcaactacagatacctatggcgggaatatctgttgtctggattcaatatctagttaattactctagatctagcattaggcataattaaagatgaagaattctatagataacctagcaaagggagcaatctactaaaccaatgaatccctaatgagaaaccctattcctaataatcaggttacttagacatattggatgaagcaaacaacatatttgagataaaaagcataaacacagtaaatagagaaagggaaagaagggatctcttcactgtatatagatctgaatgaaactctcaagaacaatggatgaatagcttatgtctctcacaatagggttttgcaaagaacttgataaaagaaacttaggtctaaaaacaatatatatagaccctaaaaacgtccagggactaatactgtaaatagggaaacttctggggcaaacttgagcttctgtaaactcgaaagcgtctagggtttttgctgggccgaaactggggtcgatcgttaccaagagtgtgtcggtcgacactcctcgctgattcctgaaccaaaatcgtccttagcttccttttccttagcttttgctccaaaatgtctccttatctccattgttgtcccactgcatagaatacctgaaaagacactaaaaagactcgagaaataacataaagacttaaaatcctatacctaaaacatagataaaattagtgaaaatcgggttatatcactacataaagctatcctagtggagcaacaagagaaagggttcttttcaggcgaattatgattcaaactcaccaagctatccaagacaagtcaagccagccttcattcaaaagagcgagtctaaaacaattccaactatccaagagcgagacaagaccaaacccgaaagcgccaccactactaggacccgtgattttcgatgcttcaagtgacatggacgcgggcactatgctaatgaatgtacgaacaagagagtgatggtcataagggagaatggcgagttggagtcagaagacgagttcgtatcaaaacctgattcgtcgtccgaggagtctattgctaagccggctaatgggaagctttcgatgtcgaggaaagtttctaaggatttggaagaggaggagacgtgacttcatccccggatgagtatgcagaacagttcggagaactttacgtagcaaggaggactttatgccttcaaacccgaaccgaagaagaagagcaaagagagaacctatttcattctcggtgcatcgtcaatgagaaagtttatagcttgatcatcgatggaggaacctatacaaatgtggcgagtgaaacaatggtccgaaagctcaatttgaagccgcaaaagcatcataagccgtacaagtaacaatggcttaacgatgatggagaaatgagtgtcaagaatcaagtggttgtatccttagcaatcggaagctaccatgatcaaattctttatgatgtgttgccgatggacgtcggacatatccttttaggccgaccatggcaatcggatcggagagtgatccatgatggcttcagaaatcggtactcattcatgttcaaagacaagaaaacgaccctcattccattgacaccacaagaggtatatgaggatcaaattcaactctcggccaaagaaaccaaagtccgtaagcaaccaaatttctttattaaggctaacaatgttaagcaagctatgcactctaaaagacccatcttattgtttttttttaaagaagcactaacgtctttggctaaccttgcaccagccgatgcgagtgagttaacttcactgttacaggattataaggatgtgtttcccgaagacatccccaacggcttaccacctatccggggaatcgaacatcaaatcgactttgtctcgggagcaacacttaccaacgtccagcttatcgtaccaatccggtggaaaccaaggagttgcaacgacaagtcgacgaactcatggctacagggcatatccgcgagagcatgagtctatgtgccgttctagttctacttgtgccaaagaaagacaggagttggcgtatgtgcgttgattgccaggcaatcaataatattacggtgaagtacgccaccctattcctagacttgatgatatgngatatatctctattttac

SEQ ID NO: 21527 - DNA, 1500 bp, Arabidopsis thaliana landsberg
agaaactaaagctcctttgttttgtaggctgcgtgagggttggtcatgacacccaaaagaccactcttttcaaagaggtatttgtcatcttctgttatgccaagctcattcatggtttcagagtaagggtatcgagttccatggaaatcgtgaaccgccataagctcatagtatccatccggagacagtttagtcttctttatcaaggatttggtggctcttggagttatttcaggtacatagtcttcatccccaccaaggtcttcatccacgaggcttctctcttccggcatggctctcttacctcttgcaatttcagctcttcttctatcacgagctaggactttggcggcttgttgactgaaccgcctatactcttccatctccctcttaggcctagtagaccaagattcagcctcatccacattgaaattggtgtccatggaggattcgttgcagttcgaactcatggtgaagctaaactctcagaaatcaaactaaagcttagtaggtaagtctcgaacaaggaaaaatacttgcaattttgatcgagtaaaatagggggggggggagtatttttttcttgggaggaaactgaaaactgaaattttcgggatggtttaaagcacaaaacgaatgagagagatgatagtgaagtgcgcacaaagaataaagtgagagagagtgaaatcttatcttttgatttcgatttgaatgagtagagaagaatggtctcctatgctttctttgttaggataagagtgttgaccaaataatgttgagttcaatgggcaaatgaattatccaccgagtaatagagtgattgggggagcaagtgggccactcgaccaccatgcttggtcgtctagtccctttactcgaccaattgatagagcaaaacagtgatgcaattttactcgaccaattgataaagtagaattgcttctgttgcagatatttctttatcacagagttcacaactctacgaatcctgatttatttcctgaattccaaaaacactaaaaagcatatcaaaatatcaaaattaaatatgtatagagatagacatgggatttcctcccaagtgagatagtttaaagtcttaagctagactccttactattttaggcactgatgggtttctggaagtcaattgtagttcctttaggaatagggcaatctgccatataacgcttgaccctctgcccattcacagtgaatttagaactttcatccctagtaagagtaattgccccatatggcaatccctctttgatagtgaaaggtccagaccacctggactttagctttcctggaaacaacttgagtcgggagttgaacatcaggacttggtttccaacgttgaaatcctttggtgagatctttttgtcatgaaaggcttttgttctttctttgtagatttttgaactctcatatgcttccagcctaatcttttccagttcatgcaggtcgactgctctttttcttgagctcctttga

SEQ ID NO: 21528 - DNA, 151 bp, Arabidopsis thaliana landsberg
aaactgcgtcgacctcggctcccaaagttacaggacttccagggaattccattcagaacatgaaagaatacgccaccgctcacgctatcactatctgccatgatcgagagctgcctactcgacatgtctccaactcaaatcagtgaggaca

SEQ ID NO: 21529 - DNA, 4074 bp, Arabidopsis thaliana landsberg
tgaccgtagagacaatgggcttcggcccaacttcacggatatcccgaaaatttcgaaaatttctaataatccctacaaataaaattggacaaccggaaattataatgaaaaaatgattaaaaaaaagagagcaaattataagatacattttgttacctattgcaaacgcatatattaatatatatatagatatataaaaataatgtaatgcttatcaagaacatccaaacacaaaattttggttttgtgtgtttctatttgtttagaatttcaactttgaatccatgtttttctttaagtggcagaaaacaataggttgcagtatatgatggtttttatatagtatatgttattcccccacaattattgaattttttacacaccaccgctctgggttaagtaaagacatggtaattgggaaaaaaatgcaaactcactggtcgaagtacatcaacatttgtgtcctgacagataatgggatagtgactttgtgagatccatcagtccaagtcaagctcccaaaatagtaaatcgagttggatttgtgagttgtggagacagtgaccttatagctgagtatctttacattggagttaaagagcagtgtgttgggtgtaacagagattttgacacccaaaggaggttcaacgatgagtttgtagacagagtcaacgggtccgacgttggtgacggttctagtgagagtcacatcttccttgaggaatggaatggttatggaaggcaaattaagatcaagcatagaaggctttggactcggacatcgatatggtgtatgtgtctttgatattttggttatttgtttctcgtcataatgggatgcacatagaaaaagcctatagtcttctgcgcttatatcgtagacaagaccagggtcggctgctttgtttgggttcactagtcctccttcgaagtcaaatgggtcggctagttatcgtgtcattccttctgagaagataggttctccgtagggatccgttgtggaagcttaaccaataaaaatgagtaactaattagattaattactatacacatcttgacttaatatcttaattcggtctgtattaataatgttattatgtcactatacgtattcaaacctgtataaggttttctgctaaacaaaaactacagaaaaaagaaacaaaaaacaaaaaaaaaaggtgttagtttacctgtagtgatgagagctgatttaagcgcagctggagaccaatcaggatgcacagctcgaagtagtgcaactaaaccagcaactactggtgttgacattgaagttcctgactgaatagcgaatccttcctcagtacccatactttctggggtactagctgccactatggccacacctggagccgctacatcaggctgtaaaaagttaatgttgctatgtgtgatgcaaaaaagaaatatcgataaatagagtttttttttcattattattattcgatcatttaaaattgggtaatatgttatcattatatggatcagaaaaatcaagtttaccttgagaacgtatggagatatggaattgggtcctctccctgaaaaatcagcaacctttgtggctacaagacgcccgttgagcgcgatggcagaacttatttttatggtgggcattctgtaattaagtggttattcaatcaatattaaacacaatgcaaatcatataataagaaaggtcaaaataagcagtatggttttaataactacctggtgatacttaggtacttccatatggtagatccatgttcatagtcgaccatgataataggaagaccttcggaaactttgatgacatcatttcttttggcggcaataattacagcctttgcttcaacctgaaaaagtttagttacataacctgcctggctttcttcacttccagtcgtgaaagttagcaccacttttccctttgctgcactcgtcatctcgtccgggctatatacgaacattagatctccttgaatctcattgcccttgtacggggtccgtgcctacatagtaatatagattagaagatcacatgcatttaaatgtcaaaagagaatcaactacacatacactagctagttttcttttatttggtttaccattaaggtcacattgttgcctagtgtcaaaggtgtgggataccatcggtctagagtggtggcagccactgttatgatccatggagctatgttttggacggtgtaagccccaggcccaaagtttccacccgcactgagaactggaatacctttggcgactgcatggaatgctccatacgagatttgattatacacgtcaacttcagtcagcacagggtttggcctgcctattgagatcgttatcaagtccactccatcggctatggcgtcgtccatcgctttgattatgtcggcgcttgcgcaggtgcggtctactctttgccaacacactttgtagaccgcgatacgagccctaggggctcctcctcttattgtacccactccaaacccgttgtcactcacatttgagacgaaagatcccccagctgtggaggccacgtgggtcccgtgaggcaagctttcccttgcggacatgtactccgtgtccggtattccgctatccgttttgttccttcggaatagactatccatgtaatacctcgctcctatcaacttcttgttgcaatgcttcttcgagtcgaaatcttcaccgtccacgcacatccctttccaccgttttgggatcggccccaagcctttgtcattgaacgactgtgactctggccacacacctacaaacacacgtacatgtatatactagttgtgtccaattgtcggaaatttaatatcgaaaaacgaacctgagtccaagacaccgatgatgatgtcctcgcccatcttggcttcatgaagaagtccttttggtgtactatgagaaagccccaagtaatcaaatgtccttgtcgtttgcagctcatagaaagtattgggcgttacttgaactacatctggatgctctaatcataattatgaagattaaaaatcattaattaacctttgatctaatttgcttcctatatctttctactaaaaagtcattagatgtacacacctgagatttgttccgcttgggaatccgtaagatgggcagcaaagccggagaaaccattccgataactatgaactatggactcactagcgtcttttttgctgcaaccatatttccacaaaatctgttaaatattacttctaattattttatttccaacaacatactgttttacttgtctaatcttggtttgttggtaccttccgagtagggattctaacattctgagatgcgagctggttacaagctcaggatcattatgctccttttcaccaaggtatactatgtggacctatatatgtataatcattcctttacccaaacgtttttcgtttgtctccatgagtaattaaggaaattgttacataatatataccttagtctcttcataggctcctccttccacaatgttaaactccactttgagaatacatacagcactgattacccaaaaaaaccaccatgagactatagagctcatcatttttccctgcagggaaaaatctacaagatatcaatgtctcagagtttttcgttttcttgaatatattttacataatgaatggtctcgtattaatgccaggctagcgttttctctcataactaatcagttatcttctctgaaacgacttttacttagctaacgttgacattattagtttgttaaaaacttaaatactcttctggtatttgcttaatttaaaactctaatattctctatttcatcgttactttatttaataatagagttttatgagtttgtgatgccgttttattattaacccaatctagattaagcaaatgctttctgcttttttgaggttgaattgcagcacaaatttattgtttgaactgtcagattatgggtttggtaaaaaagattaacagtgtaatacacagtgaccaggaattattttcttttctcttaccaattttgtttataatagctggaatagatctccggaaacgtggata

SEQ ID NO: 21530 - DNA, 541 bp, Arabidopsis thaliana landsberg
gttacaattgggttaatagaatgagtcaaatggggactgtccaaacacaataataggtgagcaatgatttgtacaatatgcacatgactcacgtggtgtatatacaaaacaggcaaaaacaaagtaaactgattggctttaatgactctttctgttcagattttgtctgtttactttacattataaacaaaaaaactttttacgtgtaaattaataaatgtttttgccaatatttctttttcaattttatccaatgacattaattgtagtccgcaaaggacgtgccttgttgtcatatatctatctaccaatactattttacgggtttgaaatatatctatcaattgtgtagccaatcaaaatttttataatccatattttattttatataaaataaataatggtcaaaggaaatcttaagaagcacaaaaatagaagacttcagtgtaggatctagagcttaccattaggatctgcagacgaagaagccagaaatttgccattcacgacgccattcgatagacacaaaaccacatctaca

SEQ ID NO: 21531 - DNA, 599 bp, Arabidopsis thaliana landsberg
tgtccggtgccacgcagtcaagtgctgcggcccaaggcgcctgtctgcgggtatcctatgcagacagtccggtgcacaccagacagggtactattcactgtccggtgcgccaccactgcgttggctgactgcccacttcatagatttctttgctatttccttgggattcttttgttcttgagccttggacttctaagctccttttatgtattcttttgaggtgttgcatcctcagtgccttagtccaatcctcttcgcatcatgtgaactacaaatacaaacactagctaacacattagtccacatgttatattgatcatcaaacaccaaaactgtttgagccaaatggactggggtccattttccttacaatctctccctttttggtgattgatgacaacacaaccaaagcaagcaaatttaacaaacatttgaatgaaaatatgcaatctacttgctaggatgcatgagtgtcccacaaggtgatattatggacttaagcctccacctaactccataattcacttacttcctattttagacgaagaccaaaacacttgcaaacaataatttggtggtgttggtgttgatatatttca

SEQ ID NO: 21532 - DNA, 927 bp, Arabidopsis thaliana landsberg
tggccgtagcgggtttgcgagacagctcccgagcctctgcatggagcgagaggacggtcaaggactgtctcgacttttatgatacgccccttcgtcgcctttccgcaaggaggaaggggggaaagcgccatgttgccctcggagggcgccgaacatggtgtctccagtgagttgctaacgggtgatccgagtggacgcccgtgccccgttcgataagggtcggctagtggcccagaggcacgctccaaaagtacatgcaggtgatttgccagacccggactcgttcgatagggttcgagggctcgatgcctccctctggtgggattccgttacaaaatcgctcctgctggtctcggaaatgtcctagggtacctcgggagcgtagtccgagccttggttgtgtatcgaacgtacccagagtcatccctcgctctgcgtgctctggggcggctgtcgaaccactccgaggggccagccttcgataccatgatcagtagtgggcgcggacattgagtgctctggggcggctgtcgaacccttccgaggggccagccttcgaacccttgatcagtaatgggcgcggacgccgggtgctctagggcggctgtcgaacccttccaaggggctagccttcgaacccctgatgagtaatgggctcggagcccgagtgctctggggcggctgtcgaacccttccgaggggccagccttcaaacccctgatcagtaggagggcttggaggccgtttccttcactgagaaggatccttttcgaaatatccctttctcggtacctgtagcaagagagagaaagagaaagaggaaaaggatatgaatttaaatagtgtggcacaccttttttgacgcggtcatcatggcagaggtgaacgacgccgcttcgctgcaagggtgtacttgcctccgaggag

SEQ ID NO: 21533 - DNA, 335 bp, Arabidopsis thaliana landsberg
tttatttgtattatgacaaataatgattaaggacggtgagcaaaccattcatcaaacacaaaaaaataaatgccttccaacattatcaacaaccattgctctcttggagttaacctactaaattataattacatttacaattaaaaataaccactcttcttctatagaaaagagaatgaggagattgggaaaggtgtgaagagagtaataacacctgaatttgtgaatatgagcaaagaaattttataccccaaatatctatgtgttacacccttcctcgcccttacccgacctgtaagcccacttgtgattctgcccatttaaacaggccccat

SEQ ID NO: 21534 - DNA, 2112 bp, Arabidopsis thaliana landsberg
  unsure (1)..(2112): unsure at all n locations
tcatggatgttcaagttgtaaaatgtgattttgtgagtaaaattttctaccaatcgtcaagcggggaaaaattcctgggaaaacatgaatcagcaaaaaaatgtgcagaacaatgacttgatttcaaaagactactaacagaaataagattgaatttaaaagatggaacatgcaacacattatgcaatgtaagtgatgatgatagatgaattgtgccagtgtgtgtgatagcaaccctagtgtcattaggtaaagagactgttactccagctactggaactgtctcattgaataatcctaggtcagaacacacatgagtagtagcaccactgtcaataatccaagaaccatgaggaagatttgtgtgtaaagaagaaagacattgatgttgaaatgtgagtttttgattttcataacgaagagaagaagatggaaaagagattgtacccgaagttgattgaaccgacattataccattctctgtgatagatggaagtgatgatgatgatgtagaagaggatggtatattgtgaattgccatagcattgtgatctgtaatggaagagactgaagaagatggaactgaaggctctgaagctgaaacttttgcatgattggtgagttgctgaagtagagtctgcacttgatcagaactcatttgactcacatccaagctcataggattaactgcaggtggtggaacataaggcatttgcataacatttgccataacatgagatttctgattctgatctggtcttctaggctgaaatgaagtagctgaattagcaggtcgctgtgaatgatatccagctgaaatgcttttaaaacccggtatatagcgtggaggataaccaatgatcttgaaacatttttgcacaacatgtcctgtttgtccacaatgagtacacacaggtctttgctgccttggacgataaccactctgcattgcattagcataattctcctgagtatacacatcagttacaggaggtcctgaagcttgaaacacaacaccctctgatttattcaatggcttaacacttctctgtctttcatcttgagcaaccatattgaaagcctcttcgattgatggaattggcttcaacataagaatgtgcttcgtgtagaatcatatgactcatttaagcccatcaagaatttaataactcggctcctatgctgtaatctctcccacaacacagccgcattgcattcacatttaccacaagtacacactggtaattccacatagttcctgtactcttcccacagtgtgatcaactcagtataataagagctcacatctaaagaaccttgttgtattaagctaagacgctgctcaatctcatagactctcggagcatcatcttgcttgaaacgagctatcaaactctgccatattccttcagcaatattaatgaataacaaactttgccctttttcgatactgaattcattaaccaagtagctaacaagtcgttacacctagaccacgaaccaaaatctctatgttcctgagaaggtctaagaattgtaccatcaatgaagccgattttagtgccttagattgagagccatccgtatcgaacggcgccaggaatgaaattcagctccagtgttgagacgatctgatacaagaaccaacccagcatgatccgaactatgaagaaagaacggattatcgtattgatcgttcgacattgttgtaatcttgaaccaaagatgatgttgaataaaagaatcaatgaatgatgacagaaacgatgatgaatcaaagaatcgaagaatcgaagtatcaatagatgattgtattgaagataacgaagacgaagatgatagcggaagtaacaattttttcgatttggtggatgagtgaaatgatgaagaagatggaacatcgatggcttgattcgctcatcgtgcaataaggatgatgaatttgaagaagatatgatgagaaagatgaagatatgaagatgaatcgaagaaattgatgaagattgannnnnnnnnnnnnnnnnnnntgttatgattttctcgggcaaggaatgagaaaaaaaaatcagaaaataagaactgataccatattaacttgatgaaagtatttct

SEQ ID NO: 21535 - DNA, 802 bp, Arabidopsis thaliana landsberg
gtctcccttgagataaacacccttcctatccctttctttcactcaaactttacaatcgtcccggccaccgtgtgagttgcatgtgctgtgatttagctctctttagcatgctttatcattgtcccacctacaaacttagtatgcatcccgtttgtgcgatgaagccaatacccattttcatagaccactcaaaaaggcatccccaccttctcaccttttttcccaaacaagcttccttactttgcgatgtttgtggcctcgttaaagaatcttttcccacatatgtttgcgttcggtgtatctttgtagtccaccgagattgtatctatttcccgtttgtcattaaaatatgtcgtcatcaccatcgtatctcttttacctcttctcttccatccggaaaatggtcgtgcggagtctgtcgtcaaaaggttgacaacaattgtggtgcgtacacatgtaacaagtgtagccactattttgttcatacaagatgtgcgttacgggaagacgtgtgggatggaaaagatctcgagggagtacctgaagagcctgaaataattctcgagccatttgagacaatagctgatggaataatagtccatttttctcatagtcatcatctgaaactcgagatcagtaaagtttacgacgaaaacaaggtttgtcaagcatgcatccttccaatttatgagggcaattattattcgtgtatggatcaatgtgagttcgtcctccacgaagcatgtgcaaatgcttctcgcaagagacataatgccttgcacggtcacccacttacgctaaa

SEQ ID NO: 21536 - DNA, 812 bp, Arabidopsis thaliana landsberg
  unsure (1)..(812): unsure at all n locations
tccatttatttggttcttcgtgatagcatctagagctcttgtgtagttgtgaactcgtcgggttgtgttgcgagctcttgttgcgacttgtgtgcgtgttgacattctgatcttgtgttcttgggtgcgttgctcatccccccttactccgngcttctttgtgaacttcaagtgtaagggcgagaggctccaagttgtggagattcctcgcaaacgggattaagaaaagcaaagcaaaacaccgtggtattcaagtgggtctttggaccgcttgagagaggttgattgcaaccctcgtccgttgggacgccacaacgtagagtaggcaagcgttggtcttgaccgaaccacgggataaccactgtgccatctatgtgattgatctcttgtggttattgtgttttgttgagactcctctctagccacttggcgattattgtgctaacgcttaaccaagtttgtgttgtttagagttgatttttgcaggatcacctattcaccccctctaggtgctctcacctgtatgatggtggctattgcttatgatctgatggtctgtcctcttatggtgtcttgtccgtccttttacagtctagttggggaggttataggaagattatctagtattgtactagataaagttacatgtgagacgaggatacaaagatggatacatattttgaacttggcggtgaggatacgacgagtcaggcaggggcggatctagctggtggtctatatgggccatgacacaccctaatatcacataagggtagttagcaaagtgatgtaagtactatattttgaacttg

SEQ ID NO: 21537 - DNA, 744 bp, Arabidopsis thaliana landsberg
aaattaattttgtctaagcttacttatgcaccctcaggattgattcgtatgagtgtaaattaatatcggttgatttaaaaaaaaaaatgagattcttaaaaataattttattcactgttatgtaaaataatcatcgtagaaaacaaaaccgacgtactttattagtagattataattcataaagcaagatacatattatagttgtcaatcgagcttatattttaaagttttcaaattaatcataagacagcaaaagtcgaatattttaatgaaatttcacgttattgaattattagagaaatattggaggattattgcaaggaaatggtgaaactatgcgagaacttgatgaaaatcttatccaaaaacttgggattacaagaagacagacttcaaaatgcatttggtggtaaagaggaatcaggtggatgtttaagggttaattattacccaaaatgccctcaaccggagctgactctcggtatctctccgcactctgatcccggcggtttgaccattctcttgccggacgaacaagtcgccagtcttcaggtccgtggatccgacgacgcttggatcacagtcgaaccagctcctcatgctttcatcgttaacatgggtgaccaaattcaggtgactgttttattttccatataccaattacttttttatatatataaaacttcaaaactttaaactaaacttcaaacgaaaaagtcggacacttttgttgtttgttaaact

SEQ ID NO: 21538 - DNA, 732 bp, Arabidopsis thaliana landsberg
acccctagtagcgagaaagcctttcactatcgccccgaagaaactaagttgtcgagggaattttttatctcaatacctcagttacagactcctctacgacatgtgcaagcggctcttcgactcactctcaacccatatataagaaatcttgatcattcaaaaaactaataccgaaaacccaaaacttcttttaaactaattattctgtgacacttaattaaaaacaaagatgattttgtaggcattttttgttgtgagacgatcgatcgatagttttttttttttttttactatgagtccaatcataagaaaagtacgacaggtgggttttgatgtcccagacatatacgatatgcctttgaagacttgcagtagtgaggtacgaatattaattattcacacaaaattggaattcgaatatgatagtataaggtcagccaatcttctaaagtaatgatattcttcaatatacgattgtggtcaaaattccattatcgttttcattttgttttttttgtcaacatgctctaaaaccctgcatggataagactattcaataaataattgcatataagttaatgcaaaaactttacatttcaactaaattaattcacacatttctacacttaagtctataaataccttcatcatgagttaggggtttgcccctaacaatatcacaagaaaatatgagaggtgcaaaaaaaaaacaagatgataatgagagtcact

SEQ ID NO: 21539 - DNA, 867 bp, Arabidopsis thaliana landsberg
cttcactgaaaaaacctgctttcaccatcttggcgagatcaacctttgaaacagtcgattttccgaagtctaggtggctgggtttgctgggcatggcaatacggtagtcatcttcggagtcggtttcttcaatgttaccttctccttcggcagctgtcgggtttgcttcggcagcaggcactccttccgcagtcaccagtccggagcgctgcatcgcttcggagatgggcacagtctccgaagcttcagtttcgtccctctcacgctcaaccctagctgtagagcgaactctggccatttaactatgaatttctggaaagatttcttggagattaataaccttttcttccgaagctctccttctgacgaagcaaacgccaaacaggagcttcgtttgaatgcgaaagtcaagcttcagctatggttaaaatttttggcagcaaaacagtgcaatagcaatgaatgctgtggtaacttcacacctacctgtctgtttatatagtgctgcaggtaagaaggtgaatcgtcaggatttttacaccaggcaaacagttgctctgcacgctgcgcggtgggccgcaaaaaccaaatagtgaacctgcactgtgggaccgtctgcgctcagaaactgtatcgtttctcaacaacgagctcagggaaggtgtttttcggacttcggcttcctgaagcctaagagacttttttcacggatcaagctcgttacgaaaaacgatctagcaccgcgaaggggctactgttgggaccatgcttcgtcgccgaaggtcctgcagaaagaaacagcttcggctgaagttgctcgtacgtgatgccgaaggtgccatttcgtgggggatcctctagagtcga

SEQ ID NO: 21540 - DNA, 571 bp, Arabidopsis thaliana landsberg
tttacaaatataaacacaactacaagccgggttagcgttagaaatataaacgagtccgagagagaggcgcaaaacaaatcccaagcgaataagcaagtgagacacggagatttgttttaccgaggttcggttcttgcaaacctactccccgttgaggaggccacaaaggtcgggtctctttcaacccttccctctctcaaacggtcccttggaccgagtgagcttctcttctcaaatcaaagccgggaacaaaacttccccgcaagggccaccacacaattggtgcctcttgccttgattacaatggagttgtgatctcaagaacaagtgagaaagaaaagaagcaatccaagcgcaagagctcaaatgaacacggcaaatcactctcactagtcactagggctttatgtggaattggagaggatttgatctctttagtgtgtctagaattgaatgctagagctcttgtagtagttgagaagtggaaaacttggatgcaatgaatggtggggtggttggggtatttatagcccaaccaccaaaagtggccgttggaaggatgtctgttcga

SEQ ID NO: 21541 - DNA, 1821 bp, Arabidopsis thaliana landsberg
  unsure (1)..(1821): unsure at all n locations
gcaacccatggcacaatcaagcgacgggatccctttgcaaagtggataaatgnnnnnnnnnnnnnnnnnagcgtggcttatcctccgatatggccgtaaatctctgactaactcctctccccatagcctaaccctttgggtacctaagggagcgtggaaaatcccaaactgctctagatagtggaccgtcatagcctcattcccaagacacatggagaaaatgccacatgctattgttgaagcgccatcctctgggaccagttgagccagaagttcaagacccccattgaggtcacaaccttcaaccaccacccttagcccttcatagtagatggcagttttgttgccagctttgaggcatctctcaaagaaaggacggaaatagtacaaatcgcttggatcagaacagagagagtagatgcaagcatcctttaaaacgtcatctctgtacaccatatctcttcccctttggccagccttcaagataggacctagcaaccaccaacgatcatcagccacgagcttgacaattttagccaacagatcgtcagggatgtcgggcatttctgtttccatttttttgtggatagcctttgagaggaaacaaagataaattttcttcttctacaatgttattgcaggttgattgaatataaaagccacaataaagtagtggttgggaaagttacagttgagaataattacatcctgaaaccaaaacatattaatgacatgatgcctactctttaaaattgcccactaagtaatagtaaaaattaaactgtacagcgaaatctgtacaccactttcagtacaccaccatcagtacgctgcaatcactagggtttgaaaaaatttaaacaaaaatacatgaccaataaggctatgaaggtatcaagtgattagtagtacatgccactttgaaagaaaattagacaatatgcataaccctatgtgtataccgctatctgtacaccgctatctgtatatcgctatctgtacaccactatctgtacagcacaatctgtacaccactatctgtacatcgctatatgtacagcacaatctgtagaccactatctgtacggctacaacgcaatctgtacgcttagtaagtgtgcggcgatatctgtacgctgtataaactgtacggttatatctgtacggtgaaaaaggtatacgggggatctttgtacgttgtataaactgtacaacgttatctgtatacttaaatgagataaacgattggtgaagatgtgaaaacaactgattgaactgaaatacctcgccagatgctacttgaataatacacaaaaagtagtatctattcatcagtaatacttgcaacttcaaaagaagtttaggaattagacattgttgttaaaacatatcgggtaaaaatgtctaccccgataccaaaaacaaaaacaacaccgaaaaaagttccttcattaataacaaaaaactagccaaatctttctaagtttaaatagcatcatccaaggggggtcttgcacgtaacacgattgtgacctaatcccccacatcgtccacacttgttaggcgttttggacttgttatttccctacatgcaaaagaaaaaggattgctgtctttggattatatagaaatatattgatgaaaagatgtaactgacctcatattccccaactgaatgaatccgcaacttaggaggtctcccagcaggtctttttgttttgggaggcattaaacacagtgaccttatttcctcaaggactataacctccgatggatcgcgtacagggaggattagagcttggaccgttggtgaccacattg

SEQ ID NO: 21542 - DNA, 5044 bp, Arabidopsis thaliana landsberg
catttagacaaagtgggtgtatcaactcaggacagagacatcgattataactattatcctactcgaggtaagatacgaaaacggaaaaatcatggtttcttagatcctgatcagattttgagatcttaaaaggactagtcctctgggtcagaattcacttcctttattcatatttttagtttcttcttgccaagtttaatatactaatggttagtttttatcgttttcaaggtatatataacattttatttcatttagttttactcttagaccaataagaacaacccacccttaaccttttgtcccgtgcagttagccttttaagtttaacctacaaattttataagttgtaattccttttggactctgaccagacaaatgctagaccaggcatgcttggttcgcagttcgcaaatcgttattgtctgtggttacaaaagagaactaagaagcaacaatttttattcaatatctcagtttctttaaatagtatatccgatgatctttaagctctccttcactcgtttctttatagtactgcagaaaacaaatgtaactacggtaattaaaaagttctcaagaacaatctaaatggaaaagagtaaactgaagttacctgcaattaaagaggggagaaagatgctgtttttggagtttgaaagagtcactcaaggactttcttggggtcaagctgtccactggagtaactagaaggaactgcagagagttcgagtcttcctttccattcttcaccgggtttcaatgtgatcggtctctcgatagccgcagcttccacacaaagcatatgcttatagtcttcatctcccaagtcagagatcgtctttgatttcttatcccaaggattccacaccactgaaaagacgattatcaaatgattcagtcatattaaacaaagctcagattctgatctcaataacaaactcagattctgattaccagcatcagcaagcccgtccttgcgaataacgaaagtcctctctttctcgtgatccaaaatagcaatctttgttggcgtgcttagataaatcttgtcaacctattttttcaccaagtaacaagtgttttgttatgagtgatgatgatactagacaaaaagagatatttcagaaaagaggagagtttggaatagaaaacttacttcggattcaaaagttatcgcatcgccttgttcggtaaaacgttctctgtccttcaagttgtcaagataatccaacgtttccaatccttcaacccgtacttcactgaacacaagaaaaactaatgcttattacataatctttgtttgtattccaaatcttcttgaaaaagaagtaaataaatgtatgcaatgagatttaacctgatgtctgagacagagaaataggtgtgataagcaaatgtgaatgtaaacggctttccatcagagttggtgttcctgatacgagatgtcagagttaattctccttcggtccccaaggctatcctcagcctgaactcaaaactgaaatggacacaccgagatgaaagttagtagtgctctaaacctgtaagatatttctacttaaatacgagcataatgttctgagaaaatataaagagcgagttttgaagaatcttacttgttaggccagattttcagatcgtcttcagttggccttaggatcaggtcaacaaaagcactagaacaagaatttaatggcaacggaggtgggttagccttgacttcccagatcctatttctagcaaagccatgtgattcgagtgtaccaaagttactgaactgcacatacaaaaacagaatttcatgagcataatgaaccgtaaaatggaacaaccaaaggaagaaatataataacgtacttgtggaaaacataggggaatccctccacgtattggtttcgggggcttgaatatggcctgcagaattcataacacatggtttcatttctattatttgtagctaaaacacacaaataaccgagcaagaaagactattctagtatgagcaaattactagacttcaaagtaaaatgttgtctgttctgtcacatacttctttaggaaattaagcaaaaaatgaagtgaagatcctttctcagtttacataatgatcgatgtaaatagcaaaatttaggcaaagattttcccaaatctttcatcagctttagtgagccaatcattctagattgtgtctttagcgttatagagacacaatcaaccagagaaataacatgagatacataaatgtttaccatcaatttgaacttcataagaggccatatcatctctaacgaagttggaaacattaatcatgaaccaaatgtcccgtttcgtgatcaagtggaagatggtatagatatggaggagtaccttgctactgaggtgaagtaactcctctccgttctcattcttccaagaagttacatgacttccatacaagtatacctgcattcgttcaccaactcaaattaaacaaaaaacgtaatgatacagaacagacaaagatggagatcaataaatttgcagagagctcacacttaataactaataagatgatcaattattcaaaaaaaacaattcacctctgagaaagcatcaacagattcatagattacactaaacattaattttacacattcttcgtcgaagataaacacgcagatccggttcttccattaacacaaattgcataaacaaatacagaactcaataacactagagctaaaacccaaggatctaagagatttgcaaatcgtaatcatactacaaaaatcgatctccaatcaaattgatctaaatctcagatcaactagagatagagcacgacgccgcgtgaaaatttacctctgcagagcggccgcgagactcgcggagaacgatcttatcaaggccattgatgcctttagcaagctcaaaatgatgacgctccgtcgccatggagagtaccaaaagtagaaaaaacaaaaacatgatcgaaatcctgagattctccgtatatatcgtcgtttctaatcttcttctctcactcactttttttcctttttttcttcactgctgcttcacgcaaaattggaaaaaggttgctgctcccctttttttttttttgccgtttttgttcgaaccggttctctcttacgactccgttttgtttattctagattttgttttggtttactatgattttttgtttttgtttttgtttttacctctgacagacttttaaatgacaaaaagtttatatcataaagtgacaagagaaataaagttatggattagtgaagattactgacgaccatagaataatataacacatgataaagataagatttaatttacattggttcttcaataacataaaagcaattagagaatttcaaggccaggaaagaaagaatcttacagccagacatattatgtgagatcataaaacaaacaaacaaaaaaatcctaattatcaaaacagaaacttgaatatgttataattatataaagagaatatatgatttttcaaaaaatttatgtgcttgattatttatttgtaagcagctcaaaggaataaatgtatgatgccctctttgtgtgtttcttgagctgcaaaagcaatagaaagaaagatcaataagactatgttaaataggtctagcgatactccttgcctatcagtaggtgtaagattgcaccaaagtgatcaaacaaaccagagtagaaggcgaaaaacttacgggtctttgggttaagatgaagaacaagaaaactgagttcttgaagaagagtgttgtttagaagagattgacagacattttgagcttgttttgtttccatttaggcagtttgtagaactcattctttgtcatctcaaacttctccttgaactctactgaagtcaagtatgcctgcaaaataccaagctgaactcatgaaacacaaacttaataaacgaatgttataatatgtgttgagagttttgaagaatctgacctctcttctagtgaggtcgacatctgaaacaggatcctctgagtcggttttaaggcgttcatatgggaaagtagggaggctgctctcttcttctgcttcttcttcttttgagtcttcattgatgctgctcattgcttcttcctcgtttgtctctgatgtcgattttggtgcttctgcttggtttgtagcttcataaataaaaaatgatcaaaaaagggtaagctcaagatctcaactttattcaccaaattgatagtttggggttcaaaagtggagctttgtttttgctacagaccttctgaagaactggggctagtaggtggttcttgagaagtaggagtaggtttttcaaaaagcgctgtacgggcagctatagcggatttaggagctatcttcgagaggtctggggcatgagatttcgggtaaagcttccggaccattggactaaccataggtggtggagttgattggtttcttatatttagtttctcaaagtttgctgcaagtgcgttgaaagctggagaccgtcccctcacgcgggccctgtctggactaaaagtcatacttctggaccgaggctgcgatttgtctggaacggtggacctgctactgtatgcagggactctccttttaggtttctgagcaacaaaaggacacaagatcaagacagatcgagattgattttagacaaatgtaaccaaatgagtacaagcttttacatctagaagcggctttcctttatttgtcaggatcgcaagctttctctggaaagagtctccatgcatctgcaagaagcagctttatcgcttagtacgagttagctccatgaggtgtgattttcaaaagcaaatgtgaagagagagagaagtccaactccagatttagaagagtcccaggtgaagaaccgagtgaaaaatggaggttcgtttccctctgttacaatgtatatcggtgtttcacttgctagattctctaggaggaaatcatgcttaagaaagttctgttgatgaagacaataaagcagagtgtttataagaacagttttcagtttagttagttaatctag

SEQ ID NO: 21543 - DNA, 878 bp, Arabidopsis thaliana landsberg
tgcgctggctgaattcaggattatcgcagagcatattggcactagggacttagtgcaggaatttttggctttcaaaatatttccaactatgaaggaatgggctatgcgaagcttgaaggagagaagaaagagggggaacttgtccgactgccataccactacaagttcaagaaatatttcaaagcaccctgccaagaatggctggaaacaatcaaagtaatgtgcaccgaaattcttgggaattattctaaaaaagaagatcaattgatgacagcagccttcggcacccgtccgaaacgaaggctaaacagagtgctggatgctataggctttgaatatcctgattatgaacgactcgacaagggtgccgaaggcagaaaagaaaaagagcggttggcgctttgaacaaagacgacgaagatcaatcaaaaaagaagaaacaaaagtttgaagcaaaagtattagcttcgaagaaaagaaaagactcgtctccgaagcaaaaagcaattgatgaagaagaaggaatttctacaacaccctctgttaccgaagtagaggaatcttaaaggtaatgactggatctttacctgtcaagctaagtccactggggccacatccgacgaagctttttcagaaggaaaaggagcccgcgaaaacgaagaaggcagctaagccgaaaaagcaaaggatcattacagtgatagaagtcatcgaaggaacaccaccaggagcttcacctccgaaggcgccggctgttgagagcacgacggctactaaagctgcacctttggaagccacaaatgtcgaagctaccagagccaaagatattcatttggaaagtatggttgctgatatagataaaatactactaaacatgg

SEQ ID NO: 21544 - DNA, 725 bp, Arabidopsis thaliana landsberg
  unsure (1)..(725): unsure at all n locations
cacaatgaaaggaacacttccagctttgtttctttgtcttctgggttcggtcctggaagcagcgggggcaaaaccaaactttggagactccatacactgccttagctatcggactactccggagaatccaatcaccgatgccatatccttcgacgataacaccaccaccttcttgtcttcttacgtgtcatacacgaaaaacaaaaggttctcgacccctaattatagaaagctactagccatcgaggccgcataacatgtatctcatgttcaggccacggtggtctgcgcacagaccaatggtatccaactccgtatacgaagcgggggccatgactatgaaggcctttcttacgtgtcgtctgtgccatttgtcattcttgatatgcacaaactgagggatattactgtcgacgtgtcaagcaagaaagcatgggtccaagctggtgcgaccttgggagagctctacgtgaagatcgatgaggcaagccaaacgttagcgttccctgctggcatttcgctacggtaggagctggaggacacataagcggtggagggtatggaaatctgatgagaaaatnnnnnnnnnnnnnnnnnnnnnnnnnnnnnnnnatttagttgatgtcacgggcaagctcttgaatcgatcttccatgggagagatctcctttgggcgattcgccgccgttgttgttccagtttcggagttatactcccctgggaaa

SEQ ID NO: 21545 - DNA, 961 bp, Arabidopsis thaliana landsberg
cttatggcttgtcaagttcttgacttccctcttgaagccaagcccatccttaattgaggggtgtctaccaattgtgtaggcatcccttgcaaattttagtttatcaaaatcactcttgctagtcttaagttgggcattaagactagctacttcctcatttaatttagaaatgcaccctaggtgttcactacaagcatcaacattaaagtctttacacctagtgcaaatcacaacatgttctacacaagatgttaatttactagatttttctagcttagcatttaaatcatcatttatgttctttaagctagaaattgtctcatggcaagaagataattcacaagacagcatttcatttctcttagcttctaaagcatgggatttttgtgcttctacaaatttatcatgctcttcatataaaaggtcctcttgtttttctagtaatctatttttatcattcaaagcatcaatcaattcattaatcttatcaattttagatctatctaagcccttgaataagcatgaatagtctatttcatcatcatcactagactcatcctcgcttgaagaagcataagtagtattgttttgagtacataccttcttctcctttgccatgaggcatgtgtgatgctcgttgggaaagagggatgacttgttgaaggcgatggcggcgagtccttcgttgtcggagtcggacgtggagcaatccgaatcgcactcctttccaatatgtgccacacccattgcattcttgtaattcttcttatgttcacaggtgccactcgtcttatccaggtcactaccagtacaggaacaactaacgatactgtgagcactcttattagatttaaagtacaagcgcttgctcttcgtctttgtcttgtttcaatgcaccctgcgagaagctaacaggaggattgatacgtcagatgatgacgtcgatttcttaatgactaag

SEQ ID NO: 21546 - DNA, 368 bp, Arabidopsis thaliana landsberg
gaagcaatgaagattattaacttagtgattgaatcacacttatgtcattagcacgtgtacataccctagcttggtgtgggacttttactggtcgacaaaaatatcctttggtcggagcacaatgagcatcctccgaacatacgcacaaaccctctaatgcgcatccatcttttattatcgtcacatttcctttgattcctaagatctgatcagtccattcgcttgagaataaacccattggatcatagctttcttttactttcaagaatgccggcacattcttgtactttttaatcactccatcaaacgcttagttcctgttcttaccccaatgcggcaaggcgttatacttgaacaacgcaatttgc

SEQ ID NO: 21547 - DNA, 904 bp, Arabidopsis thaliana landsberg
tacctctgaagaataaggaaacctgataaacttacatggaactataacactactggtaaatacaaggttatattaggatattggcttcagactcatgatcatttggataccacacctataataatcagacctcgttgcttaatttaactaaaaaaaaaagtgtggaacctgccaatcatgccgaaactaaaacagtttctctggtgaattcttggtagagctctagtcacaagagaaagattaactaaagaggtatgtgtatagatcccacttgtccatgttgctaatgagataatgaatccatcaatcatgcgctctttacatgtccttttgcaactatggcacggtgactagctaatactcaactccatcgaaattattcattttctaataacattgaggaaaacatctcaatcattctaagtttcattcagaaaaacacgatatcaaattttctgaaactcctacctttttggctactttgaagaatatggaaagcaataaacaacttggtgttcaataatttcagagaaagttcaacaacaacaatactaaaagccaagactgaaacaaaagaatggctaaatgctacacgcatacaaaatcgaaggcctacaccatttcgatccaatcacgcagccaacaagaattggacaagtccaccgctaataactagtaaatgtaactttgatgctaagacgaaagtgcagaacttagaaactacaagaggaaggattatcagaaccatgacgggaatccacaagattggcgttcatggattcgtaaacatataaacaccccactggagacggagaccatggcactactagcagcattacaaaaaacatggatacgaagatatagacgagtaattatggaaggagactataaaacttaaataact

SEQ ID NO: 21548 - DNA, 973 bp, Arabidopsis thaliana landsberg
  unsure (1)..(973): unsure at all n locations
gttccgtgcaagcttcagcgtcaccaagtgaagttggtctctgttgtctattttctgattccctacacacttggtgtatgtaaaaaccatggggattatcatttctcaagttctaataaaattctctttttactattttcttctgctgtttctgctacaaaaagtaaaccatccatgagattgacaactcccaagtttacatcataatatacaaaccttctatacattcaactttagttctacaagcttctgtacatggcaaatacataatttgaaattacacactgacgagggaaatgatactgagatatacagagagaatactgatttaatcataacaaatcgaaataggaatatttggggattggtggtataaacaaatgcgaagacggtttagggtttctatgcactgaatccacggttaagcgagctccaaggaccagttggcagtgtggtacaagcctgtgaagctgcctcctccatttgctccatttgaatccctgcattgcagatgtttgcaaaagacctcatgtgcttgataccgtactgagacagcgatccacagtgcctctcgaaagctctcacctgaacatacaatgaaggttatgcagttcttctctatatgaaacatcagtcaatgagttcataatctgaaacgtcctaaaaggataagagtaaatagagtcctgcgtcacaatcagtatggcccatatttccctgcgtcctaataatagagtgctgggctccacaatctatctgagatttttttccatcttccattacgatgattgatgttatcccatgaggacatgactataccaatacgtttttcaatactaaccacaagggctgatgataagattgacacaacatagtcttaaggggcangtggcctatttatttacctgatttttaaggcagttccagtcatcgactagaggntgcccagcagaccgtactttgtttagcactt

SEQ ID NO: 21549 - DNA, 234 bp, Arabidopsis thaliana landsberg
tgaatgctcattatagtcaagactcattgatggcaggcaatgtcgagaaacctcaagaactcattaacttggcactcaatcaatgttctccgtattaccagtcaatgcttgccaatgttcagcctagccgcaatcgcgttatggaaccagaaacaacatttcctttcacgggtggatctgccatgaacgagcaaaaccctactctcttgtgtaatccttacgtggagagcactc

SEQ ID NO: 21550 - DNA, 531 bp, Arabidopsis thaliana landsberg
cctacctctacctttccgccagtacaatctccggaaatatcccactcgcgatcaccatgctcaagagtctggacctcgtctttataaaacacaccaatttctccggtccgattcctgataacatcagcgacctcaagaacctcacgttcttggacctttcctttaaccaatttcccggtccaattcccggttcgctatctcagatgcccaagcttgaagccattgagatccacgacaataagctaaccggttctataccaaactctttcggttcttttgttggcaacgtccctgaactcgacttgtctaacaatcagctctcaggtaaccatcatttttaacattctttattattaataaagttataaatcccgggttttatgacactccatttcagggaaaataccggagtcattgtcaaaacacgacttcaacgctgtgtttctgtcgggaaacatgttaaccggagatggttccatgtttttcggacggaacataacatacagacagctggatctgtcgagaaacatg

SEQ ID NO: 21551 - DNA, 457 bp, Arabidopsis thaliana landsberg
ttttgggaagaagaggactcatcgctgtcgtagtagacgatctccttgatgcgtcttgtcttcttcttcttcccatcttttcgcttgtggcccgagcccgagttgttggacttgtcatcccttggctcattgacgaaggactccttctccttgtcgttgatcacaattcccttccccttaggatccatctcttcgggcggttagtccctttcttgaagagaacggctccgataccaattgagagcacctagaggggggggggtgaataggtgatcctgtaaaaacttaaacttatagccacggaaacttggttacttgttagcacaataatttccaagtggctagagaggagccaaaacacgataaccacaagaaagcaatcacagagatgacacggtggttatcccgtggttcgggcaagtacaaaactgtgctactccacgttgtggcgtccaac

SEQ ID NO: 21552 - DNA, 620 bp, Arabidopsis thaliana landsberg
ccgtcgctctccgcctccgtctccattcgctccgtctctctccgcctccgtctccattcgctccgtctctctccgcctccgtctctctccgcccccgtctctctccgcgtccgtatctctctgcctccgtctctctccgcctccgtctctctccgcctccgtctctctccgcccccgtctctctccgtttccgtctctcgccgcctctgtctccctccgcctctgtctctctccacctctgtctctctccacctccgtctccctccgcctccgtctctctctctgtctctgtaacaaccctaaaatctctcgaacccaactgatctcatacacctgaaaggtataaaacatccagttaatgtatttgagttcttgagtatttacaagtatttgatttttgaccgttttaaacattgatcacatatcacagccggatcttctgcctgcatcttctgcctgttggatcagaacacagaggctagtctcacaatgaaattcgtaattgattgatttgtttaagatttgactgatgaattggttgtttgctattggtttaatgaactgtgctgtgatgtgaaatatgaataatattttgttggtggctatgggcctgttttttt

SEQ ID NO: 21553 - DNA, 1735 bp, Arabidopsis thaliana landsberg
agtacatatgggagatttagcccacaattttgatcaggaagaaacctctagctgcttttgtaatggatatccaatactgtggcactcctttggttttgtaaggtttgaacccaatctatgcatttttggtgtttccaaagtgcatcgattggaaacaggccataagtaaataactaaaatcggttcatggtatatataccacgtaggattttgaccttaaatgtaaaagatcaattgcttaaaagtttgttctgtatttcacgtctctcttatatcatgacattccacgcattgttttcagcttgaaggcagtctcatgtatgctttggaaacattagtttgtgaagccagccgtgcaatgtggtgaatctttgtattgtgctaacttcttccagctatgtggattagatgagagatcctctgtatgtatattcatagcttgatgtcttgttccttcatggtacattgtttataaccgatgattggcgagtggactcaacctacatacggttttacagtttatgacagacacctagctgttaagaggaaggtatgctgaagagaaaatgcagaaccccctttctttcttgaaaaggtagatacactctaggaaggtttagaacaaatgaatgagaaaactctgcattgtaggttcaagaaacactaataagaaatccacatgtttactgattagtgagaaaccaagttatagatgtagggatagatacagtgatacataaataagaaagatgagtggaaactgcaaagaaagtgaaagtttggttgtgtgtaagaaacagctttgggattcaagatgatgaatcattagaattatacagtggttgaacttttttgttgattaaatgccctatgaaggggacaacatagaagattatgggaccccttattttttatgtatgactttctttcacttttcttttgccctttagtcatttctctttttttccatttttcaccagatgttttttatttggtttaatttttcactagaggttgataattgaattgattcattggtatgaacgcacgtgcttctcgtcggtgtgtgctctgctaattttgatctcttgtttttttttttaacaagttacagtgtgaaaagaattgactgtgtttgttaagttttcaaggtatgcaacggctaagtaaatatcattaaaaaaaaaaagaaggaaaagagaaattattctgacaatgttataggtacaattctgggctccttcatccatgattcaactaaatttgggtccttggttttgagtctgttgtagttatcatgaaacccacttcaggatattttgacacaaaaggtgataatgggagttggaaaaatagaaaaagtatcacggggaagtgatgaattgaagaggtgtgtgtagcccaagtgattcacacgattgtgacaagagattattaagtttgctttaaatgattcattcatatcgctttttcaataataaaatttccagcttttgtgggtctttctcgctcaggtactctcgctcatatgtacaaagcttaaagactggcacgagataatgtgcccataaggcttcttccatccatcccaaacttttttagtaaaaacatactttttctgttccttttttttttggttagaaaaaaaaattatttctaaaaaatttattttttaagttttccatgtaatctttattggttagtattgataaattgtaatttttaaaaaaaatag

SEQ ID NO: 21554 - DNA, 695 bp, Arabidopsis thaliana landsberg
cctaagctaaggtgcataaccttgcttaatttcacatttttgaattatttttaaacttttttcataaggatttgtgcttagaaactcttaaggatcaccaatggaggtggtctaaatatatcaaaactagaactgacaacataaatagtttacagctatacaaattatattgtaacaatattacaatcagtggctaatgacgatagttattttgtagatgctaatgtcgtttaaaaaaaactagtatagatcatttgtttgcacaaaaaaaaaattaagatcatttgcaatacaatataataataaatcatattctgcaaaatagtttgcatgttataacgattcacaagctccgaagtgctttggatgcgttcagttatatccaaaacacaaataataactatgtttaaatatatatgtatatatatatacatatatatattattttctgcaagtcgagtaaaaaaaactaaataattattggtccaaaaccaaatcaggtgccgaaagatcgatagaccgatccacaagaatctgtcacataaatgccgaacgtgggtacgtacggtcggaaaatgacgtaggatcccaatttagctggctgttatcgggataaatcaagctcgtcaacaagtacgattacaaaaatgtaaaaaagaaaaaaaaaaaaaaaaaaggagttaaaacaaaacata

SEQ ID NO: 21555 - DNA, 3020 bp, Arabidopsis thaliana landsberg
gtcgagggtcacagtctctctctagctgtctagatctctgctcctctcccacattttgcagcatctgaacacatgaaataaagtaaatcaggactgcctaccaggcaacaccggtttgcataacctagagctctgataccaaaattgtaacatgcggttttacttcgataacaagacatgtcacgagatatcttatattttaagtaatttattcttaaacgaaaataactaacatctttctataaattcaacttaaacgtctttcaatccctaaactgaataaatattctaaaacatccaaataatagaataatgaaattgatactctcaaattcaacaccaactaacaaactccaacaactactcctcaccattatctgcgaaacaaaaagagggatgagcaatctaagataagtcttaggactcacgaattttccatatagaaacatacctagcatcacaaagtataaacctaagacaagcaatcaataacgtgtcataaacacgacacatcaaacaaatgagactacgtcccataaccactaccacaatggcagacaggatacgaacgtataacacacatcgtctactcgtacatacaggatacctcgtgcgttagcacttcttccgtgcaaccggatccctcgtggctcttgcacttctttcatgcacttcacactcgctggctcgtcagccatcctgatctatccacgtctatagaccatcacacaactacaaggatttctccttgtaggactttctatcgcacaatatttcctcatacaaataatttattattaccacacaaatatgcatttcacgaatcacgcaacgcatattaaaatattcatttttattttgtttccaagattctagttctttttcttcatactttaataataataatatatttatatacttataaaatattaatacacattgataagtgtgcattttacatgttttgagcattcatttgtcatcactttagcatcatatcatcactgttttataccatttctaatcatttgtcatcactttacatgtttaggatagatttgtatgcatgttgcatatttgcgttgatctcaggtgatttggagctgttgacgagctatctggaagaagcgggcctgatcatgtcaaaccactcgaccccgaggtcgagtaggagcttcaagaactcaacagatcactcgaccccctggttgagtagaggacatcactccttcaccacatcacctgaccatcactcgatcacatcactcgaccctgaggccgacgtgtcttcgccttcattgccagaacactactcgacctcatcactatacctggaagtcgagtatcaccatcaccaccactcgactacatactcgatgacaagcttcagagccttcttcattccgcactcaaccagacactcgagcacaaggaagaaaagaagactccagctattcactcgacctctcactcgaccacctgggtcgagtacagttcttaacccgtcccaatacttcgtcgttttgagtattagggtttcgggatatttggctataagtagcatgtacttctcattttctcagacaagaagtttttatctagttttatttccgcagaccttctgttctagactttttgtaatacggatttctctttatctattcagtattcagtattcagtttctgttcttgagttcgtttactgttgttcattctgttatcatcctgctgttacattgttattatcatgttttaatttgttcaacgtttatgctttctgttatgatgtctgagtagtgaataggtttctgaggatgggttagtgtagtgtagaattctcagtatgctaggtgattgagtattgattgatagatcccttctggattagttgttcttaatgcctattgctttctgatcaactggaatttgagcccagacatttcctcgccaaaaaggtgttcgatgaaatgtctgaaccactaattccagagattcgtgaccctgtaccaaggtattggttgcagggagcgttttggctttaacttgttgattcgtaatgcctgttaggttagctctcgtcaatggtgattgagtctgggactaggttagcttgagagtctctgttgcggtggcacttagatttggttaatgaacttgttgtctagggttaatttattgagcatgtcaatcacctgtaaactgatttacttaactactcaattaccccatcctcgggaattctttatctgattaaattatttgtttactctactgctgtgtactgcatcctgtcatctgttgcttagtttctacaattttttctggttactcgacctcatactcgaccacccagttgtctggcaacagactgtgcagtcgagtatctgtgttttattttctgtctgttactcgacctttgactcgacctcacccagtgctctacaaagagctgtgttggtcgagtgttttactgtttctacttgattttctgttttctgcatgttcacttaggactgctagaacacaccaaaacctgttattgcttggcttgaattagtgacttctgatcacatcttgattgttatcatcaaacccatttggattgacaacctaaaatactacaacgatatgattggtgttttaggataattgactgaaaaacctattatcattccactccaaattttatggttttgaaatgaatctcaaagacttgtccatggcgtgtttatgcacctaaggtagatttttctgacagctttcaagtgcgaaaggcaaatcacagacacacatgaaagattgatctcaaggcgtacatcctctcttctctttcatttgtgttcatggttgagtggaaacatgggacacattgttctcaacttctcatgcctatccagtgaccattttaccaatatatctaaaaatcaaacacatagttggatgacactaaactaccaccaaatgtcttgagaaataagtaattaagaagcagaagatgacattagaaccaagactaacat

SEQ ID NO: 21556 - DNA, 514 bp, Arabidopsis thaliana landsberg
tcgggcaaaatccctaatcctaaacatgcatgctaaataagtttgataagttcacctaagtaaacatgccgagtcttattacacacctattaacccgtctcatctataatagttctgatgatagatgtcttttagggcacacctattatataagatcaagttttaggtgatcaatctagaactagcagttagaaatattatagatgaaaaactctaaaattaatcctaacaggttatcgatttactatccatctaaatccctaatgagacaccctaaacccaacaaggagactactcggacattattaaagaaacacaaatcataatttgaataaactgcattgaattataatatgaaatagagtaaaaggagttcaaaatcttctctgtagggatatgattcttctctctaaaagtattctctctttacacaaaaattccttaggtcttaaaaatgaccttaataaattacttatatatttaggttacaataaaagtgcagggttttttttgc

SEQ ID NO: 21557 - DNA, 2856 bp, Arabidopsis thaliana landsberg
  unsure (1)..(2856): unsure at all n locations
tttgtcataattggataaatgagacaattaaaaatcattttataaataaatacgaaatgaaatgaaaatcgtgatagattgtgtattatcggtgtcacttgttgtgtatatatatctaaaattgaaagataccaattatttgaaatggaagaaaattgggtgaaaagaaaacaggtgaagaattaggtttgggcaataaatgaaaggtatagtggatattttgtgaataaatcaacgacttgtttgtatcataattgaacaaggccggtgctgcttccatgttccctcccaactctttccatttaagatcgtaggtcaaaactcttaacttagggtaatgctacatttattgttaaactattgcatgttctctagagaaagaaaaaataagtaaagccaattggtcactaaatcattctagtcatcgattgacagataatttcgtcgttaatatgttttgaatacttgctgatgttaggctttggtcataaaagaatcattacaaaaaaaagtttttagtaggaattatccatatatatatgaacttagatttaaatatcgctaactaacaaattgtatgtttcaagttatcatacaatttaaacttagatttaaatatcgctaactaacaaaaaaaactcttttccagtagaatactcttaaaaatctaatggcaattctaaaattgaaaatagatgacctgtgtcctgtgtccagtcctagtcattgtatcaatcataaaagcatatattagaacaacaacctaaattaattaacgaaacaaaacaaggtgaattaaattttgagtagacgacaagaaaaaaaaaaattaattatatttaactacatgtttttttagttaattgtattaactacatgttcccggctggtgcactctatgttatttttaaaaaccaaaacaaaaaaaaacaaaaaaacatttttagttcgatatgaaaaaatgattgacaactattgggcttcattgataacttttgggcttggtttatttagcccgatggagaatgtaatattacgtatgaaagaattacgttacgtgctttcctgagaggatcaagagatttttcaaagtgcataatggaagtaatgaatagagatgcgttcaaattatttaatgtttctgtcttctttcttacatttgttgtactcatagttgattaatgacggttaataaaaatcaaatgatcaaaacaatttaacacaattcctatctatatactagatccagtttcagcgaagccgtgttcaaccaaacaaaagttttagacaataaatcctagactacacattttgaaactgaatgaaaatacacgattacagaaaaaaaaaaaaacaaaaaaaaacccattgtggaagtaactcagataatgcaatccctattttttttttataaagttgaacactttgggtacacacataacttcagaatcatttccaataattcaatttataacctgaaaagcatacaattgttgtaaaactctcctattctctgtcctttcaaagctgtgctaattgcgagatatcaatcggataaacgtcggaagatctttgtgcattgtaagatctttttgcaatggccgtgtttgcagcagccgaaggatgaaatgcatcccaaaacacgtactcatctcggttcaagcacgggggttctcccggtaaacatgttagctgacctccgttccttccaattccgcaacacgcagtgttcgtattcgtaaaccctaaaaacattcattcagagaacccaatatatagattagattctttttaccataaagtataagagaatatttatttaatcataggcttaagtttcatgaagatatctctattataccataagcagagggattggcgattatatcctgaaaagcgccataagcattgatgtaagtgaatctagcatcggtantagcgttgnttagntgntggaccatagatatgagcctgttgttgaagattcggttggccgagttgatacgctccacacaagttgttccgtcttcgctgccctgtgcgagcgcattcggactacatccaatggctccaattcctaccaatgcaaactttctagctccatagttgtacagtgccttcatacacacgcaaaataagaaagattgtgaaataagtaacgttcaattgaaactaaacttaaaattactgctaaagatcatatcataaaatagatcatcccaaaatgagaatcaaggatacaaaaaaaaacagaggactcccaaattaccccatagttttccatcgaattaaacagaaaaacttacattaagctggtccctgtaacgactgataagatcgtcagcatactgttcgggagtgtactgtctgctagtggagtagaactgaggcatgaagtagttattaagatagtcattgcttcccataccaacagagtaaatgcatctcttaaggtaatctgctgcagtgtactcgtctccaagattctccaccacttgtgccactgtgttcttataattctctacttgcccactaaatgttatcctttgtcccttcattaccgaaagcaaagcaaaaaaacaagaaaaagttaaaacaatatttttctagtcttaaacagaactgagaggtcatgagaattatcaaagtgttgtctttgttaccaattgtgcaccggtttcttctctgattccagcagctgcagatgcgtagttgactccttgaagtatctcttggccactcacagtactatacgcaggaatgtagttatcaaatccaagtagctcagcttcattatatcacacaagtcatgtcaaaaaaaaaaaaacatgttagattctgattataacatttcag

SEQ ID NO: 21558 - DNA, 1094 bp, Arabidopsis thaliana landsberg
agactcctttgtatggagccttcccgtggcttgtggcgggcttctcgccagtcaccatctccctcttggagtgatctcccgacatcacttcgaacggttaggttctaatgaagtaccgggctctgatactaattgaaagtcatctagaggggggtgaataggcaaatctgaaatttataaactttaagcacaactacaagccgcagttagcgttagaaataaaaccgagtccattagagagggcgaaaacaaatcacaagcaaataaaagcggatgacacggtgatttgttttacggaggttcggtccttgcaaacctactccccgttgaggtggtcacaaagaccaggtctctttcaaccctttccctctctcacagggtcacctagaccgagtgagcttttctcctcaatcaattgggtcacttagaccctacaaggaccaccacaacttggtgtctcttgctttgattacaaaggtgttgagaacaagaaatggggaagaagaaaagcgatccaagcgacaagaactcaaatgaacacaaatgtctctctcacaagccaactaagtctttggaatcgagattgggactttggagaggatttgatcttttgtattgtgtcttggagtgaatgctagagctcttgtattgaatgtgatgttcaaaaaacttgtatgcttgaagttgtggtggttggggggtatttatagcccccaaccaccaagggtagctgttggggaggctgctgtcgatgggcgcaccggacactcactattcagtgtccggtgtgccgccacgtcacccaaccgttaggattctggagtagttgaccgttgtcgcctttgtcttcttgtggcatcggacagtctggtggtgcaccggacagtccggtgccactctgactcgctgctctgacttctgtcgcgcactgtgctgcactgtacatgctgtcagagtcgaccgttgcgcgctggatagcctttgctcgttggttcagcagacagtctggtgaattatagcggacacgcctgtgtttcccgatagtggaagcttggctcctgtacggccctggtgcaccggacattgtcagtggc

SEQ ID NO: 21559 - DNA, 985 bp, Arabidopsis thaliana landsberg
tcgtttatccgagcgagagttacttttcacggaaagtgatgagtgaggtatccgtatcccgaagcatgggagtccctcggcttggtcggccttgccgcttacgtgtactcttactcgtccgttggattctgttatcgatatagtcgagaaggcacgaaaatttgtttcggcagaaaagttttcgagcattaagactcgttcgatcagcggaatcgcttatccgagcgtgagttacttatcgcagaaggtgacgagtgaggtatccgtatcccggaggcgtaggagtccctcggctcggccggcgttgcctgcttacgtgtactccgtcgttttcaggatcccactttcgaagtagtcgagaagcacgaaagatgttctggcggaaagactttttccgaggaaaattttgacgcagagggggtgcccccttctagcccctgagggagggtcgggttttgccgaggcaaggctgaccctttgttgatggttagactttactcacgtatgtacacgaggtatgtgaacgacttgaaaacatcttaagggtagaagcgacgtagctattcgatgttcccagcgtatgttgtagactttgcctcgaccgttggccagcttgtatgtcccgggcttcagaattttggcgatgatgaacggcccttcccagggaggagtaagcttgtggcggcctcgggcgtcttgtcgtagccgaagcagcaagtctcccacttggaagcctcagggccaaatccttcgggcgtggtagcgtcgtagagactgctggtaccgtgctgagtgtagtaaggctacgtcccgagcctcttccagctggtccaatgaatcctctcggctagtctggttgttttgctcatcgtatgcctttgtcctcggggaaccgtattccaagtccgtgggtaagatggcctcggccgcatagactaggaaaaatggtgagaagccgtggccggctcggcgtcgtcctcagact

SEQ ID NO: 21560 - DNA, 1562 bp, Arabidopsis thaliana landsberg
atccagtttataacgagactatgtcaatgggaggatgtttcaaacctttagtttggccagtggcttggccagcaactggttccgttagctacgagtagtggctctttgatggttgaattgttacatggtaacttagacatttgggttaaggaagctaaacatcttcctaacatgatatgttaccgtaacaagcttgttggtgggatttcgttttctgagttaggtcggaggattcgtaaagtggatggtgagaagtcttctaagttcacaagtgatccttatgttactgtctctatctctggtgctgtcattggtagaacttttgttattagcaatagtgagaatcctgtgtggatgcagcattttgatgtaccagttgctcatagtgctgcgaaagttcactttgttgtgaaagacagtgatattattggatcacagatcattggagctgttgaaatcccaaccgagcagttgtgttccgggaatagaatcgaagggctgtttccgatacttaacagtagaggaaagccttgtaaacaaggtgctgtgttgagtctgtctattcagtatattccaatggaaagaatgagactttaccaaaagggtgttggttttggtgttgagtgtgtaggagttcccggtacatacttccctttgaggaaaggcggtagggttactctttatcaggatgctcatgttgatgacggtactcttccgagtgtacatcttgatggtgagattcagtatagacatggaaaatgctgggaagatatggctgatgcgatacgacgggcaaggaggttgatttatatcacaggttggtcagttttccatccggttaggctggttcgtggtaacaatgatccgacccaaggtacattaggagagttgcttaaagtcaaatctcaagaagtgttagagtgttggtttggtgtgggacgatccaacgtaaggagtctttgggattcaaaacagtaagaatctacataactctgttgttgcttctctgtttgcgtgaatgctgagttaaaaaaatatgcaggtctaatactatgttcttaatttttcgcataggtttttctctgtgtttctatttaatccggctaatgttccgtatccaaaatagatccacgctactgtctatcttgttggaaagcatgagtttgcttcagttagatcgttttacatgtctgtactaactgaagcaatgatccttctatcgttttaatgaaagcttttattttgttgtagcaaggagttatgaacacaagcgatgaggagactcgccgttttttcaagcattcgtcggtgcaagttctcctttgtcccagatctggggggaaaggtcacagcttcataaaaaaatctgtaagatgctcattagttactgcttactgcttaaactcccgtgtgtatagtttcatcatctgaaatttgagtgtcattatgatgatcaggaagttggaacaatctacacgcatcatcaaaaaactgtgattgtagacgctgaagcagctcagaaccgaagaaagatcgtagcatttgttggagggctagatttg

SEQ ID NO: 21561 - DNA, 791 bp, Arabidopsis thaliana landsberg
tgactggagccctatcttctaaaacgatgattcgtgtccttttcgcttggaaatccattcatcatttctagatgctcgattggaagccgatgttctaggtcatacacacagaactccaagtatcccaaacttccgtctggcctgactccgtcgtcctcttactcttcatatatgaacaattcgacagctgaaagaaactggatggtctcttcttcatatccctccattggtcgaaacatgtgaatattcaggttgcattgcttaaacatgtagtttacatcatcatagatgccgagtctctccatggtcttgggatgagggtaccgagttcctaataactcattgcgctttagcagcttgtagtattcatttcgagttgaacacttctttgattccaaatcatcatcgcctcctttctccgtttgatcatcttcctttggtgaagccatatcttcctcggagtcttcaactaccagctccaacctcctccccacgggcttcttcccttgagtgatatcttccttattcctcgagaattctcttgtagaaagcttactcgactttcgggatcgagtattttcagctggagacctgaaggtctcttcttcttgcatcacttcctcctcttggcttgattcactatgatcgatcgcaaaacttgcttgatctctcctactcgaccccaagggtgatggttctgaaggtcctcgagctgctgcatgcgaagaaggtgttgggtacctctttgatggggagagagctttgttccgaatctttgacaaaagtcagcg

SEQ ID NO: 21562 - DNA, 768 bp, Arabidopsis thaliana landsberg
tcttgtcttgagacatttctcctttagaaatggcgaaattgcgtctttttaaccgaagctcagaaagcttgaaaaactagcaagcgttagtgagcaagagctatgaaattgaggaagtaaagcaaatggcacaagcagcgtatcaaatatagctgatgtgagttcttatttatacgttcatcatgctccaaattgggggagggcctgtccatcattgactgttgctattctagcaaagggaaggtgttttttcggacctttggcttaaggccttcgtccatgtcgcagtctgaatttggtaccttgaacaaattaatactgcgaggggctactgttgggggccttcatcttccgaaggtcctcaaaaacatgatttaacaatgtttcccaagtgaaatatatgaacaggtaccttcagactcggttaaaaccatacacgatatgaaaagcatggtcgagacgaaggctgatgttgctccgaagctacgcgcaagggagcttcgacacaatggcggaaaaaggaaccgacttaaaggggaaaaggttatctagtcctcgttgggttgttcataagtaaatagtaaatatgaagggcataaatgtaaatttacacacgtgcgccctgtgcctataaatagatgaacagtacccccgtactgatcacgctgacttgtattcattcgtgcgtcatgcttggacttttaccttctgtcaaaccgaaggtacaaatgtaattcaatattattctcgtttatccatgttaatatg

SEQ ID NO: 21563 - DNA, 1021 bp, Arabidopsis thaliana landsberg
acagcggtcaagatttcatacaaagagcagacaacacaaggatcttccacgtgatggtgctctcgtgttgaactccggaggaacgcagctcgaaacagctccaaattccatagagactaagatcaaaacaaaacaaaatagctttcagcaaaaataagtctttaagctggaattatagatactatattcccaagaactcaaaccgtttatgaaaagtgaagggttacctgtatgataacatttaaaaagcaattgtattcgccaacttcattctgaagacctgtgccaaatatggtaactcctgttgagctcctagactccattgtgtcatcagataaacccccatcattgtttacttccagcggtgtcctcaaacatgacgccatatttctacctccttggtacacgtctgcgttgaaaaaacatgttctggtgtcagatgcttcatatcgagggtttttgtcaccccaaaatgattacagaacaaatatgctaaaaattctaaaataaaacgtagcagctgttggcataagtaagctggagaaaaaaaagtttcagacacctaaagtaatcagataaaaagaaaaagtgcactgcgatgaagaaaagtggtatacacaatacaccattcttcatacaaatgacagtcagtcagacaatagtgacaaaatgggcacttagcaaaatatcgcaaaatgttaactgtcagacatgatatcagatatataaacaaggatgttgaaaaactaccaaggctttgaagcactgccctttgcatgtcagcttgaaacctttcttcgtcatcgtcttcagcttgtaattgtcttaatgtctttgttcccacatctagaatgcacgatgaatgatgttagaaaacaattgctggtaatcaatgtagataatgtaattcctcgctgacataaaagcataaacaagatacaccggttacagaagtattagttttaagaaatctaacggcttcatttgtgcctctactggtcacatctaataaattaataat

SEQ ID NO: 21564 - DNA, 586 bp, Arabidopsis thaliana landsberg
  unsure (1)..(586): unsure at all n locations
tacctgatgcatattaggtattttaatataatttttgggaaaattccagttaaaaaaacattcaaggtgacaaatttttgacttgctcttaatttttggtgaagtgggagggttcatttattattcgactttcaagacaattggcaatacatgtatnnnnnnnnnnnnnnnnnnnnnnnnnnnnaaggtttttaaaataagtaaaacatagagttttcacaaaaaaaaaaaaaaacagaaaataaaacttagtgcattgaaaactcataattaactaaagtgtctgttttaaagacatcaaaatttgtaaacatcaaaattaatatttttaattattttcgagttttattttaattattatagatataatttatcgctttccgtatatttatcatattttgtatttagataagttggtggtcccatttttcattgaaacttatcttaaatcatagactttaaaaattttaacgtgaaaaattgatcaatttattcaactttcaagacgattggtaatacatgcatttccattgaaaaagaaaaaaacattcctgactattttaagctttttatatagtaaaacata

SEQ ID NO: 21565 - DNA, 414 bp, Arabidopsis thaliana landsberg
cgctaccatgtgcctgaaggactgatgaaagtaaggaaggaggaatttctggctttgaagcaaggtcccctgtctattagtgggtacagggacaagtttctgcagatgtcacgctacacaccagaagatgtcaacatggatgctaagaggcagtaccgttttctgagaggtttggttgacccccttcactgccagctgatgaaccacactttccctaccttccagcatttgatcgacagagcaatcatgactgaaaggaagcatcgggagatggaggacaagaaacgcaagattggtggatcttagactgagagtagcagtcgcccctgctactcaggtaacccatctcagcaatttaagcaaggtgcacagcaccagcgtcagaccaaatagcagtatcagtggcagttttct

SEQ ID NO: 21566 - DNA, 586 bp, Arabidopsis thaliana landsberg
  unsure (1)..(586): unsure at all n locations
gaaacaccaagagcatcgttgacccgaaactgatggaggactattacacttacggtgcatggaagattgtggagctggctgtttcatgtgtgaacccttcttcaaaccggagaccaacaatggcacacgttgtgacggagctaagcgaatgtgtggcctttgaaaatgcaaggcgtcaaggtagtgaagagatgtacacaagaggtgctactgactttagctacacatcttcagcttccgaattcgcccctggagccagataatttgaaaatatatttgatatgatttcatggaaagttatcttgtttcctttttttttatttcccttgtgaatttcgatttcccaatgtatgttttgaagaaacaatgtacattctataatttccttggtataaaactgtgtgtttcttgttctagtaaaattgaatctggatttgttcccagggattaggaaaaaaccgaacctggttaacaaaatttttgtttcgtttatttccttcaatntacataatatttaagtggcatgcacagactatatgataaataaaactcgacacaatttaagagactttntatgagacacact

SEQ ID NO: 21567 - DNA, 572 bp, Arabidopsis thaliana landsberg
cacacaaaaaccacgaaaagtagacaacagaaaaagattgcatttaaatttaaaaattattgataagataaaattggtgggaagttataatggacatatgtggctaatgtattttatttttgttagttaattagttatacactggccctgttctttgattgatcgctaagtcagctacctgcgatctaaaaaaaagctctcatttctctttcactttcatttctcctctctttcatctctgccgcagtgactataattcggccattccgtagacgctggaattttcagcgtctcaaattctctttctcctatctcttcagatctatcgctgcgactctttcattcatcttaccttcatctctccttcttttttcttttatattttgtgccgccggtgcttgtcgcagcgatcaacaaaagaacagggtaagtatataaacttacatgtaataaattatatttttataattaatggggtcacttgacccccttctttcttaataggtccgccggtgtgcgtaagtaggagattcatttgattaattatgaatatagaagttcagaagtggaaa

SEQ ID NO: 21568 - DNA, 728 bp, Arabidopsis thaliana landsberg
cgacgagtccaccggtttgaatttctcatccgacgctgattttattagcagcggaaaaagtggtacaatcaagaccgaagactctgattttggcgtgaaatacataaagccatataagcagcttaggtattttcctgaaggagcacgaaactgctataatctgactgtcatgcagggcacacattatcttatcagagccgtgttcgtatatggaaattatgacctcaaacaaagaccaaaatttgatctatatcttggccccaatttctggacaactataaatttgcaagatccttggggtggtttctattatcggatttggttggaagatggtaccgtagaggaggtaatccacatgccaaagtcaaacaatttggatatttgtttggttaagacaggaacaacgacgccattcatatcatccttggaactacgtcccttgagagatgacacctatactactacaaccggctctctaaaactaaatctccgctggtatttcaagaagccttcccccactcatgaatccatcatacgggaagtcaactcatcctatcttacgggaattttcttggttccatcatacgggatgtcaatcatttaatggttcaattttctttccaaattaaaaatttatatggaatttggtcaatagtaccacattttaagaattcctttccatttataccacatcttaaaaaaaaaattcatttataccacattattat

SEQ ID NO: 21569 - DNA, 2175 bp, Arabidopsis thaliana landsberg
ttagtttggtgaaagatagaagtaaactggagtgggccaatggttttgcgtgtaagcccaaactttggaacgattttagcccatctcaaaaggagcgtgctatattttgtaaatgaaattgcaaaattacctaacacaaattttcctataaaaaaacatttcgggtaagaaaccgacaattataaaataaaaattgtaagacatgttttattgacacatggaaaaatgaagttggcgaaaaagacaaacagtaaacgttaagataaaaccctacctataaatataccttacacgccacctgactttatcaaaaccaaaaacacaaaccttcaacggcacgctttctcctctgaaatctctgcgagcaaacttcttcatctacctcttaccgtacttcaggtttgtgtaaatcatttttataagaacttcagtgaaatagattagcaaccctaattgaatttaatcgaatcgtaactattgtgaacggaacccatccatcttgcataaaaaccctagtttctgaacagcctttcgaaacttctagtgttattgtattggctctgatcaacgttgttctaaagttgtgaactttgattgattgcaacagagtgtttaagatgaaatctgtcgtaatgtcgaagaacaagggcttagctgaacaagatctaagtaaacttgatgtagctcagctgcatcctctctctcctgaggtcatctctcgtcaagccaccattaacataggtatacacaagtttttgtttcattgagttttgatgctgaagaaactgatcagccgtgcattgaaagctaaagatatgactatgctctctatatctcaggaaccattggccatgtcgctcacgggaaatcgacaatcgtgaaagccgtttccggtgtgcacactgtcaaattcaagagtgaattggagcgtaacattaccattaaacttggttacgcaaacgcaaagatttacaaatgtgaaaaatgccctagaccagtagcctacaagtgaattcttgctcttcttttgctacaataaggttacgtagtgtacgtagcaacttatgatatgtgttaattataggtctttcgggagtggcaaagaagacaacccaagttgtgatgtctctggacatgagaagtacaagatgaaactactaagacatgtctcatttgttgattgcccggtataaaatgagttttaacactatttctaaatcttttgtaaccattttctatatgttaatgaggtgttttgtgtgttgattagggacacgatatcctaatggcgacaatgctgaatggagcagcgattatggatggtgctttactaatcattgctgcgaatgagacatgttcacaaccacaaacaggtgaacatcttgcttctgttgatatgatgcatcttaaagatatcataatcattcagaacaagattgatctcatccaacaaaacgaggctattaaacagcacgaggacatacagagatttattacggtttgattcaattttgccattctgttttttttttgcatttatcacttcttgattagttggataagttttaaacttgttattacagaacacgaatgcggaaggtgcacctatagttcctgtctcagcgcaactgaaatacaacattgatgttgtgagtgaatacattgtcaagaagattccaatccctgtgagagactttgtgtcaccaccaaagatgattgtgattcgttctttcgatgtcaataaacctggctcggcgggtcatgaaatgaaaggtggtgctgctggtggaagtatcctccaggtatgtttttatctctctgtttctcctctgttcttacctgactgtgaaacaatttagtattaatatgtgtctctctttgtttgggtgttttgaaagtgaaccaactgattgaaattagacctggtatcactggcaaagatgagcatggaaactcaaaatgcactccaatttactcgcgtataacttcactatacgcggaacagaacgagcttcagtttgctgtaccgggaggtctaatcggagttggaacaaccatggaccctacgcttacgcgtgctgataggttggttggtcaagtccttggtgaaatgggtactctccctgacgtctttgttgagcttgaagtaagttaccagcttctgactcgtctcat

SEQ ID NO: 21570 - DNA, 736 bp, Arabidopsis thaliana landsberg
tattttctataaatttcaaataaatttaatatcgatccaaactttatcattgaattttgattgttaagaaattaaagctaaacttcataataaaaaaattctatttttgtaaagtttctattttttataataaaaaaattttataataaatatttaaatatttgtaaagtttctaatttaaaataaataaaaacccaaataaaccggataaccactttaattttggacacctgataaatcaagtttcctgcttattcgtaacttgaatcattttggttctttttatagtatggctctaaaccaatgtccaattttttaagcgatgtgggatacatattatttcttcatcgattgaataatatatgtccgttttaaaatttttgaattacatcatattaagaaaaaatataatattttattaactatttatattttatataaattcaaaataaattaaatataagatccaataaatttgaaagaagaatcatatatttatgtttaaattaggtaaagatggtttaggaaattagttaaggtaaataacaaatatggttagtttagagatattatatatattaaaattgttaattaaattaattttatttttaattatttgtttgatagaaaatggtaataaaaaacaattatagaatatcagattgaagattttcgaatcaaaatcaaataaaaaaatccgatccaattgaatttcttaaaatatacttaaaaaatg

SEQ ID NO: 21571 - DNA, 1052 bp, Arabidopsis thaliana landsberg
catgcctgcaggctagaggatccctgtgtatcacttgttttaaaattaaattttagttatacaattaaattaaactaaaataatgatattttaatattggagatgctctaattatataaaaatgaataatctatgactagtaactaaattagtagataagtttaacgaataaaaatattgactatccaacctaggaaaagttctatagatgtagactgtggataagttagcaagtaaattatcgttgaagagtaaacttctagacaagaatttaataactttaacgaccaaaaaaagaagataataattaataacttgttattctttttctttttttccaactaatttaatttgttcttctagacttcaaaatattgtattttttttgtggaggaaagcaccaagaacattcctttttccttaactaacgtataacgactgctgatttcatttttcttagtctcataagtgttacgcgtgacgcaacccgtgacgcggtgacgcttataatatatcctaatccttacgcagcaagtcacaaatgggtattttcgtcaattaaaattactaaactaatttctagtataaatatgagacacaacacacacaaactaaaaactcgatcatagaataaaaaaccaaaacccttgaagtcactaagttgattcaaaatggttgcgagaagtgaggaagttgagatagtggaagatacggcggcgaaatgtttgatgttgttatcaagagttggagaaggcggcggaggaggagagaaacgagttttccgatgcaagacttgtcttaaagagttttcgtcgtttcaagctttgggaggtcatcgtgcaagccacaacaaactcattaacagtagcgatccatcacttcttggatccttgtctaacaagaaaactaaaacggcgacgtctcatccttgtccgatatgtggcgtggagtttccgatggggcaagctcttggtggtcacatgaggagacataggagtgagaaagcctccccaggcacgttggttacacgttcttttttaccggagacgacg

SEQ ID NO: 21572 - DNA, 589 bp, Arabidopsis thaliana landsberg
acgatccccttctcccccaaatgctggaggaagaagcgggtcaccagcccatgcggaaggcaggaccccaactcggctcgccttccaccccagcgagtatgatgaacatccttgaagctgagggcagggggaggttgcagcccgactcgcttctctccaccatgaggctagtggtcatccttgtagatgaccactggcgggagactgcagccgggctgcatgatgaaaatccttgaagccgagcgatggcagaagagcgccaacccccacgaggtcatgctcctccaacaacagcaagaagacaagatcggcagcaccaccgcgcaggaaacgaagagtgcgagctccccgacagtgagaccgctggggagggtggccctgacacggatccctccagcgaacaccggcgtgccccatccagaggctcggaaggcggaagggcacggtgaatgcaagaggagcgaggcatggctactgcgcgggggatgagcccctttttaaaggcagatttccccgccgtgccccgaagcgttacgggcaaggtctccccgatgcgcacagggttcgattctatgacatgggggccagc

SEQ ID NO: 21573 - DNA, 970 bp, Arabidopsis thaliana landsberg
ggaaaccattatacgaatatctgtctgagttacaaaatattttcactatttaaatcatgtcgattatacccactgaagggtatttccgtcaatcccaattctaacaatgaattcaggagtataaaaacgtaaattcaagcgtgccaattataaaccgtcgatcataatctaatccaacggcagtaacatcgatccgcgtgattgtttattattggataagaatcactcaaccgtctctacacagtatatataataaccaaagagcgtcctcttacgcttatcttaatttccctcgcattgagaattttcaactttttctatctctcttcccaaatcacaaatggcgggtcgcggcaaaactctcggatctggcgttgctaagaaatcaacatcgagaagcagcaaagccggtctccaattccctgttggtcgtatcgctcgatttttgaaagccggtaagtacgccgagcgtgttggtgccggagctccggtttacttagccgccgttcttgagtacctcgccgctgaggtaatcattctcttctatttatcacctgtctaatttactctttttaccgaattaaatggttatagcttgcatctagggctctggattttagattttcttacccctttcgctaaattatgcgacattcgcaatattttagaatgcattagttccttagtttgtttttttcttgggaaaaattgtccatttttttttgtgtagttctgagctcaatttgtgtttctttgcgctcatcatgcttatcgaaattagggataactttgatccttactaatttgagttatcatagctggcactgattgatactgtcaattgtgttctcaaatttgaaaaatgttgttgttcacttagttttgactttggatacgtgaacatgtctgcttgtgaactgaatttggcgcgctcactttctataggtacttgagcttgctgggaacgcat

SEQ ID NO: 21574 - DNA, 549 bp, Arabidopsis thaliana landsberg
gatgggattcttctaacattcttcttgtcaacaatttctatgcatgacgacataaaatcgcagcatttctaaacttcatgcaacaacaacatatcgtcttgtttgaaacatcataattaaccaaatgctcccgtgatacaccacgataagatactttatatttatataccatctcagacttactaaccttgttggcaacataatcaccaataactatgtattgtttctggaacaagctacaaatttcgggtgtatacacttcctctgcatgttgcaacatctccaacatctctacagtagcacataataccggcgaggtatgcatcatattgaaatcaccaactaattccttatatcgttgatcttccaacactctctcggagtgttcagagaagcacaacaagttataactatgcttcaagtatttttttcaaaatattattcatacttttactacgttgtgtgctcaccatatctgctgtaaaagtatgacgtccatataccattgcacaattttctctcagttcaaacaaattcttcaaccattta

SEQ ID NO: 21575 - DNA, 1982 bp, Arabidopsis thaliana landsberg
agctaaactatcactgtcagcttattatattataacagcatgtgtgaaagcaaaacctcggtcaagctaataacattcaataagtcaacttaacatgtcatgtagaggaataactagcttgagaaagaccaatttgtcttttagtactaaggaattacattaacaatgcaagtagcccacaaaacaatcaacaagttattgaatgataatagactactcaccgggacaagctttgatgctaccgatgcattattgttcatccaagattcaccatatccccattcatcttaagaagaataatgctttgtcatcctataagtagtaatcaacttttctagattctccatcacattctttgtcacctgttcctttttaaaatggttgtcttccgcatattcagattcaccatcttccttaatcataactcctgcaaaaatattcactaatgtcatgagtgtctctgtcaaagacagaaaacatcaaaaagcagcccgagaatcacaagattgttatcttaggcactacagaagcatcacaagctcaacatcaattgtgttactggtttgtactcaggaatcacagaaacaaaacgattatattaccacaaatttccaaatcaattctacatatgaaaaactgtttttcaatggctacaaattggagatactttcagacaaagctctctgtaaagaaatgcaaatgataacaacaaaggacatgttctttctttctccagcttaaagatcagtgagagacatttgcagcttgcttatgatcatcatccttgaggtttctgtatctgtatagccaagaacacacaagaaaatagccaagattcaagactcctcctatgactaaaatccagtaaacattggcaactcttacatggtttatgtcatctggtaaccacgccgtggtcctttgaatcagatctatcaaagcagtgcttgtgtagaaacatatcccaatcaccaccgacgttatcgatgttgcggtgcttctcatagactctggaaactcttgatagcacagagctacattccctgggaaatggaaggcctctcctgcaaccaaaagacagaaccaagaacataaatagatggaactcacttctgagtcgaataaaatgatctggatccaattccttaccgattcctactatgactagaggagggaataaccacaagactgacatgtcagcaacagatgatgatccgagaaaatgacctttctgtactatcttcaatcgctttgcttcaactatggcagtcacagccatgcttagaatgttgaaaacgtggcctattcccaccctttgaatcggtgtggggaacttcccggttagtttttggtaaaatgggtagagaaaccgatcgttgactatgataaataggcaagtggagagaagtgttatgacttggagagagcctgcagggatcttgaagtgagggccaagtctccggtccatcaccagaccctgaagtactgttaatcctagctgcatcgcgattggagtgctcaagaataatatagctaacacaagagggatgattcttatgactgctttgaaatcttctacttgttgaacgctgcatagtctccattgattgtgaattgtgccgtctgaattaacctcatcatcctgtttcaatgctgcgcggttaaagaacctgcatacacgaggattcgttagatggcctcaacgagtccctttcttgtaaaaatcagactgaaatggcggtttttgaggtggttttacctgaaactctttgtgggcgttttctttgattcactgtggtagtctttctcgttggtggaaaccacagcttttcttttacgtatggcagcgaagatgacacgaagtaaacttgtgaagggacttcccaaaggcttgtcatgcttgtagaattttttccccgagcagaaaactatcaagcctaacagattagcagctacacacagaccaaacccgaaactccagc

SEQ ID NO: 21576 - DNA, 576 bp, Arabidopsis thaliana landsberg
ctaagacccagtgttatctgactcatgttccggcattgggttaggttgatctgctccccaaccgccaggctcttatgatattggaatgaagggaactcgaaattctcaaccccgtgaacaagaggtccaggaggagaagaataagcagcattaccaagcaaatgactatccggtaactgttctgaaacgttctcaacaaaaggatagttccagagccgagggctttgctcgttcatggtatatccacccgggcaaggaaacgcggtttctggttctctaggacgttttccggtagacatgtaaggagatggtggtatcaagttatacacattaggcggctgaaagaaacacggtttttgtctcacaaagacgttagtgggaggaacatgtcgaagcattgactggtagtatgaagaagatcgattgagtggtaaatgctccaaatccacttcaggaatctcaacagtatctgccttcatatattcttgactatgatgaccatccaatgaatcagtgtttagaccggaatgggtcgctacattcatcgcatgctctcgaacttcatcgggggtaaca

SEQ ID NO: 21577 - DNA, 492 bp, Arabidopsis thaliana landsberg
gggctactgttggggggcttggtcttccgaatgtccttaaaaacatgattaacaatgtttcccaagtgtaatatatgtacaggaacctttggactcagattggagctgcatacaatatggaaagcagggtcaggacgaaggttgaacctgctccgaagctgcgcgcaagggagctttggcccagtagcagaaaaaggaactgacttaaggaggaaaaggctacctagtcctcgatagattgtccttaagtcaatagtaaacatgaaggacatgaatgtaatttcacacaggctacgccctatggctataaatagatgaacagtaccctcgtactgttcacgctgactggtattcactcacgcgtcactcttggactttcaccttctgtcgagccgaaggtataaatgtaattcaatattgtccatgtttattcatgatgatataaaaaagatatatgaaagatgtcatatgattattcatgttacttctcat

SEQ ID NO: 21578 - DNA, 898 bp, Arabidopsis thaliana landsberg
ttgtacgtacacgtaatacttatatcttttattacatacacgagatgtgattgttgcgctacttgaggttggcaacttgaccgaagactaccgtgggctgaagctttcttttaagataatggatcaatagtaagtgcttctgtgttaatttttaaaaaagttttcacctttatgtttctgatcttccgtataatatatatattctctgtagcaaggaagttcttcaatgtgaatcacacaaactacaagctttggaatttcaaagattcttccaaaggctaactggtccttaaaatgttattgctctcgtttcctggcgtctgagcgggacttataaactgaagattgtgagcaattgccccatctccaaagtcgttgtgtattagtttttctgttgtttctgttattcttaaaaactacagatttgtaaccgaatttaaacatatcctatatttatgctaaagttttaccttctaattgctacagtttacttattacaaatacagcctaattgtaatgactttccatggacgtacattagagtttgtgtacgttcaaataggtgtactatatgtataatgtaaacaaacttagttccattcataacataaacaataaaacaaggaaataaaaaaacgttaaaataagagtaggaaatacaaagcataacaacaaaccgagtagagcatacaaccatgttagtaaagccaaagcatataacaggaaaacatatgctttacaaaaaacccgaaattatagccgatgcatagaatgggaaatcagatgctgaacgaacgcctttccttaatacaaatatgcacaactccctagcataccagataaaagaagcaattgcggcagcaggctccgtagctgcaacgacctaagcagtgtggta

SEQ ID NO: 21579 - DNA, 557 bp, Arabidopsis thaliana landsberg
aagccaagtgtttgaatttcggattgatttttttgcattttgttcatagctgaaaacaagaaatttgttcctcaattgtggagtgcaatgtgattcctctaatcacctacccaacaattcgaacggtaatgtcaaaaaacgaagaagtggatgaataaattttgaactgatttctaattctctctcgaatctctctgtctcgttcttcttcttcgttttcttcgtaaaaaattgtttcttttttcgcaaaaccaaaccgcaaaaataactaaaccgaaatccataatgatgtttggtttatctccttagtggcattttcgtcgtaaagtatcttaactttcaaaccataaggtcatctccaatgggagactctctaaagaaattttagagttctctgaattaatttcgaaaaaaaataattcaaaatggagtaaaattgagagagtcagctctctcaagagagatttgtgaaggtgagagaggcgacgacctgtcctaacgtgattggatcatcaaataaaccattctcttcttcttactcttctctgggggaccac

SEQ ID NO: 21580 - DNA, 846 bp, Arabidopsis thaliana landsberg
gtttgaaagattggaagcggaagggagcaggagaggcagcaacagtaagtgggatgacaaatctgaccacgatgatgtaacaaagatatatgtaaattattctcttagtggcatagagtccattcgtttcgactatgtcaaaagtggaaaaccaaaggatggacccttccgtggtcaatcgtataatacttacacgcacacggtataagatgacattagaattttttttttctctttttatctttctgtcaaaccctttttcgcttttttcgcatgtgggaaattttgtaatatcattttttcaccaaattttgcagtttgagattaaccatctaaaatatgaacatctcgaatctgttgagggctactacacagaggacacagggattgaagcacttcaatttaaaaccaacttgcggatttctgaaccgattggatatcctggcaaggatggtattaagttcatattagcagtagagggcaaaaaaatcattgggtttcacggaacaacttattttaggctgtactctctaggagcatatttcactcgggttactcctacaagaattgaagcgatagggggcaaggtaggcacaaagtgggatgatggagtcgaccaggcaggttttacaaagatacatgtacgaagtggtcaagaaggcatacaattcatcaagtttgagtatgttgacaataatgggcgtctgagagatgggtcaatccatggttctatttatagaagaggttccccacacgtggtatgtactacatatcatggagaaatagtaaaaattctgtttattcaattgcatgagtataatgctaaatcttagacgtaaacattcg

SEQ ID NO: 21581 - DNA, 719 bp, Arabidopsis thaliana landsberg
caacaaagaccgaacatttagaaagctatcgaattaagcaaagagaattctcatttataagtgtgactgaccagcatgggggcagggtttatatcacactgaagtaccccacaattctttaaatgtttaagagcaatgaatagctgctttgaataagccctaacaccatagagtcggagaccaatgttgcaaccaaacttcttcaagacctcacgaagattcaaatggagcgactcaaacaccaagcaaaggtgattacggtacttaaagcttgaaagaaatcgaacacagtggcgcctgtcttctcggtcagcgcctgccagcttcttcaatatttgaacctcaatctttccagctttatgcctaaacaaaatgtgattcagtaatcagatacaaaagcataaagatgataaaacatatgaattcgaaaaattagttggggcctagagaatgcaccacctacatcgtctcattgttacggataatttttattgccacctcttcaggttcagctggtccagctttcaagtctttagcacgaaccacagtagagaagacaccttttccatgagtagcaatgacttcatatctaccatcaagtaactcgccaaactgatagcctaaaaggagaggagactcaatctttacaacgaaaaaataaaacgtaaaagtgcgttcaccattcatgattgaaatgtagagagaaacacacttactat

SEQ ID NO: 21582 - DNA, 580 bp, Arabidopsis thaliana landsberg
ccgtgcacccaggctacggccaggccgcataagggaacgaccaggccatccgaggcaacgcaaaaaattaagacctcagaggagtcaaaccactcctccgaggcctcacggggctacacccggcgggtgcgctcgcgcacccaccggaacaaaatataaccgagaagggccggtccccttgcaaaaatccggcagaacctccaagcaagtgcccgcactccatttgaggctcgggggctactgtcgggtaccgtaattaggggtaccccaatgctcctaaacacgatcgaaaaacatcttcagaacaaaccatacacgactgataaagtgttgttcaagtcagggcctcgtctgccgagggacgcgacctcacccaagcctagcctcgggcgagaacagtagtcccgaacggattcacgtctcgcccgagggtcccctcagtcagcagacgcaccctcggctcgcccgaggcccagcttgggcaaactttgtcgtgcagcgaccttggccaaatcgccttaccagccgaccgtatcgcatgcgcatttaatgcgaggatcacctgacacgttatcctgat

SEQ ID NO: 21583 - DNA, 561 bp, Arabidopsis thaliana landsberg
cgtatgagatgatatcttgtcgttcgaactgtgagttgggataacaatggcgacaatctctgttttcagatggcagctaggcaccgtcgcgggcagaacgagcaggttcccccgccatctcctccagctcccatagtgcaggagctgatggcccagcagaatgagattttgcgacactcgttgcagcgtcagcccaccctcagcagcatggtggaggccagcatcagcgacctccggctatggcaacttaccaggagtttctgagcacgcagccgcccttgttcaccaaggcagaggattcattggacgccgacgtatggcttcatgtcgtcgagtccaagtttccccttctcacgggagactgccctgatgaggccaaggctcgcttcgccgcacagcagcttcacggccctgctcggacttggtgggaccacttccgtgctatgctccccgctgatcgtgaagtatcttgggaggaatcaagactgccttcagaggacaccacatcccagctggcattcttgatcggaagttgaatgaattcctggcccttaatcaagg

SEQ ID NO: 21584 - DNA, 1094 bp, Arabidopsis thaliana landsberg
tgccatgtccaatagagttctattcttcctctctactacaccattttgttgtggtgtgtagggagaagagaactcatgcttgatgccctcctccccaagaaagctttcgatttgtgagttcttgaactccgccccgttgtcgcttctaatctttttgatccttaagccgaactcgttttgagttccgtctcaagaatccctttaatgtctcttgggtttgagatttttcctgcaaaaagaacacccaagtgaagtgagaataatcatccactattacaagacaatacttactcccgccgatgcttatgtaagctatcgggccgaataggtccatgtggagtagctcaagcggcctatcggtcgtcatgatgttcttgtgtgcatgatgaacaccaacttgctttcctacttgacatgcgccacataccctgtctttctcaaaatgaacattggttagtcctaaatgtgctctccctttagaagcttatgaagattcttcatcccaacatgggctagtcgacggtgccagagccaacccatgttagtcttagctattaagcaagtgtcgagttcagctctatcaaaatctaccaagtatagctgaccctctaacactccattaaaagctattgaatcatcacttcttttaaagacagtgacacctacatcagtaaaaagacagttgtagcccatttgacacaattgagatacggaaagcaaattgtaatctaaggaatctacaagaaaaacattggaaatggaatggtcaggtgaaatagcaattttacccaaacctttgaccaaaccttgatttccatccccgaatgtgatagctcgttggggatcttggtttttctcgtatgaggagaacatcttcttctcccttgtcatgtggtttgtgcacccgctatcgattatccaacttgagcccccggatgcataaacctacaaaacaaatttgttcttgactttaggtacccaaacggttttgggtcctttggcattagacacaagaactttgggtacccaaacacaagttttgaagctcttgtgtttgccccccaacatacttggcaaccaccttgccggatttg
